United States Patent Application Publication US 2007/0161031 A1 - sequence listing, part 3

SEQ ID NO: 2568 - DNA, 2300 bp, Homo sapien
atatgtgcacactcacatacatgttttacatgtcttccaggatattctggaaaggagctgaggaatagattgtatagatttacacggaggctggtcacagtggctcatgcctgtaatcccagcactttcggaggccaaggcggctggatcacttgaggtcaggagtttgagactagcctggccagtgtggtaaaaccccatctctactaaaaatacaaaaaattagccaggcatggtggtgcgcacctgtagtcccagctactcaggaggctgagccacgagaatagcttgaatctgagaggtggaggttacagtgagctgagatcccaccactgcactccaacctgggcgacagagcaagactctgtctctgaaaaaaaagaaagaaaatatttacatggaaagtcaccaggcaaattattccctaatgagactaagagggtagctgggcgcagtggctcacgcctgtaatcccagcactttgggaggtcgaggcaggcagatcacgaggtcaggagatcgagaccatcctggctaacacgatgaaaccccgtttctactaaaaatacaaaaaattagccaggcgtggtggcgggcgcctgtagtcccagctactcaggaggctgaggcaggagaatggcgtgaacccaggaggcggagcttgcagtgagccgagatcgtgccactgcactccagcctgggcaacagagtgagactccgtctcaaaaaaaaaaaaaaaaaaaaattaagagggtagcgttatcatgacctgtgttcaagactccagtatgtcctgcttctgagcccagcaggcagagtaaggtggataggaatgagacaattctcatgtcttttttttttgagatggagtctcactctgttgcctagactggagtacagtggtgctatctcggctcactgcaacctctgcctcccaggttcaagtgattctcctgcttcagcctccctagtagctgggattactggcgcctgccaccaagcccagctaatttttgtatttttagtagagacaaggtttcaccatgttggccaggctgatctcctgacctcaggtgatctgtccgcctaagcctcccaaagtactgggattacaggcgtgagccactgtggccagcttcatctctccattgagctgttaccacagcatcttctgaccattgacaggaggctgtaaacctatcttgttcatgggtgtttccacagacacttgcatagtgcctgactcatagtagatgttgagcagatacttattaacttcccttaagaacaaagcaaaactgtcttttcttattcccttgcctataagctctcaattgcctatcacactaggcctagcacactgtgcctagcacgtatgttgctaagggtttctgaattgaatgaacatgggaaacataaaagcagaggaaaggataaaaactctacacctgtaggacggaatgaagggaacataccaagtgactgaatgtgggagggaaggtgtggcacctgtagcagggaaagagactatctgctttctcccttcttccaacctgcatcctggaagttgagaaagagatgaggtgaggccgggcacggtggctcatgcctgtaatcccagtactttgggaggccaagacaggtggatcatctgaggtcaggagttcgagaccagcctgggccaacatggtgaaaccccgtctctactaaaaatacaaaacttagctgggcatggtggcacgcgcctgtagtcccagctaccagggaggctgaggcaggagaatcactggaacccgggaggcagaggttgcagtgagccgagatcgcgccactgcactccaacctgggtgacaaagcaagattctgtctcaaaaaaaaaacaaagaggtgaggtgaggtcagtgttaccagaaaggaaataactgaccatggctgagagacttttagctgaagccatgcagcaggtgctttaagtcagacaatgatgggtaaatattgttcctattctctatagctccagacagacagaagaaagggattcttttcagtctagaaaaatgctcaccccttcctcagaacatttccactgtgacgaaaagagactgatgaagcctcagagagaaaggcaactctgggtggtgatggtaagtcagagacagtgagagggagggtgaactttttatgaggccttggaggaaggaaggaaagccgggagaggggaaacttcttggtaggcttattttttatttttattttggtagtgacagtgggagtcttgaatggatctaatctagggcagg

SEQ ID NO: 2569 - DNA, 2300 bp, Homo sapien
ccagcctggccacgtttcaagtcatggcgaatgccagagggcaaagtgggtgggtcttacaacctggtagagtcaagaggcaaagttcagaggcagaacggatggcggttctctgatgtatggcagggcggtgggagagaagggaagagaaagccgtattataggaaaagaatttttaaattgggatgctaaataaccattgatcatagagagattcagcaggaggtgaaaggactgtggaggagaggggtacacacacatctttcccaggagctatcacagagcaatcccagctcagaatatctggggagtttccatagagtgtggggggcatgaaggggtttctcgggtctcctgactccttttattttctttctttctctgcttttttaggtggaagaaggctgctatgactctttggatgggagtctggcaagaggaaattggaagataaaataaataataagtgaaataatctggttaccatctactccttcatgagtctgttctaaagtcacaactaaagagagcgccaggatttagaggcagcaagcgtagattggaaggggaggtgggtgacaattgaattagagggcattatggactgaataaacctgcagtttggagaagactggagaagggcacccacagacaacaggtttattcacagtccatattggtaattctcttgttttattttattaagtatggtgttgaaacagtgtgcttggggaaacgaggttgaggttttagaatctttttttctttttataagaataagcacattgttaaaacataaggtaaaatatcaaaaactacttagaatagacttaaaatattcacacctacccacccctacccacacctctgtccaacaatgtgccttttgcagttggtaattatggcagggacaaactcacttaaatttttttttaattcgctatcctcgggaccctaattagaattgggctgcccccttgcggtctctccgacgtcctatcttcaaccagctcacagtccttgggccctgctctcctctccattgtactctcaaaatgcaaggcgcaacgacaatagtaacgtcccagttacttctgagactctctaaactctggacttgcctccctcccctccttcaaagtctttcgaatcttctccagcggacaaatgaagggactgaagctggacaaaaccataacctaggagatcagggacctaccccattctgttccccgtgcttggaatcagataatttaggacgccgggcccgagaagcctggataaaaaagtcaggaaaaactgagtttcgttttgacctctagcgtcgtggcgggctggcatctgagctggtaacgtgcgtggtaggttatgtaagaaaagggatggaggagccgccccagcgggagccagaaaggacgcggtgttctcggttgcaatccccaccctcctcacccagcagggcaggaggcacccaacttggaggagaaaggggtgggggaggtgaaacagagaccggagagtcacgagggctgggccgccgagagcaggagaatataccgtgtcacacacctccattctctcacacacgttgcagacacaaatcactgacggtttccacgtgctgcgctcgtgagcggaggtgttcaaagagggggcagatgagttacttcccgagacggaaccgggggtcccacgtccgccgccttcagtagcacaaccaatctctgaacactcaaaccgcgcatctctggcgcatcaccatcctatttaaggccacgggctccgcccttttcctcccctcccttcttttccactctttttccatcctcctccttttctcatcaccgggtcctctccagcagccgcatgtaggggaggagcacggaatgcttcccttacagccaatcatcacctggctgcctctctactggctgagcccctttgtactgtagcaaatgggctatggacttcagtaactagagtcacgtgttaccggcgacacaaccaatgagggcgcgagatctgtgtaagcagggggaggcacgtgccgggccgcacgtgtctgggagggggggaaggggcggggcccactgagagaggcggaggtgggtagatagacccggagagacggcgaaggagctggaaaccgagccagggctgagccggctgacaacaggtaaggagattcggaggacaaagcgagctgttagggagtatttgggagtggatttgggggctgaatgcagatcttggtattgggagggtttgcatcacgtggcaggtgcgagcccagagagacc

SEQ ID NO: 2570 - DNA, 2300 bp, Homo sapien
ggtgttgaaacagtgtgcttggggaaacgaggttgaggttttagaatctttttttctttttataagaataagcacattgttaaaacataaggtaaaatatcaaaaactacttagaatagacttaaaatattcacacctacccacccctacccacacctctgtccaacaatgtgccttttgcagttggtaattatggcagggacaaactcacttaaatttttttttaattcgctatcctcgggaccctaattagaattgggctgcccccttgcggtctctccgacgtcctatcttcaaccagctcacagtccttgggccctgctctcctctccattgtactctcaaaatgcaaggcgcaacgacaatagtaacgtcccagttacttctgagactctctaaactctggacttgcctccctcccctccttcaaagtctttcgaatcttctccagcggacaaatgaagggactgaagctggacaaaaccataacctaggagatcagggacctaccccattctgttccccgtgcttggaatcagataatttaggacgccgggcccgagaagcctggataaaaaagtcaggaaaaactgagtttcgttttgacctctagcgtcgtggcgggctggcatctgagctggtaacgtgcgtggtaggttatgtaagaaaagggatggaggagccgccccagcgggagccagaaaggacgcggtgttctcggttgcaatccccaccctcctcacccagcagggcaggaggcacccaacttggaggagaaaggggtgggggaggtgaaacagagaccggagagtcacgagggctgggccgccgagagcaggagaatataccgtgtcacacacctccattctctcacacacgttgcagacacaaatcactgacggtttccacgtgctgcgctcgtgagcggaggtgttcaaagagggggcagatgagttacttcccgagacggaaccgggggtcccacgtccgccgccttcagtagcacaaccaatctctgaacactcaaaccgcgcatctctggcgcatcaccatcctatttaaggccacgggctccgcccttttcctcccctcccttcttttccactctttttccatcctcctccttttctcatcaccgggtcctctccagcagccgcatgtaggggaggagcacggaatgcttcccttacagccaatcatcacctggctgcctctctactggctgagcccctttgtactgtagcaaatgggctatggacttcagtaactagagtcacgtgttaccggcgacacaaccaatgagggcgcgagatctgtgtaagcagggggaggcacgtgccgggccgcacgtgtctgggagggggggaaggggcggggcccactgagagaggcggaggtgggtagatagacccggagagacggcgaaggagctggaaaccgagccagggctgagccggctgacaacaggtaaggagattcggaggacaaagcgagctgttagggagtatttgggagtggatttgggggctgaatgcagatcttggtattgggagggtttgcatcacgtggcaggtgcgagcccagagagaccggcgcagggatcctgatcttgaaagattgggagagggcaggaggccagtctctatgggggcggttcccgtaggatcaccaggtgggttcgcgtgcccagattgactgcttgtgggtggcatggcctcaggtggagaggcttgctgcggactcaggctggcgaatagccctggcgaacaacgggcggaggggaaggtgtctttcaagtcggtatttactctgaactgagggaagaaaagaacggaggccgcgtcagaccgagagctgctctgcggcggccagagagggaatcccaagctcttaatgggcgggggtgggggtagaaatgtctttttctattgtgtttgagaccggtaatattggggagggggagaacaagtattatcccacgcagtacaccccaatctcccagttcatttcctaatccttaaactctggtttcaaactccctcgctttgctcttcagttgcaggttccgatctttgggtactccaggagctgttctatagcccctgcttctggacctatggattctccatctagcgtttcttcctattcctcctactctctctcttcgtcttttcccacctccccagtgaacagtgactttggcttcccctctgatagtgagagggaggacaagggggcccatgggcccaggccagacactgttgggcagaggggaggttcacggcccagcccgggtccta

SEQ ID NO: 2571 - DNA, 2300 bp, Homo sapien
ttaaggattgagattcaagcatgtagtcaggtaaaggaagaacagaagggggttaaaattgattgatctaaaaaaattaagtcgggccaggcaaggtggcttacgcctgtaatcccagcactttgggaggctgaggtgggtggatcacctgaggtcaggagtttgagaccagcctggccaacatagcgaaaccccatctctactaaaaataacaaaaattagctgggcatggtggtgggcgcctgtaatcccagcgactggggaggctgaggcaggagaatcgcttgaacccaggaggtggaagttgcagtgagccgagatcgcgccattgcactccagcctgggcaacaagagcaaaactccgtctcaaaataataataataataataataataataaagtcatagtagcaaaaaaggagtaatataggccccaaacaagaacttcagagaaatacacgtcaaaagagggaaagagaaagagaaatgaacctagcccaaatgaatgcaacaataagattacctctctcaaaacgacccatcttcagcccattgagtaggtctgtgagaggaggtataaatccttggagttctttacactgtaggaaaataggacaaaggctgtaagaagacaaaaaactgcccacaccagcagtggctcttccttcacctccaaatctgggagtcaatactgtcctcacagggtccttatcaaccagctgggtgctaaggcactccaggagaatctcctttcacctgctttctcttaccttctgggcaaacagcaggtctccctctgtggtacaaccttgggtgtttagactggtctccagttcaccatctcttgatcttttcgccccagatcctgccataggagaagccgaaccccgctgtttcggatgagatggtgtatgctggttaccggaaaccttcgatcgatgcctgcagcggataggacccgggctgggccgtgaacctcccctctgcccaacagtgtctggcctgggcccatgggcccccttgtcctccctctcactatcagaggggaagccaaagtcactgttcactggggaggtgggaaaagacgaagagagagagtaggaggaataggaagaaacgctagatggagaatccataggtccagaagcaggggctatagaacagctcctggagtacccaaagatcggaacctgcaactgaagagcaaagcgagggagtttgaaaccagagtttaaggattaggaaatgaactgggagattggggtgtactgcgtgggataatacttgttctccccctccccaatattaccggtctcaaacacaatagaaaaagacatttctacccccacccccgcccattaagagcttgggattccctctctggccgccgcagagcagctctcggtctgacgcggcctccgttcttttcttccctcagttcagagtaaataccgacttgaaagacaccttcccctccgcccgttgttcgccagggctattcgccagcctgagtccgcagcaagcctctccacctgaggccatgccacccacaagcagtcaatctgggcacgcgaacccacctggtgatcctacgggaaccgcccccatagagactggcctcctgccctctcccaatctttcaagatcaggatccctgcgccggtctctctgggctcgcacctgccacgtgatgcaaaccctcccaataccaagatctgcattcagcccccaaatccactcccaaatactccctaacagctcgctttgtcctccgaatctccttacctgttgtcagccggctcagccctggctcggtttccagctccttcgccgtctctccgggtctatctacccacctccgcctctctcagtgggccccgccccttccccccctcccagacacgtgcggcccggcacgtgcctccccctgcttacacagatctcgcgccctcattggttgtgtcgccggtaacacgtgactctagttactgaagtccatagcccatttgctacagtacaaaggggctcagccagtagagaggcagccaggtgatgattggctgtaagggaagcattccgtgctcctcccctacatgcggctgctggagaggacccggtgatgagaaaaggaggaggatggaaaaagagtggaaaagaagggaggggaggaaaagggcggagcccgtggccttaaataggatggtgatgcgccagagatgcgcggtttgagtgttcagagattggttgtgctactgaaggcggcggacgtgggacccccggttccgtctcgggaagtaactc

SEQ ID NO: 2572 - DNA, 2300 bp, Homo sapien
gcctcccaaagtgctgggattacaggcgtgagccaccgtgcccggcatatcttcatattttattctatttgattcccatgacaaatttcgtgagactgaacagggcaaaattagtcccattttagagatgaggaaatagagtgagtctggcaagggccagatagtaaatattttaggctttgtaggctttatgtctctattgcaactacccaattcggccatcgtagcccaaagcagccatacataacacacagtcaaataagcatgactgtaggtcaacagccttatttacaaaaacaggtggagcaggatttgacctgtaaactgtagtctccagacccctggttttaaatgacttcttcaaggtcataggcctgatgagtattagaattgggatagaatccagatctcccaactttgaagccagtgcctttcaccacattatgctgtggcatattttatttattatttgtttgtttatttattttttgaaatggagtttcactcttgttgcccaggctggagtgcaatggtgcgatctcggctcactgccacctccgcctcccaggttcatgtgattctcctgcctcagcctcccaagcagctgggattacaggcatgtggcaccacgcctggctaattttgtatttttagtagagacagggtttcaccatgttggccaggctggtctcaaactcctgacctcaggtgatctacccgcctcagcctcccaaagtgctgggattacaggcgtgcgccaccgcgcctggccctatttatttatttattcatttttaattttttgagacagggtctcactctattgcccaggccagggtgcagtggtgtgatcaaagctcgctgcagccttgaccttccaggctcaggtgatcctccccctcagcctcccaagtagctaggacaacaggccatgccactacacccggctaatttctatattttttgtaaagacggagttttgctttgttgcccaggctggtctcgaacttctgggctcaagtgatccgcctgccttggcctcccaaagtgctgggattacaggtgtgagccaccgcgtccagcccatataatttattttgcatttattatatactactttgttttagtatcttttatgtggtcctagtggtccaggaggcactagagtggtatcaacagtatctgacacagagtagtcattcagtgaaagtttgttgacaagcataataatgtcccaatctagttctatttcgttactttggacctggcttactctgaggtgggcttaagtgttagtgtaagttattagcatcaactgatgatgcacacgtctgtgtctgtgtctgtgtgtgtgtgtgtgtgcgtgagcgtgcgcgcgcactctctctctaagggaggtacgttttcctacagccattagatgttaacttacgtgaataaccataaatggatatgtacaggtagcatacaaataggaggacgggtgtctccacagcgaagaagaaatttaaaaggaggtttttcagtaggtctcattagcacgaaaaggcatagaagctgacataattttttattctaaaccctgcaggtgtttcccatatatctttattgatttcactttatgtagttaaattagtgggaagatgatataggaaactcacagtatgtttatttcttttccttagcacttaggcagatgacgtgtatgaatcaatctatttttcgtccggagagcagatctcaaagagtctgtcctttccaaagagaaaacaggaagcatcctcaggaagcgcctacttctcttgttttccatcgagaaagagaaatggctcaaatatttatcaaggatttcacaggattaaggggtatgaaattgggctgaccttctcagaggccgaaggacttcgactccatgagagggcgagaaacgtgtttcgggggaatttaagtcaatgagtattttgctttgtcaggtgtagagtccaggcccggggaagagaggcagtcaacagaggccagaaaggacgttgctatggtttccacgcacgttgtctccctcggcctgtttctttgcgcggcgctggcgattccgtaatttccgcttccggtagtgagaacccttccggtgggctaggtactgagcgcgcgaggtgaggagttgtgcagggtttggggaaaggaaggctggcttggcgagagggcaggtttgcgggctttcgcccccttttccaaagaccaacaaagagtccttccccaactcccaactcaaccccttttggaactatgtgtggtggttggga

SEQ ID NO: 2573 - DNA, 2300 bp, Homo sapien
ccttagaaaagacacaacccaatgaggggttcaatgtaatactgtttgatcagtgctataaaagagacatcagccgggcgtggtggctcacgcctgcaatcccagcactttgggaggccgaggtgggtggatcacctgaggtcaggagtttgagaccagcctggccaacatggtgaaaccctgtctctactaaaaatgcaaaaattatccaggtgtggtggtacgcccctgtaatcccagctactcaggaggctgaggcgggagaattgcttgaacctgagaggttgaggctgcagtgagccaagatggtgacactgcactccagcctgggcaacagagcgaggccctgcctcaaaaaaaaaaaaaatggtgccatggtgttggttgtccctggaccatcagcagcaatatcagctgggaattgttagaaatgcaaattcttggcccctactctaggcctacagaatcagaaactgtggcacagcaatctgtggtgttctttgaaatagggtttcacagccaagcgcagtggctcatgcctgtaatcccagcactttgggaggccaaggcaggcagatcatgaggtcagaagttcaagaccagcctgaccaatatggtgaaactccgtctctactaaaaatacaaaaattagctgggcgtggtggtgcgtgtctgtagtcccagctactcgggagcctgaggcaagagaatctcttgaacctgggaggcggaggttgcagtgagccgagatcgtgccactgcaactcctgcctgggcaacagagcgagactctgtctcaaaaaaaaaaaaaaaaggccggttgcggtggctcatgcctgtaatcccagcactttgggaggctgaggcgggtggatcacctgaggtcaggagttcgagaccagcctgccaacatggcgaaaccttatgtctactaaaaataacaaaaattagctggtgcttgtaattccggctacttgggaagctgaggcaggagaatcgcttgaacccagaaggcggaggttgcagtgagccaagattgcgccattgcactccagcctgggcaacaagtgcgcaactccgtctcaaaagaaagaaagaaatagggtcttgcttgcccaggctggagtgcagtgccacaatcatggctcactgcagtctcaacctcctgggataaagcatttctcccattctcccatgtcagcctcccaagtagctgggagtgcaggtgtgtgtgccaccatgtctggttaattttttattttttgtggagatggggttctcactatgttgctcaggctagtgtcaaactcctgggctcaagtgatcctcccagctcggcctcccaaagtcctgggattacaggtgtgagccaccatggccagccagcaatccctgttttaacaagctttccagatgactactgcatgccaaagtttgatttcacctgaactagtttacagatgtgataacaattgatttgggcctttgaggaacaagtaggatttcatcaggaagaaaaagaaaagaatgatattccaagtaaagggaacatcatgagcaaagaaaaaaacaagtatgtaggatgcttggagaactgcatatacttaagtgtgactagagcataggcattatagggcacgtgttttgtttttgttttttgagatggagtctccatcttttgcccagctggagtgcagtgccttgatctcggctcattgcaacctccacctcccaggttcaagctattctcctgcctccgcttcccgagtagctgggattacaggtgggcaccaccatgcccagctaatttttgtatttttagtagagatggggtttcaccatgttggccaggcttgtctcgaactcctgacctcaagtgatcagtagggcaggttattaaaagatatatatatagggggcaattgtttgggctttgagcttagactagtagttccaaaatctgtctgtacattggaatcaccttggaaactgaaaaacctgctcatgtccctttccctctcctttgtgatttaattggactgggtgtggcccagggttcggaatgtttaaaagatccctgggcagttctgatgtgcagatgattctgggaactttagtggcttaggccactctgtatattaggaaagattttttagcaccagagtgacatgatctgatttatgttttagggcaataattggtgtaggaaaagagagtggaaatagggcaacctacttattcacatttcagatgagttgttctttaggatcccttcacaaccactttcttgttctcaagtt

SEQ ID NO: 2574 - DNA, 2300 bp, Homo sapien
gaaacaatctcagaaaaaattacctgaaggaaacacagctagtaaccggaaagctacagtttaaatgtatccaattctaaaaattggaaataaaatcagttttgttttgtcgagatggagtctccctctgtcgcccaggctgcagtgcagtggcgcgatcttggctcactgcaacctccacctcccgggttcaagcaattctcctgcctcggcctcctgaatagctgggattacaggtgcccaccaccacacccagctaatttttgcattttttttagtagggatggggtttcaccatgtcggcagactggtctcaaactcctgacctcaagtgatccacccgcctcgacctcccaaagtgttgggattacaggcgtaagccaccacacctggcctaaaaccagtttctagaaacacatttctccatagggaattgaacacagactgttagaagcaccaaaacaaaataaatttacaacaaccctgcaatgttgaaactcattaacccattcaaccgactttttgagtgaatattttgtgagacattggtgttagaagctgtaggtggggaaactgatttgtgaataagttgagcagtaggttcaaactcccccaacttgttccttcagagccaggctttatcctgttatgtcgtgctgccccatcagggaaggtggggcttggtatgtacattgttatctttagatacaaaaatctcctactatctggggaatgtgaataacctccctgaagaacaactgcatcttctagtcagcctaccaccaagaagacattttggaactttagtttggatagtttataatataaaaataatggaattttttccatttctcatataagaaattgtgtcataatactggacaatctttttccaaactatctttgtccacacacatgttgttatgaatcatcgatttaaagagtcagtaggggccgggcgcggtggttcaaccctgtaatcccagcactttgggaggccgaggtgggcggatcacgcggtcaagagatggagaccatcctggccaacatggtgaaaccccgtctctactaaaaatacaaaagttagctggacgtggtggtcgcgcgcctgtagtcccatctactcgggaggcggaagtttcagtgagccgaatgcactccagcctgacgacagagagagactccgtctcaaaaaataaaaaataaaaataaaaaataaagggtcagtaggttagagcctcattttggagaaaagttaatatatagacctattgatagaatggagaaaacaatactggtaggtctcacttgtcatttattgagcccaaagtgctgggattacaggcgtgagccacggcgcccggcctgacaccactgttaaattagggagaaagggtttactttctaccagaaaggctgtgtttgaacacaaacgcagaagcctcgctcttcattctagcctaagtttacttttgcgcacttattctccatatgaggaaaacagcaagtagcccaatttccgcttcaggaagttaaagacattaacttggcagaaatcggccgggcgcggtggctcacgcctgtaatcccagcactttggaaggctgaggcgggcggatcacgaggccaggagatcgagaccatcctggctaacacggtgaaaccccggctctactaaaaatacaaaaaatcagccgggcgtggtggcgggcgcctgtagtcccagctactcgggaggctgaggcaggagaatggcgtgaacccgggaggcggagctcgcagtgagccgagatcgcgtcactgcactccaacctgggcgacagagcgagactccgtctcaaaaaaaaagctaaaaaaaaaaaccttggcagaaatctagctaataggtttagcctgggaaatagaaagcaaggaaattgctcagggaaacttttcggttctgcgacgcatgcgttcagcctccaagaaagtggcaaatacggctgcgcgaattggcggcccggccctccttggtcacgtgttgggagacagcggcgtggcggcggcggtggcggtagcgacggcacgccgtagggcggtcagaaggtttccggttccggtgtaacgttcgggctccgtctcaggggctgaagtttgtgaggtgagtagtggccccgggcccacagagggtaattccagtccgcgccactgtggccggggactcagtccaaggggaggaccgaagcgggagggttcagcgggaaggagtgtgaaaggagtacctggtttggtgggagaagaggttggaatgagattgttga

SEQ ID NO: 2575 - DNA, 2300 bp, Homo sapien
gataagtggcactgctgggaatagctgagcttggaaattgaggtcagtcaatttattgactcccatttagacacctttttttttttttccccgggacggagtcttgctctgtcgcccaggctggagtgcagtggtgcgatctcggctcactgcaacctccgccttccatgttcaagggattctcctgtctcagcctccagagtagctgggattacaggtgcaggtcaccacgcccagctaatatttgtatttttaatagggatgcggtttcaccatgttggccaggctggtctcgaactcctgacgtcagataatccacccgccttggcctcccaaagtgttgggattacaggcgtgagccaccgcacctggctttttttttttttttttttttttttttggagacacagtttcactctgtcgctcaggctggagtgcacatgattttggctcaccgcaacctccgcctcctgggttcaagtgattttcctgcctctgcctcataagtagctgggattacaggtgcccaccacctcacctggctaatttttgtatttttagtagagacaggtgcagtgggtcacgcctgtaatcccagaactttcggaggtcaaggtgggcagatcacttgaggtaaggcattacctggccgatatggtgaaaccgtgtctttattaaaactacgaaattggccaggcgtggtggtgcatgcctgtagtcccagctacttgggaggctgaggcaggagaatcaagtgaacccaggagatggaggttgcagtgaaccaagattacgccactgcactccagcctgggcgacggagtgagactgtctcaaaataaaaatgagggtattcttttctgagctgaaggatcatcaagtcagctgatggagaccctgtagattgaacatgataattacctgtatgcagaattcccactgggatgaatatgaccacagagaaatgtgacagaacattctttttttttttttttttgagacggagtcttactctgttgcccaggctggagtgcagtggcgcgatctcggctcactgcaacctctgctgcctgggttcaagtgattctcttgtctcagcctcccgagtagctgggattacaggcgcctgccaccatgcccagctaaatttttttgtagtttttagtagagatggggtttcaccatcttggccaggctggtcttgaactcctgacctcgtgatccacctgcctcagcctcccaaagtgctgggattacaggcgtgagccaccgcgcccggccagaacattcttaaagatcatgagatttaatttaatatctaagatgactgacctggataaaccctcttttacttgcataccttaaaagaagggaatcctacataagtcagggttgggttagggaatgcctgcctggaagtaggaagaatggaaaagctggcctctggatgggcttttttagttctgttttagtgttactaggtttgcaagtccttgttgatatgacaggatcaagaaagaagctagaactaatttctcagacttagcttattcacagagtttgtttattccgcagatttcattgatcaacttaagagttagaattaaaaatcaaatgggatctctttctgctttgagatatggttcttggggaaaatatttgccttcaaatgagttggaaaaacttgtctagggattgagaatagggctggggaatgcattcctgatgtactaaccatttccctggatcactttagtcttttttttttttttgagagagagtcttgctttgtcgcccaggctggagtgcagtggtgcgattttgacttgttgcaagctctacctccctggttattcccctgcctcagcctcccaagtagctgggattacaggcacatgccaccacgcccagctaatttttttgtatttttagtagaggcagggtttcaccatgttggccagactggtctcgaactcttgaccccaggcagtccatccaccttggcctcccaaagtgctgggattacaggcatgagccactgcacccagcccactttagtcttttcttattctctaacttgtctcttttttttttttttttaggtgtagtattgagtcctgtttgagctattgttctctttttcctgaaaaatggcactgtcaaagagggagctggatgagctgaaaccatggatagagaagacagtgaagagggtcctgggtttctcagagcctacggtggtcacagcagcattgaactgtgtggggaagggcatggacaagaagaaggcagccggtatg

SEQ ID NO: 2576 - DNA, 2300 bp, Homo sapien
ggattacaggtgcctgccaccatgtccagctaattttgctttgttttattttattttatgtatgtatgtatgtacttattttgagacaaagtctcactctgtcacccagggtggagtgcagtggcgcgaccttggctcactgcaacctccgctgcccaggttcaagcaattctcctgcctcagcctcctgagtagctgggattacaggcatgtgccactgcgcccggctaattttttgtaattttagtagagagggggtttcgccacattggtcaggctggtctttaattcttgaccttgtgatccaccccacttggcctcccaaagtgctgggattacaggtgtgagccaccgcacctggccctgtatttttagtagagatggggtttcaccatgttggtcaggctggccagtttctaactcttgacctcgggcgatccaccggcctcggcctcccaaagtgctgggattacaggcatgagccaccgcgcccggccttaggttgatgatttcttacaaaagtaaacatattcttaccatatgatgtaacaattgtgctccttcgtgtttacccaaggagttgaaaatatattcaccccaaaagctgtacagagatgtttgtaacagctttattcatacttgcaaaaatgtggaagcaaccaagatgtccttcaggtgaatggataaataaaactggcacatctggacagtgaaatattattcagcactaaaatgaaatgagctatcaagccatgaaaagacatggaagaaactgaaatgcattttttttttttttgaggtggaatctcattctgttgcccaggctggagtgcagtggcctgatcttggctcactgcaacctccgcctcccaggttcaagtgattctcctgcctcaccctccggagtagctgggactacaggcgtgcgccaccatgcacggctaatttttgtatttttagtagagacgggggtttcactatgttggccaggctggtctcgaactcctgacctcgtgatccacccacctcggcctcccaaagtgctgggattacaggcatgagccaccgtgccccgcctgaaatgcatattattaagtgaaaaaagccagtctgaaaaggctacatactgaatgatttcacctatatgacattcgggaaaaggcaaaactatgaagacagtaaaaagattagtagtcgctaggggaataagggggagggaaggatgaataggtggaacacagaggtttttagagcagtgatactgctctgtatgatactgtaatggtggatacatgcacatttgtccaaactcaaggtataacaccaagagcgaaccctaatgtaaactatgggctttgggtgataatgtgtcagtgtaggtttgtcagttgtaacagatgtatcgttctggtgcgtgacattgataatgggggagggtattcatgtgtgggggcaggtggtatatggaattccttgtgctttccacacaattgccgtgaatctaaaactgctctaaaaatagtctataaaaaagtgggtctttggctagagttacagaaaaaaaaaaaatgtggggtcaggaccaggcatggcggctcaagcttataatcccagcacttcgggaggctgaaagcaggaggactgcttgaggctaggagtttgagaccagcctgggcaacatagggagactccccctctcaaaaaaatgttgttgttgttgttttgtttttttagctaggtgtggtggtgcaggcctgtagtcccagctacttgtgctgctgaggcaggaggaccacttgagtctgggggattgaggctgctgtgcgatatgatagtgccactgcactctagccttggcagggacagagcgagactgtattttagagcctttgcacttgctgttcctaatgccagcatgttccgctccccgtctcgcatatctgcttggttgcttttttctcaatgttcagatcgagttatttctttcgagaagacttcctggttcaccataccaccattcttatactggcgcgtgcgtgccgtgcacacgtacacacacgcgcgcacacacacacacccctttctcccttaccctgcttcacctttttacagaatttaatactgtctgaaatgtacttgttggtggtgtcctgccactaaatcccggagggaacggatttttgtctgttttgctccccatgatctaaaacagtacttggcacaagaggttcaacaactcgttgaattaatgaatagtggacatgaacttgacaaaacaggttccctgcctcaagaggcat

SEQ ID NO: 2577 - DNA, 2300 bp, Homo sapien
acccacctcggcctcccaaagtgctgggattacaggcatgagccaccgtgccccgcctgaaatgcatattattaagtgaaaaaagccagtctgaaaaggctacatactgaatgatttcacctatatgacattcgggaaaaggcaaaactatgaagacagtaaaaagattagtagtcgctaggggaataagggggagggaaggatgaataggtggaacacagaggtttttagagcagtgatactgctctgtatgatactgtaatggtggatacatgcacatttgtccaaactcaaggtataacaccaagagcgaaccctaatgtaaactatgggctttgggtgataatgtgtcagtgtaggtttgtcagttgtaacagatgtatcgttctggtgcgtgacattgataatgggggagggtattcatgtgtgggggcaggtggtatatggaattccttgtgctttccacacaattgccgtgaatctaaaactgctctaaaaatagtctataaaaaagtgggtctttggctagagttacagaaaaaaaaaaaatgtggggtcaggaccaggcatggcggctcaagcttataatcccagcacttcgggaggctgaaagcaggaggactgcttgaggctaggagtttgagaccagcctgggcaacatagggagactccccctctcaaaaaaatgttgttgttgttgttttgtttttttagctaggtgtggtggtgcaggcctgtagtcccagctacttgtgctgctgaggcaggaggaccacttgagtctgggggattgaggctgctgtgcgatatgatagtgccactgcactctagccttggcagggacagagcgagactgtattttagagcctttgcacttgctgttcctaatgccagcatgttccgctccccgtctcgcatatctgcttggttgcttttttctcaatgttcagatcgagttatttctttcgagaagacttcctggttcaccataccaccattcttatactggcgcgtgcgtgccgtgcacacgtacacacacgcgcgcacacacacacacccctttctcccttaccctgcttcacctttttacagaatttaatactgtctgaaatgtacttgttggtggtgtcctgccactaaatcccggagggaacggatttttgtctgttttgctccccatgatctaaaacagtacttggcacaagaggttcaacaactcgttgaattaatgaatagtggacatgaacttgacaaaacaggttccctgcctcaagaggcatggccgcagtgaggagacgttaaaagaattaaaactgtatatgtttagtgggaacacaggagcctttaaattagctcagaggatttacatagatacctgcgataaaatggttcgtataaggttcatataatagttacgtaagactcttgaaaactgtaatgtattatgcaattttaagattgtatcatagctggcgaaaatgaggtcacatcttgccattcttttttcgcctcgaaaaattttatgaggaaaatttcctttcacttcctcatttatttccttttcctgtaacctaaatggtcaagcggctgtgaatgttatcttctatgggcagcaataaatacggtttggtgtcggagtctgcgtagtgaatggctcactggatctggcgcatgcgcatcttttgtggtgccgcaagatggctgccagccattttgtcgcgcgttgctcctccgaggagttgggggcgatggctgcagccccctgaagactaacagtggtctcagtggtgggaattttctgtctctgttgtgtgagctgaacacacccaagagagcggccaaaagcagcaaagggcggggcaggggaacccccccacccggctaaccttagttataccagctccctcacccatccctcccagtttttccttccatcccgttacacgcttatcttctgcgcaggcgcaaaaataatcgtagcgcctcctgggccctgggggcttcagagctcctgcgcgcgcttgtggttctccactcctgattggtcaggttgccccgccatcacgcctccctctgctttcaaggttgagaaggaagcaggggtaggggggtggggccaagtggcgcgtgcgcgatactgttgctgcccctttgctgctattgcgttgcaaaaaaaatcctgactaggtagccttggaccttttctgtgctagcgagtctaaaggaaagaaagatttctgcaactgaaggggcagtcgggtagtattacatttaagatattaacgcccgacctggctcac

SEQ ID NO: 2578 - DNA, 2300 bp, Homo sapien
gcacttcgggaggctgaaagcaggaggactgcttgaggctaggagtttgagaccagcctgggcaacatagggagactccccctctcaaaaaaatgttgttgttgttgttttgtttttttagctaggtgtggtggtgcaggcctgtagtcccagctacttgtgctgctgaggcaggaggaccacttgagtctgggggattgaggctgctgtgcgatatgatagtgccactgcactctagccttggcagggacagagcgagactgtattttagagcctttgcacttgctgttcctaatgccagcatgttccgctccccgtctcgcatatctgcttggttgcttttttctcaatgttcagatcgagttatttctttcgagaagacttcctggttcaccataccaccattcttatactggcgcgtgcgtgccgtgcacacgtacacacacgcgcgcacacacacacacccctttctcccttaccctgcttcacctttttacagaatttaatactgtctgaaatgtacttgttggtggtgtcctgccactaaatcccggagggaacggatttttgtctgttttgctccccatgatctaaaacagtacttggcacaagaggttcaacaactcgttgaattaatgaatagtggacatgaacttgacaaaacaggttccctgcctcaagaggcatggccgcagtgaggagacgttaaaagaattaaaactgtatatgtttagtgggaacacaggagcctttaaattagctcagaggatttacatagatacctgcgataaaatggttcgtataaggttcatataatagttacgtaagactcttgaaaactgtaatgtattatgcaattttaagattgtatcatagctggcgaaaatgaggtcacatcttgccattcttttttcgcctcgaaaaattttatgaggaaaatttcctttcacttcctcatttatttccttttcctgtaacctaaatggtcaagcggctgtgaatgttatcttctatgggcagcaataaatacggtttggtgtcggagtctgcgtagtgaatggctcactggatctggcgcatgcgcatcttttgtggtgccgcaagatggctgccagccattttgtcgcgcgttgctcctccgaggagttgggggcgatggctgcagccccctgaagactaacagtggtctcagtggtgggaattttctgtctctgttgtgtgagctgaacacacccaagagagcggccaaaagcagcaaagggcggggcaggggaacccccccacccggctaaccttagttataccagctccctcacccatccctcccagtttttccttccatcccgttacacgcttatcttctgcgcaggcgcaaaaataatcgtagcgcctcctgggccctgggggcttcagagctcctgcgcgcgcttgtggttctccactcctgattggtcaggttgccccgccatcacgcctccctctgctttcaaggttgagaaggaagcaggggtaggggggtggggccaagtggcgcgtgcgcgatactgttgctgcccctttgctgctattgcgttgcaaaaaaaatcctgactaggtagccttggaccttttctgtgctagcgagtctaaaggaaagaaagatttctgcaactgaaggggcagtcgggtagtattacatttaagatattaacgcccgacctggctcacaggagtgtgggaacaggggcggggaagggccttagcactgagagccgaaaagtataaaacgattagtttcggcgtcaggcgttttgaaaggctttgcaggtcctgttttctgcgtaatttttccgtgattactgactggtttaaacacgaccccttgaacaatattgataaaacctccgagacccgcagcccctccttgcagcgtgtaggagctgccagcgtgcccagcagctggtgttcccgtccgtacctccagaagagcccagcgcgtgcaccatccccaccccctagcttccctccccacctacggctttcacgcactcgcagtgattgttttgcccgctcccgccgccgccgccgccgccgccgccagaggagcagcagcgcttgtgcaaaccgggaagatggcggccggcggcggcggaggcagcagtaaggcctcctcctcgtcggcctcttcggcaggggctctggagtcctcgttggatcgaaaattccagtcggtaaccaacaccatggagtccattcaaggcttgtcgtcttggtgtatagagaacaaaaaacaccacagtactatcgtctatcattggatg

SEQ ID NO: 2579 - DNA, 2300 bp, Homo sapien
agcctgggcaacagagcgagactccgtctcaaaaaagaaaggcagagtcttactttgttgcccaggttggagtgtagtggcatgatcgtagctcactgcagccttgacctcctggactcaagcaatccacctgcctgggcctcccaacatgctaggattacccctttcatagtacttttgatggttttgttttgttttttttttgagacggagtgtcactctgtcacccaggctggagtgcagtggcgcaatctcggctcactgcaaacgccgcctcctggtttcacgcccttctcctgcctcagcctcctgagtagctgggactacaggcacccgccaccacgcccggctaattttttgtatttttagtagagatggggtttcactgtattagccaggaaggtcttgatctcctgacctcgtgatccgcctgccttggcctcccaaagtgctgggattacaggcgtgagccaccgtgcccagtggggtttttttttttaatttttttttttttaattttttgagacagagtctcactgtcacccaggctggagtgcagtggcacaatctcggctcactgcaacctctgcttcccgggttcaagcagttctctgcctcagcctcccgagtggctgggattacagactcccaccaccacacccagctaattttttgtatttttagtagagacggggtttcaccatcttggccaggctggtcttgaactcctgaccttgtgatccactggcctcggcctctgaaagtgctgggattacaggccttgatggggttttaaatggaaacattggcaattgtaaagtcaaacatttgcatacctatcttcagttcagcagttctactcttgcacatgtgccccagaatacagatataaaaatattcatgtcagctttatttatcatataaaaatgtagagaacaagccaagtatggtggctcacgcctgtaatcccagcattttgggacgtcaagatgggaggatcgcttgacccctggagtttgagatcagcctgggcaacatagtgagaccttctctctacacaaaaataaaaacagccacatgtggtggcacatgcctgtggtcccagctactcaggtgactgagatggaaggatcacttaagcccaagaggttgaggctgcagtgaagtgtgattgcaccactacactccagcctaggcaacaatgtggcaaatcaagatccccgtttcagccgggcgcggtggctcacgcctgtaatcccagcactttgggaggccgaggtgggcagatcacctgaggtcgggagttcgataccagcctgaccaacatggagaaaccccgtctctactaaaaatacgaaaattagccgggcatgatggcacatggcctgtaatcccaattactcgggaggctgaggcaggagaattgcttgaacccaggaggcggaggttgcggtgagccgagatcgcgccactgcactccagcctgggtaacaagagcgaaactctgcctcaaaaaaacaaaaacaaaaaagatccccgtttcagaaaagcaaagaaaatgtggaaacaacctgaaagtccatcagcagctcaatggataagactgtggtgtattcatagtgaaatcttttactgcagtgaaataaatgtaccaacctaagtatatgttataaaatgaaaagtaagctacccttcaccttctttctctacatacccagttccattttgaataatgtctgctatattattatagcgtgatttaatacttgcatacatatatattatcagtttttttaaactgtggtaaagtacacataacataaaattgaccattttaaccaatttgaagtgtaggtacagtggcatgaagaacattaacattgttacgcagccatcaccaccatccatcctcagaacttcgtctcactttccagactgaacgcatatacccattaaacaataactctccattccccagcccctggcaaccaccattctactttttgtctctgaatttttctactcctagatacgtcatggtaatggaatcatatagtatctgttcatttgtgactgggttatttccataacataatgactttgcaaggttcatccatattatggcgtacgtcagaattttctccttcttatgggtggataatattccattgtatgcgtccacattcttttacccaatatttttttttgtgtgtgacagagtcttgctctggcccaggctgcagtgcagtgtcacaatcccagctcactgcaacctctgcctcccaggttcaagcaattct

SEQ ID NO: 2580 - DNA, 2300 bp, Homo sapien
accatgttcccatatttactgagtaaatttgatgaaatttacctagtcctgtgtcctagatgtatcagggagagggaagagaaaggataaaggaagttgagagctgggataggaattagaggcaaagggcttatgtagggagcagagagctaaaattctagtcaggcacctctttctgaggtgatgggggagtatactgggagcaaactcttctagagaaagcatggtgtggtaaaagaaaaccaagcttggattcagaaatcaccatcagcacttgctgtttgaccttaaattcctcatctgtcagattaaaaggtctcggccgggcatggtggctcacgcctgtaatcccagcactttgggaggctgaggcaggcggatcacctgatgctgggagttcgggaccagcctgaccaacatggagaaaccctgtctctactaaaaatacaaaattagctgggcctggggtggcacatgcctgtaatcccagctactcgggaggctgaggcaggagaagcgcttgaacctggggaggcggaggttgcggtaagccgagatcacgccactgcactccagcctgggcaacaagagtgaaactccatctcaaaaaaaaaaaaaaaagattaaaaggtctataaagtccctattaagcaccatgagtataaagggactcaaactgacctctgcagattcttgattccagcttttttgtttttgttttgttttgagatgaagtctcgctcttgtcccccaggctggagtgcatggcgtgatctcggctcactgcaacctccacctcccgggttcaagcgattctcctgtctcagcctcccaagtagctgggattacaggcgcccaccaccatgcccagctaatttttgtatttttagtagagacggggtttcaccatgttggccaggctggtctagaactcctgacctcaggtgatccacccgcctcggcctcccaagtagctgggattacaggcgcccaccaccacgcccagctaatttttgtatttttagtagagacggggtttcaccatgttggccaggctggtctagaactcctgacctcaggtgatccacctgcctcggcctcccaaagtgctgggattacagcgtgagccactgcgcgcggccatctttgctccagctttaaagtggttactccagaggctgaggtggtcagttgagcccaggaggtcgagactgcagtgagccatgattgtacccctgcactccagcctgggcaacggtgagaccttgtctcaaaattaaaaaataaaactgttacagtcatttatcataatagcttcttgttgcttttgcccattaccaaaaaaccatgggccacactagacgatttacataaaatttaactcaacaattgggagcaacactattctcattttatagttgagaaaattgaggcttagagaaattaaataggtcaggcaaggcggctcatgcctgtaattccagaactctgggaggccggagcgcggtggcggtttggtgggggggaggggagggattgcttgaggccaggagttcgagactaccctggccaacatagtgagacccgcccccccctcccgccccccccggtctctattaaataaatatgagaagtttaataattttcccaaaattacatagttaatggcagatccagaatttacactaggtctgtctggttccccagtctatgctcttaagttttgctacttgctgtaaggaccacgtaaaataaaatgtatagttaaagggaaattactaccatttcctgtctggttttctcccactctcgccctcaaaagttcacctgcccttgtcctcaaagccacaggacgcctaattgctatttttgggtttcagctgaaacgccacgggtctgggggaatagcgagggtgtgttacattttcggtcttccggtcagccggaaccactcacaccgctgctggtgctgtgtagggtgtacctcttcggagttcctggaggtggtgccagactagagtggcagctgtagtaaccaatagacacggactttgttggaccagaagccaatgaagaattacgtggaggagaagcggcgataatctgtttgaggatgtaggcactggtgtgaaggaacatggccctgtatcagaggtggcggtgtctccggctccaaggtttacaggcttgcaggctacacacggtgcgtgaggcacccccaaagctccgatccgcatcagacttagcccagccgaagcccccaaatttttatgttaacccagcctcacgccactcctcct

SEQ ID NO: 2581 - DNA, 2300 bp, Homo sapien
ggttaattaaccaagggagcatcagagagaaagggacgggagggttaatacagcgttaattacccttgtttattttagacctagatggaatcagccctaagggatgaggagaaaggccttagggagaaaattctggcactgccatgctccctttttcattttccagggttcagggctctatctcaaaggtgaggagcagaaactcctcagccagattacctgattcttgagttttgcacaccccactctccctacaagcacccagagcaagctgtgctgcaatcccagggacttgtacatggcccctttccctcccttaccgcccagtcagcccctgcatacatcctcctcagcagaggcccctcactctgtgaatccagccctaacagacaccaagagccagagtgggactgatgagaggaaactgttctaagggtcagagtggttggggggaggcggggcagtgtgaaggccacaccactcctgccaccttccacttgctctaatacccccttcagacacgcgcgcgcacacacacacacacacacacacacacacagtttctctctgtggggttctcattgtttgtctttctctgcttgactctaatgtctctgacacacacacacacacacacacacacacacacagtttctctctgtggggttctcagtgtttgtctttctctgcttgactcttatgtctctgaccctggggctcttgaccagaagcgataaggcctgcggggactgaagcacttccttgtctcctcaggatgagcaggactggtcatttagtattagcagacacagctgaatacttcctttctgtgaaccatatctgggctctgctcccacccttcctaaagatttaggtctctcaagtttctgcagagcaaaagaaactgttccatgtgggtgaatttgccctgaggttcccaaacttcctctacctgcagtggttggccagaaagagcaaagtaagagaacagtgaacattcggactcgagataatcgtcgccttggggagtgggacttgcctgaggctgtgcagcgactggtggagctacagaacacgagggtcccaaatgccgaagaaattttctgagcctttgtacatagatgaggcaaaaacctgcgagtgccatcagcctccctcacatgggagaccccaacccagctgacaatgtggagcccccagaacttcagaactgtgtggaggcacatgtctgctctcctgaaaagagacttggtttggggaccccacaaaaggagggaagctgtagctgtttggatgtgaggagaatgaaactacaaaaaaaaataaattgggccaggcgcagtggctcatgcctgtaatcccagcactctgggaggctgaggcggacggatcatgaggtcaggagatcaagaccaccctggctaacacggtgaaaccctgtctctactaaaaatacaaaaaattagccgggcatggtggcacacgcctgtaatcccagctactcaggaggctgaggcaggagaatcgcttgaacccgggaggtagaggttgcagtgagctgagattgcgccactgcacccccctaggcgacagagcgagactctgtctctaaataaataaataaataaataaatacaaactggaagctgctggtcatatgtcttcatctctgactctggagaggtgggataaaaggatgttccactttgtctccctcttttttgtcccagagagttagggaaattgaaaagggacagtccagacctcacactggtaggggagatcccttggataggtttcctgctccccgctgtaaactcctttgtgccctgtttccccaaccccagttcatgagttggcagatcccctctccacagaaggcagcctgtagatggagaaactgaggcacaaactaggggctcaaacacctcttgctcctggattctctgaatcagtttctcttgaaggtcataagaatgttctcctctaatcagtcccattcttctcaatcctctgaggaggcttcagggtgactttgggaggagtggcttccagaggaggagcagctgggactgagtcatggcaggaagctgaggagggcgggagatcacaccagacaattataaaagaagagctggtcctgaagctcacaaccgtaacagccaccagacaagcttcagtggccggcccttcacatccagacttgcctgagaggacccacctctgagtgtccagtggtcagttgccccaggatggggaccacagccagagcagccttggtcttgacctatttggctgtt

SEQ ID NO: 2582 - DNA, 2300 bp, Homo sapien
aagctgggcatggtggtgaaagcctgtagtcctagctactcaggaggctgagcggggaggattgcttgagcccaggagtttgaggctgcagtgaactatgatcgtgccactgcactccagcccctgcgacagagagagacctcgtctcaaaaaataaacacataaataaataaaatatgtaaaatggctggcatagagtagacaataaatggtcactgctatttttatattttacttttttttttttgagaaggagtcttgtcctgtcacccaggctggagtgcaatggcgccatctcagctcactgcaacctctgcctcctgggttcaagccattctcctgcctcagcctcctgagtaggtgggattgcaggcacgagccaccacgcctggctaattttttgtatctttagtagagatggggtttcaccatgttggccaggctggtctcgaactcctgacctcatgatccgtccgcctcagcctcccaaagtgctgggattacagacatgagccactgctcccggcctatatttttactttctatttactgacgcgttgtattttgttgggtctactcagtgttttaaaggtttttgtttgtttgttttttgtttttaagacaggctagtttcaaactcctgggctcaagaaatcctccttccttgggctcctaaaatgccgggattacatgtgtgagccactgggcccaacctaaaggcacattttttttttttaaataacttgtcaatacgtattttaaaacctggatattttaaaatttctcttgaaaaactaaaacacaaaaatagaagctctaacaacattgtcctgcatcctcacaaaatatcagaggtctttggttccccacctgtcattttttgggcgccttttgcacttggtgttgaagaagcagcaagaagtctctggcctcaaggagttgggtctgatcaggcacagacacggcaggtaatggggtcatgcgaaggttaatactgggctcagctgaaggagatgttatctctaagaagatgatggatatgaaaacgtaaaatgctttcaaaatgtaggaattgggccgggcgcggtggctcatgcctgcaatcccagcaccttcggaggccaaggcgggcggatcatctgaggtcaggagttcaagaccagcctagccaacatggcgaaaccccatctctactaaaaatacaaaaattagccgggtgtggtggtgggcgtttgtaatcccagctactcaggaggctgagacagggagaattgcttgaacctggcaggcggaggttgcattgagctgagatcatgccactgcactccagcttaggtgacagagcgagactctgcctcaaaaaaataaagaaaagaaaagaaaatgtaagaattgtgtcccgagctgggtacaattgcaggcacctgtagtcctggcgattcgggaggctgaagtgggaggatcacttgaggccaagagttcaagtccagcctgggcaacatggcaagaccccatatctaaaaaaaaaaaaagaagaagaaaaaagaaaggagaaaaagaattgtatcattatttgaaatttaacatgcatattttttctcggtaaatcactaagttctttcagaataaaggactatttatgctactttgtatcatctatactttttcctattttatattagagttttgtttttttgataagtcactgaaacaacaacaacaacttgaaaacacgaagtacaccacgaaacatgaagcgggtcagattgacctgcgcctctgggaggtgcctctcctcatcctccatctgagtcctgagttcctacatgggttgagaagataaaaggttaatgcccctcccagaggggtggtttatctagggactcctggtgacaacctggagacatatttatagtgctagctttgaaggggaagcccctttccccagacctcagagtatgatatagatgatgagaagcccagccttccgggcagaggaagatattttgggccagggacccttcagtcctggcccagtcacacctcatcagcattcacttatctacagggagggaagctgcaggacaggagtgtgggaggggagcctgggaggagagaaaaggtctgcctttgacatttgtaactgctgagaactgaaggtcagatacagtcctttccactaagaaatggctgctcaccgaagagctcatgagatttgctactgctgtcacctctcatggcttggtggtctgaaaatattgtagaaagaaaagagtttcctatgcctcagcaacttgtga

SEQ ID NO: 2583 - DNA, 2300 bp, Homo sapien
tctctactaaagatacaaaaaattagccaggcgtggtggctcgtgcctgcaatcccacctactcaggaggctgaggcaggagaatggcttgaacccaggaggcagaggttgcagtgagctgagatggcgccattgcactccagcctgggtgacaggacaagactccttctcaaaaaaaaaaaagtaaaatataaaaatagcagtgaccatttattgtctactctatgccagccattttacatattttatttatttatgtgtttattttttgagacgaggtctctctctgtcgcaggggctggagtgcagtggcacgatcatagttcactgcagcctcaaactcctgggctcaagcaatcctccccgctcagcctcctgagtagctaggactacaggctttcaccaccatgcccagcttacatatattatttataataaataatagccaggcgcggtggctcacgcctataatcccagaactttgggaggccgaggcaggaggatcacttgaggtcgggagttggaggctagcctgactaacatggagaaatcccgtctctactaaaaaatataaaataagccaggcatggtggcgcatgcctctaatcccagctacttgggaggctgaggcaggagaatcacttgaacctgggaggcggaggttgcagtgagccgagatcgcgccactgcactccagcctgggcaacaagagtgaaactccatctcaaaaaaaaaaagaaaaaaaaaagataaaactaatagatggattgctcttgtggttaaaaaaattcacaaaaataacattacatagctgggtgcggtggctcacgcctgtaatcccagcactttgggaggccgaggcggacggatcacgaggtcaggagatcgagaccattctggctaacacgatgaaaccccgtctctactaaaaatacaaaaaattagccgggcgtggtggcagacgcctgtagtcccagctactcaggaggctagggcaggagaatggcgtgaacctgggaggcggagcttgcagtgagccaagatagcaccactgcactccagcctggacgacagagtgagactccgtctcaaaaaaaataaataaataataatataataataataaacataacgcagagtaaaaagcaaaagcctttttcagtcctcccccaaccctgcatccctccccagatgtcaccaatactactgagtttggggtgcattcttccatgtataaatgcataaagagacatatccaagcccatcatatatattagattagtcccattttgcagatgagcaaactgcaccacacaggggtggaagtattcgtcgaagaccacatagctggcaagagctggagctgaggttcaaatccagatcagtctgactcagaagtcagcacgctgtcctttcgctgagtcccgagtgtaaaaccttactgaggaaaaaaaccgaagctcatagaagtcccagcaatctgaaccaccactgcccaacacgggagaggcaggagtgactgagtttgcaggggaggctgcgtggaggggagagcctggacccacgcggatcgggggccgcgggtacctccgtccagggcgcttccctcccggaccagcggctctcccaggccgcctcgctccaggcgcccctggaggctgccccgcctgtgccgcgccgcgccgcgccgtgttcgcaccgctcacccgagcggctcggaggcccgggttgcttaagtccctagtctcagccgggcacgaggacagcgcccgggagcgactgcagcctctgaccccggctgggccagcccgggctgcttaagtccctagtctcggccgggcacgaggacagcgcccgggagcgactgcagcctccgaccccggctgggccagcccgggcttcagctcacgcagccgtcggggggcgcccggcgcgcagcccggggtgggtggtcctggcgagtggggctgcgaggcagaccggccccaccccggggccgccgaggggcgcgggctggggcgcgtggcgggcggggctgggcgggggcgggcgcgagggcggagttgcggccgaggcggccgtgaccggagcgcggctcaggggccccagtggccgccgcggagcgaggttgcctggagagagcgcctgggcgcagaagggttaacgggccaccgggggctcgcagagcaggtagagacctccccgggaccccggccccggccgcccctctcccgggtcccgttagaccgcccgccccgcgcgcccgcgtcgtcccctctccctgcgctgtgcggtcgcga

SEQ ID NO: 2584 - DNA, 2300 bp, Homo sapien
ggggaaacagggtcagaggtggtcagagctgtgcccccacatctgaaacaccttctcaggtcccggcttcgagaccccatcaagccaggaatgttcggttatgggagagtgccctttgcattgccactgcaccggaaccgcaggcaccctcggagcccacccagatctgagctgtccctgatctcttctagaggggaagaggctattccgtcccctactccaagagcagagccattctccgcaaacggcagcccccaaactgagctccctcccacagaactgtctgtccacaccccatccccccaagcagaacctctaagccctgaaactgctcagacagaggtggcccccagaaccaggcctgcccccctacggcatcaccccagagcccaggcctctggcacagagcccccctcacccacgcactccttaggagaaggtggcttcttccgtgcatcccctcagccacgaaggccaagttcccagggttgggccagtccccaggtagcagggagacgccctgatccttttccttcggtccctcggggccgaggccagcagggccaagggccttggggaacgggggggactcctcacgggccccgcctggagcctgaccctcagcacccgggcgcctggctgcccctgctgagcaacggcccccatgccagctccctctggagcctctttgctcccagtagccctattccaagatgttctggggagagtgaacagctaagagcctgcagccaagcggtgagtctcctcgggcctcccctcccaaccccgacctccagtgtggcttccctgccctgaagctgggtcttcagcttccgcttggcacctgagggagaagggccttggcatctgaccacctcagggcaggggtcttggagctcttccgctgacctgagcctcccacctgctccccaggttcagccctgcccctaccctcattttgctccccagctctgactcctttgtacccctcaccgcagccctgcccccctgagcagccagacccccgggccctgcagtgcgcagcctttaactcccaggaattcatgggccagctgtatcagtgggagcccttcactgaaggtgaggtttcttgctcacccctgggcagtggtggcttggaattggggatgaaggggagaggagatacctgcttactcccagccctgaatgacttccagcccctctgcttcccctgcgccatgccttctttcttctccctggggctgggtcaggagacagcacaggtggtgagtggtctgcagaagggtcggggtgggaggaggaggtgtgggagacacgctttgtccggactcccctgggaaggccatcactgggggtcaggtggctgtgacacaagagggccatggtgggagagatcctgtccagccgtgacagccaggtgggggtgtgccacgcatcctgggcactgtcgtatcggttgctcccaggttaccatccgcttcattttaggcctgtgttaacttgacaccgggataagcactcaagagctctgaacacacagaatcatgggcatcagggattgctcctctctcagttcagagtccccttgatggtctcggtgacctcaactgacctgaccacctttttttttttttttctgagacagagtctcactctgtcacccaggctggagtacagtggcacgatctcagctcactgcaacctctgcttcctgggttcaagcaattctcctgcctcagcctcccgagtagctgggactacaggcatgtgccaccacgcctggctaatttttgtatttgtagtggagatggggtttcaccacgttggccaggctggtcttgaactcctgaccgaatgatgcacccacctcggcctcccagagtgctgggattacaggcatgagccactgcgcccggccctgaccacctcagcttgtgctgttgtcacatttccttcatccacagtgacctgggcaacctcaaggtgccccctctggggcctctctcagctaacctcccaccagggagcccactaaccacccttctaccctgtcccttagtccagggctcccagcgctgtgaactgaactgccggccccgtggcttccgcttctatgtccgtcacactgaaaaggtccaggatgggaccctgtgtcagcctggagcccctgacatctgtgtggctggacgctgtctggtgagggaagacagtgtgtgtgtgcacacacacatgcatatgcacacagacacatgcccccatatgcatacacatgtacacacatatgtatgaacacatgc

SEQ ID NO: 2585 - DNA, 2300 bp, Homo sapien
gagcctgcagccaagcggtgagtctcctcgggcctcccctcccaaccccgacctccagtgtggcttccctgccctgaagctgggtcttcagcttccgcttggcacctgagggagaagggccttggcatctgaccacctcagggcaggggtcttggagctcttccgctgacctgagcctcccacctgctccccaggttcagccctgcccctaccctcattttgctccccagctctgactcctttgtacccctcaccgcagccctgcccccctgagcagccagacccccgggccctgcagtgcgcagcctttaactcccaggaattcatgggccagctgtatcagtgggagcccttcactgaaggtgaggtttcttgctcacccctgggcagtggtggcttggaattggggatgaaggggagaggagatacctgcttactcccagccctgaatgacttccagcccctctgcttcccctgcgccatgccttctttcttctccctggggctgggtcaggagacagcacaggtggtgagtggtctgcagaagggtcggggtgggaggaggaggtgtgggagacacgctttgtccggactcccctgggaaggccatcactgggggtcaggtggctgtgacacaagagggccatggtgggagagatcctgtccagccgtgacagccaggtgggggtgtgccacgcatcctgggcactgtcgtatcggttgctcccaggttaccatccgcttcattttaggcctgtgttaacttgacaccgggataagcactcaagagctctgaacacacagaatcatgggcatcagggattgctcctctctcagttcagagtccccttgatggtctcggtgacctcaactgacctgaccacctttttttttttttttctgagacagagtctcactctgtcacccaggctggagtacagtggcacgatctcagctcactgcaacctctgcttcctgggttcaagcaattctcctgcctcagcctcccgagtagctgggactacaggcatgtgccaccacgcctggctaatttttgtatttgtagtggagatggggtttcaccacgttggccaggctggtcttgaactcctgaccgaatgatgcacccacctcggcctcccagagtgctgggattacaggcatgagccactgcgcccggccctgaccacctcagcttgtgctgttgtcacatttccttcatccacagtgacctgggcaacctcaaggtgccccctctggggcctctctcagctaacctcccaccagggagcccactaaccacccttctaccctgtcccttagtccagggctcccagcgctgtgaactgaactgccggccccgtggcttccgcttctatgtccgtcacactgaaaaggtccaggatgggaccctgtgtcagcctggagcccctgacatctgtgtggctggacgctgtctggtgagggaagacagtgtgtgtgtgcacacacacatgcatatgcacacagacacatgcccccatatgcatacacatgtacacacatatgtatgaacacatgcacacatgcaagcacatacacacacgcatatgcgcacagacacatgcacacacgcacacacacacacgcacacacacgcatatgcacacacatgcacatgcatatgcagacacatgcatgcacatgtgcacacgtgcatgaacacatgcacacacacgtatgcagacacatgcacacacatgtagacacacatgcatgaacacatgcacacatgcacacacacgtatttgcacagtctcaattcaacaacaaaacaccatactgagatcactgagggagaattctcacctgccaagctgcgctgagcagagcctgaaggatctgatcgggcacctgtccatgtccctgggtctggctggggatggtggggctgtttttgtgctctcacttgtggcacaaaaagcagggtagtgagctgaggctcccgaggggaccggggtggggttgaggtggtgtctggcgttctgtggccactgcctcacctcactctctccagagccccggctgtgatgggatccttggctctggcaggcgtcctgatggctgtggagtctgtgggggtgatgattctacctgtcgccttgtttcggggaacctcactgaccgagggggccccctgggctatcagaagatcttgtggattccagcgggagccttgcggctccagattgcccagctccggcctagctccaactacctgggtgagcacccagctgcctccccttccacttccgtctctg

SEQ ID NO: 2586 - DNA, 2300 bp, Homo sapien
ccgatcaatgggtgaccgatggtggcacagaaaaccgtgaaggtgccccggacccctttcaggagggatcctggggagaccgctccaggacatgtgcgcaagagcggcaacaggtggctgtgtagtaggggtagacgcagagccgggcctgtaccaccagggggcaatgtggagagctgtccttgcattgatcatctggggacagaggaggccagtgggcacaagagagtcaccaggacccacccgtctgggaatgggtgtgctgcccattcccactggtcctttctcatctcctcccatacttcagctaatccactgtattggggattggggagagggggctctttaccagggcgctggctgcagggttggctgttacaggggcgcttcctggagggccgcagttgaggagggcatcgggtgctgagggtctggttggtgctcaggcactggacctcccgtgtctgcgttcccccttggcaggagcgagaacactggggcgaccccagccatcatatcagacctttgccaggcccgggattctccttaacccctggctgccacctctctccccaaaaggtggtggtggggaccctcctaggacattgtgaaatcccaaatggagagggcccatctttcctccaagtctataagaagtaggacagtggtaacgcttggctgggcttattctggggcacagagagacctggagggggtacagcgagaggagctcccctcccctaggggcccaggctgagcagggcaggacagcgcagccagacactcactgggctccagggcgtggaaaaccatcggtcctggcaggcctgcccttgacagggctgcagggcagggggcctggggaggtgagaacagttgctcggagaagtcacgttgaactccgtccccagtttggatacacagatgatgtctctacgctgtgtgccagagccacattcggaggagcactagtgtagggggagggcagggtgatgaggggaggggaggacagagagcaccccaagtgcccacaaggaatcccactgggactggcacccccttcctgctctcagcaggcgctcagcttacctcaccccagggccctgtgtaccagcgccaagttctctcacagggccccaggctgcaggcgcgcatgtcagggggccggcttcctgttggacagctctgcccagttcctgctcctgcttccccctggcctggcccgagggctgccccactcccaaggcagaccacagagcgccgctggattcccgtcccacactcggctgagcactgcggaggaggagagcggcctgtgtgaggggcctgctggtgactggcacaagggacagtaggggggcagggagggacgcatcctgggtccgaatcctgggtggttgggaatgtccccgggtaccaggcccggacgaggaatcctagccgggcccctcatggaagttgttctcacttatctctgagttcccagggtcaggcatatagcaggcgcttgatcaatacaagtttattgagctatgctggaaaggctgaggtgtcctgggcgtggttacccaggatgcaggatatggctgggggttccgggctcaccttggagctccagtcgctgtggaaccaggcagtagtacagggccccatgtcacaggcctctctgctggggggctgcggggggcctgacgcacactcctgctcgctcacttcatcaccattgttcccaacacagcgaacctgccggcttctctggccccggccgcaccgcacggagcactgagggggcgaggggaatccagggagctgggcttcccagaccttctcagccagcttccagctctaggcttcagaaccaggctctgccttcgatccccagcccagcagtcacatggcttcgtgggctgaggaggaggctgagccctagggccctgggcccccagtccctggttcagtcccttatctgacttctatattgggggtccatatgaaaccctgtttgtaaatagtttctgctgatgaaaaagaagttgaaaaaccactgctgttgttcacctgtgcccattcccctccccagcacctccttgcctgggcaaactcacctggctccaaggagagccaacttcccaatggccacagaggcgcagctggcaagactgggtgatgttgggccgggggagatgtccacagcgctccgggggcaccgaggagccaccccccccaaattcctgccggcactgcagctggcggtgctgggtgccggggccacaggagcggctgcaggatgtccactcgcc

SEQ ID NO: 2587 - DNA, 2300 bp, Homo sapien
cacctcagcctcccaaagtgctgggattattggcatgaggcacagagcccggtctgtaatcccaacactttgggaggccaaggtaggaggatcacctgagtccaggagttcaagaccggcctgggcaaaatagtgataccccatctctacaagaaataaaaaaattagccaagtataggggcatgcacctgtgttcctcgctactcgcgaggctgtggtgggaggatcacttcagcccaggaggttgaggcagcaatgagcactgatggtgccactgcactccagcctgggtgacagggcaagacctcatctcaaaaaaataaataaaaagtgagcttgctcacctttcctatgtctctcagcaccttgcttttgaattttagctattatttttacagatcttttaacaaaaaggctgctttaattaacgttaactaacatacatggcatataagaagatccttgttctcaagggctttacaaacctctagagtcaaatgtgccttattatcagtacaaaaataaatggtgtcagctgggtgcagtgactcacacctgtaatcccagcactttaagaggctgaggcaggtggatcacctgaggccaggagtttgagaccagcctggccaacatggtgaaaccacattgtcaggcctctgagcccaagccaagccatcgcatcccctgtgacttgcacgtatacatccagatggcctgaagtaactgaagatccacaaaagaagtaaaaatagccttaactgatgacattccaccattgtgatttgtttctgccccacccgaactgatcaatgtactttgtaatctcccccacccttaagaaggttctttgtaattctccccacccttgagaatgtactttgtgagatccacccctgcccacaaaacattgctctcaacttcaccacctatcccaaaacctgtaagaactaatgataatccatcaccctttgctgactctcttttcggactcagcccgcctgcacccaggtgaaataaacagccatgttgctcacacaaagcctgtttggtggtgtcttcacacagacgcgcatgaaacacatctctactaaaaatacaataatcagctgggcgaggtggctcacagctgtaatctcagcactttgggaggccgagacaggcaggtcacttgaggccatgagttcgagaccagcctggccaacatcgtgaaaaccccatctctaccaaaaatacaaaaactagccagatgtggtggcgcacgcctgtaatcccagctactcgggaggctgaggtaccgaatcgtctgaacgtgggaagtggagcttgtagtgagccgagatcgccccactgcactccagcctgggcaacagagctagactgtctcaaaacaaacaaaaaatggtgtcaagactctcagacgagattctaatggattaaggcctatatgtaaatagcaccaaagactatggaacagagatgggagaagcaagcagggaggcaggaatagtttagctgtggcagttttagcttagtccacttacataaatggttctttagggtagcacgtggagcatcctcatttccaaacattggactgagagtagagagctgtgcaaaataaccacaagtccccaactatgccctcttaattatccctatcatctaagactgttgttcccatccatcactgaacttccccgtcctcttccttcaacccctgtgttagtcaatggttgaaattttgatttggtaaaaaacctctggcgaaaaccagcaaaaagggctcacaaatcaggtctcagggaagcacagaggtagccacgagaaggcccgaggtgctcatggaaagagctcgagcccaggagctctgggaggaccccaggcgctcggagccgccgttacgtaaccggcactcagagcctccgaagaccggaaggccccgctcaggccccggctcaggccccggccccggccccggccccggccccgccccggcccggccgggcagctggtaggtgccgtgcgcaaccctccggaagctgccgcccctttccccttttatgggaatactttttttaaaaaaaaagagttcgctggcgccaccccgtaggactggccgccctaaaaccgtgataaaggagctgctcgccacttctcacttccgcttccttccagtaaggagtcggggtcttccccagttttctcagccaggcggcggcggcgactggcaatgtttggcctcaaaagaaacgcggtaatcggactcaacctctactgtgggggggccggcttgggggccg

SEQ ID NO: 2588 - DNA, 2300 bp, Homo sapien
gcactttgggaggccaaggcgggcggatggcctgatgtcaggagtttgagaccagcctgaccaatgtggtgaaaccctgtctgtactaaaaatacaaaattagccagatgtggtggtgtatgcctgcaattccagctacttgggaggctgaggcacgagaattgcttgaacccgggaggcggaggttgcagtgagccgagattgcgtcactgtactccagcctgggcaacaagagcaaaactctgtctccaaaaaaaaaataaaacatggttcctgccctcaaggagtttacagtatacagagggatataataaaaacagacagataaggaattagaagggattggtgctaagacagggacaaacacaaaatgctctagaagcacagaataggggaacctacccaatttgaggaggtggaggaaggacaggaaaatcctgtcacagaaaatagcttctaagctgagatctgatgaagtagaagaatttattcaggtaaaggggttagatcgggaaaggggtcttctgggtagaaagaactatgtaaagtgattcagagttattacattctgcaaactgggaataattcacagtaactgtagtaagcatccaaggggcaaggccaagctgggtgtagtggcaggtgcctgtaatcccagttactcaagaggctgagacaggagaatccttgaatccgggaggcggaggttgcagtgggccgagttagcaccattgcactccagcctgggcgacagagtgagactccgtctcaaaaaataataaatgaagtaacaatggtgaagtttgaagtaactcaggtgaagtaacacctaagtggaaattccatactccactcagtaaaccattatcatgggctagttgaattgtaagacactttattatgttgctacaatatttcaggtgagagatgattaggaaccaaggaaggtaatgacaatgggtataaagaagagtagacagggctgggcatggtggctcacgcctgtaatcccagcactttgggagaccgagatgggggggatcacctgaggttgggaattcaagaccagcctggccaacatggtgaaaccccatctctaccaaaaatagtaaaaattaaccgggcgtggtggcgggtgcctgtaatcccagctactcaggaggctgagacaggagaatcacttaacccaggaggtggaggttgcagtgagccaagatcgcaccattgcactccagcctgggcgacaagagcaagactccatctcaagaaaaaactcaaacaccaaatacaaaagaaaaaggactggagtatccatttgatttggcagttagtaacctttttgagaccaatttcagtggatttgtagaggtgaaatctggcttatagaactaagtaatatggagaggttttgtggttgttttaggatgggaataattcaggcatatttattgaaagagtgaaaggaataagtaaaagctggagctcagtagagaatgataataaccaaaaagcagggttctgaagagaaaggaggtgaaatgagcacaggtggatgtggtttagttacatggtctacttctgcagacgtttgctgagcacttaccgtgtgccagccactctactaggtggtggggttagtctacttgggaagccaactgagtgagaaagtggtctcaagtaggactatatatgcctcatcctgctggagactcaaggcgaaaatataacagtaaactcccagctgattgtttttgactggggctaagtaatttataggagtcgttgtctgacagctttagtcagacttgtaaagtaggatgttagagaggtgggagtgtaaaaagtatagccataaaaggacatagaagagaggaggggcggagcccaatgactcaggcgcctataatcccgacagtttgggaggctgaggcaggaggattgcttgagtccaggagttccagaccagcctggacaacatggtaagaactcatctgtacaaaaaataaaagccaggcatggtggcacacgcctatagtcccagctacttgggacggtgaggtaggaagatctcgagcccaggacgagactgcagtgcacaattatcgtgcttgtgactagccactgcactccagcctgggcaacataaccaaaccccatctcttaaaaaaggtggggaggggtggttaggaagcaagcaatgttgaggttctaacagattggtaccatgaacatgtaatggtaccaatccatatctttgtgctattttctctagaagcacctagctccctgggtacaagagc

SEQ ID NO: 2589 - DNA, 2300 bp, Homo sapien
aaatgtttggggctatctgtatttcatgttactccttagccttttttttttccttttagttcttcaccactgcacacttggcaggatgtatcccattttaaaacttgacagtccatctccttcactcccatactgtagggctaggcaagcaaagcaaactgattctgcaatgcttctaatagttattcctgctcattattttagctagatgtattctaaagtctttatcccaaagagttgaatcaaaggttcttccactcctccaacctgattgtgctgacaagccactaagctgagccatctaatatacagggtggcagggatgaagtcaccgttactgtccaacagcttttattttaagctggtgtgggctgggcatatcaaagacaggcaaagaaaaataacttggagagttgccattgaggatatatccacagtgagccaacagcacccacacaagcagccctcgtctgtataatgccctctactgggtcttgagggagattaaaaagaaagatctcttccatcctggggaacctgagatatgacagcagcacacaaatacaggcagatttatagttctaagcagagttccagtagctaagctaagggaaggagagtcaggagataagctgttagctgaattttattaaagacagatgacttcactagtaaagataaagtgggacctcccgtggttgggctgcaatattttaagtcccaagtgactgctgaatactcgctttgcagttggaaaaataagctgtttttggccagataaacagtgtaagaggtcatctctgctctagaggaacatgtaacctaattgagacacttctacatataatgcaagatagcatatggttagtcaagtagtagaattctgagaagagaaaatctgactggactcattaggtaaacataagtggtggaaatggacatttaactgggccttgaaaggtgggtagtatttaaacagtgcagttacttaataagtgtccacaatatgcctggcattgtgctaaaatacaaggtaaattgtatgtggctgcctctttcaaggagattacattgtagtggtgacctacacatgaagaaatcatattacagtgttaaacttacagcagtggtggtctagctatacagaggaatagggacaagtaattaattaataatagttgcttttttttttttttttttctgagacagagtctcacttcgtcactggagtgtagtggtgtgatcttggctcactggaacctccacctctgggttcaagtgattctgcctcaccctacggagtagctgggattacaggcatgtgccaccatgccctgctaatttttgtatttttggtagagatggtgtatcaccatgttggccaggccagtcttgaactcctcacctcaagtgatccacccacctcagcctcccaaagtgctgggattgcaggcttgagccactgctcctggcctgttggtttttttttctttttaagacagagtctcactcttgtcgcccaggctggagtgcagtagtgagatctcaactcactgcaacctctgcctcctgggttcaagctattctcctgcctcagccacctgagtagctgggattacaggtgactgccaccacacctggctaatttttgtacttttagtagagacggggtttcgccatgttgccctggctggtcttgaactcctgacctcaggtgatccacctgcctcagcctcccaaagtgctaggattacagatgtgagccaccgcgcctggctgtggttttttgtttttgttttttgttttgttttgttttgtttttgaggcaaggtcttgctctgttgcccaagctggagtgcagtggtgtgatctcagctcactgcaacctccaccttttgtgttcaagcgattctcgtgcctcagcctaccaagtagctgggactatagccatgcaccaccatgcccggctaatttttgtatttttagtagagacggggttttgccatgttggccaggctggtcttgaactcctgacctcgagtgatccacccgcctcaacctcccaaagtgctgggattacaggcatgagccaccgcacctggccttttttttttttttttttttttttgatacagggtctctgtcccccaggctggaatgctggaatgcagtggtgtaatcatggctcactacagtctcagctcctcactacgaggtcaggagattgagaccatcctggctaacacggtgaaaccccgtctctactaaagatacaaaaaattagccgggcgtggttgcag

SEQ ID NO: 2590 - DNA, 2300 bp, Homo sapien
ggcaggcaggtcacctgagttcaggagtttgagaccagcctggccaacatggcgaaaccctgtctctactaaaaatacaaaaatcagccgggcatggtggcgcacacctgtagtcgggaggctgaggcaggagaatcactttaacccgcgaggcagaggttgtagggaactgagattgtgctactgcactacagcctgggtgacagagcgagactccgtctcaaaaaaaaaaaaaaaaaaaaaaaaaagtccatgttttcaaaactgaatgccttattttctctctgcttttcagctccattcccaaattgactcctcttcttgaatttattgtttctataaataatcaccttgaggcacacagtcttctcattctctattcagtcagctgctagtctagtggattccattgtcacagactctcttggttaggttcactattttctattcttaactactacgtttctaggttaaatcctaattatctcccacctaacgtttgcagaggactcggctagactgttcatctctggtagttttctgcttggaattctgagtctttttattcattaccaccaaattatctccataaagagcacttcttatctgccactctttttttttttttttttttgagacggactctcactgtcacccaggctggagttcagtggcgagatgcgatctcggttcactgcaacctccgcctcccaggtaaaagcgattctcctgcctcaggctcctgagtagctgggactacaggtgcacgccaccacgcctggctaatttttgtatttttagtagagacggggtttctccatgttgaccaggatggtttctatcgcctgacatcatgatccaccctcatcggcctcccaaggtgctgggattacatgcgtgggccaccgtgcccagccttgttttgtatttctagtagagacagggtttcaccatgttggccaggctggtttcgaactcctgacctcaagtgattcgcccgcctacgcctcccagagtgctggcattacaggcgtgagtcaccgcgcccagccaggcctgtaagctttctaagggcagagactgccttactatacacgtaccccccccaactaacacagtaccatccacatacagacagacgcccaggaaatgttaaactgtaattctggataggttaactagtattaaccgtatttaccaaatgtttaccacatacttacactgtcctccttgtttcaaggagcgtagtccccaagggatcaccctgatggaatataaaaactacacataagagtgaaactacggaacgtaagccattagtgttttgcaagacagctcgggttgagactcagtctctctcttccacaggccaagtgacacatcgtaataccattggtaccgttttattttatttttcgcgacaaagtctcgtcctgtcacccaggctggagtgcagtggcgcgatttcggctcactgcaacctccgcctgcagggttcaagcgattctcctgcctcagcctcccaagtaattgggattacaaacgcccgccaccacgcccggctaatatttgtatttttagtagagacggggtttcaccatgttggtcaggctggtctcgaactcctaacctcaggtgatccgcccacctcggcctcccaaagtgctaggattacaggcgtgaggcaccgcgcccggcctgttagtactactttaaaatcgaatctgacctccaaatcattttctggagctcgatcattttctgctaacaccgcaaagcttaatcctctccacctgagaataaaaggttccatccttccgctctccagtttgacgccctgctaagtctctcggacgcggtgggctggagtgaaggaagccggagcccaccaaagctgcaaaagtaccacagccagcagccccgcccccgatatcccccacaggcttccaattggtccttgtggctcactctctttccaggttggtgttccagcttgccggtcgcctctatagagcccacctttagacggcgactattggtagatcgttacgtcattgccctatctacctcactcccactggctctcataggaaggggcggtcgcaacgtcacgggcaagggccgccattttgactgagcaaccctagtgacaggagccgaagcagcagcgcaggttgtccccgtttcccctcccccttcccttctccggttgccttcccgggccccttacactccacagtcccggtcccgccatgtcccagaaacaagaagaagagaaccctgcggaggagaccggcgag

SEQ ID NO: 2591 - DNA, 2300 bp, Homo sapien
cccccaccaaaaaaaacctctattttttaaaattattattttatgggagggaaaggtttgtattcatttgggccatttgttttctttcaagtaggatttttaactagtaaatgtgcagatgaaactaatttctcaaagaaaccgccccctctccccctccccccctgccccgcgaaggtttaaagtttcttggattggtttaggaaatagtccctattcacagtgccagataggcttagtgcgcttaagaatttatttcatggttctcttcctccttcacttttcttcccacctcccataacaaattatatttgaaatatacccttgtacaaaaaaacttttgtagctcacttcatttgtatttctattttaaatgttcacatgcacttctgagtattcattttaatcaatataaatttatcgagcaataacaatgttaaagacagtgctagttgctatggagaatatataaacccaagaagacaatatccctgttcttaagaagtttacagttgagagacagctataccaagagaaagactataataaatactttaaaggaagtgagtataaataaagctctgtgaaacagctgagggagtggccatgagacacataggtaatagaaaagaggaggtcacttaaaggccttcacaaggcctttaaagaatgggtagaatgtaaagaggaagagaaaagggtgaagaccccagcaagtacagaggagcagaagcagaaagaaagcatgagacatttttgagaaaaagtctggcaacactacttattaggagcaatgggaaatattgctagaggagtagaaacgagtccagtcatagcaactcttaaataccattattttgatcttgaaaaagatactcctttatataattgctgatttaaaatatttgttatatattatcttaaaaactgatatctagatttatataaaataaagtatgctaactataaactttatcacaaatgatttagtgcagtttcttttgaccgtagtacatagaataaaagacatgttctttgacttttttttttaaattgagaaaatttgttaatctttcaacactctcttgccagtaatttttgtttgcagctccttgtgtatttgcaagatatggctagctaggactagagctgctaagtttactgactgtggaattactacacatgattttctgaatgttatcgtctagacttgtgatctccaaagtgagtacatgaaatgagtcattagggtatgggaaggaaatatagaacatgtatttctatttagtttttcgtattcttttttactttctattttttgtgtttttttataatgtagtaccatggaacgtttatagaaattagatacaaattattatatgcattttggggctggatgctcacaattttttgttgttccatcttacttaacttgggatccattttgtgaaagaggagtgacaatggtggatattcactccttctttatagattatgcagaaaaaatcagcaggtttggccgggcctggtggctcatgcctgtaatcctagcactttgggaggcccaggcaggcagatcacttgaggtcaggagttcaagaccagcctggccaacatggtgaaaccccatctctactaaaaatacaaaaattagccagacatggtggcgcacacctgtaatcccaactactcaggaggctgaggcacaagaatcacttgaacctgggaagcggaggttgcagtgagccaacatcgcaccactgcactcccagcctgggcaacagagcaagactccctctcaagaaaagaagaagaaaaagaaaaaaagaagtcaacaggcttgaaagatgagcatttctactggactttagaattactcatttgatcttttgtcagtgccatctgtgaagtccaagctattgtactttggaaaagatactgtattacccacccatttttttctggtcattactccttcctttctttctatatttaaatctgtaaatatttcctatttgtatggatgtttagtatgcatgtatgaatatatgatttatttacataagcatacatatggattttttttttcaccactccctccagaaacaggtgagaatgaccactttaactcaccgggcccgtcgcactgaaataagcaagaactctgaaaagaagatggaaagtgaggaagacagtaattgggagaaaagtccagacaatgaagattctggagactctaaggatatccgccttactcttatggaagaagtattgcttctgggactaaaagataaagaggt

SEQ ID NO: 2592 - DNA, 2300 bp, Homo sapien
agataatgtatttgccatttctgagataattattcatatttttccaactagatattttagtattattagtaggttagaattaaacaactgaaaacctaagactatttttaaaactcaaatgttaacgtctcaagagtacaaaagcaagacatgatttaaatcgtacatgattccaaggtagaatgtttttctatttgtagttcattttaaaatcttttttcccttcttattgctctgaaatatttggctattttgaggacataatgttaaatctatcttctcacttctagagcagccctactgaagattatacattttgcaagtacatactttcagcagccattggaagatgttaataataaattttactctacttttaagaaacccagatatagttatgctaggtatgctaggcataaatttttttaaaaagaagagaaatctcagatacatgaaaaaatctacaattaaagacatttaaacaggaaagtatctattcttagtagttgttttcttttgacaggtcctccatcactttgattcttctagtcaagagtcagtgccaaaaaggagaaagtttagtgaaccaaaggaacatatataaaaattatttttgttctgcaggcttgcagagttcttctcaccatttaaactgaaggaccctatattatatttccctaactctgaagatgtatatgtagtttaaagcagtttgtacactaaaactaagtttttggctgactgtcatattgtggtccttaatcttgagataaatccaatagaacttttgaataaaagcaaaagtacaaatgtcataattgattcggtaataagtaaaatttcaaaattgattttgttcattacctacttaatatttcctttaaatatatactaactgttaaggccctctaatgccatttttctaaacagtaatgtttactttggtattaaaatttggtatggattcactttttacttatgttaaaattataccatttaactggctcttttgtcattgtgctgttattaaaacaatgttcttcaatattttgacataatgtattaacattttaatatataatgtacaatttaagaattggtgctttacctttactatgcttttttttacaggacaaaaagactgatttttaaagtatggcattttttgcagcataaataaaatattgttcagtacgtaggcccttttatcgcttctaatttttatttaagtagcaggaaatatggcttcattcatttgaaaggctggtaggaggatggggggatagggaatactaatttttagatgatttcggtagctattactttgcaagaagagttgagcacactttctagaatttttgagtggtagtatgaaaaatgctgtgcttttaatgagaaacctgggagctagttccagccttgcctgctttctttgctttagaaaaaggaagacttaaaacttggtctgtttgccgcttgtagtttcagcagccatattccaaaaacatacacatccatgggtttgtcagtaataagcgctatagggaatgctggtacatatgcgatggtagaaatgtattcatcctgtttaaggtaaaccatataaacgtacacaaactgacccagatcatgtttttctggaacagtcaagtcaaggataaactgactgtcagaaacaaccaatgtaaaaatatttatttatttttagctgtattgcttggatcccaacacatctcacttaattgtcccagtatacgctactacagcaacacacctgctacgctgaaattaacccacagaaacctttcgagattggcagcccatgttagctcactcagcgctttgattggctggtttaatgggggtggggagcgcagccctctttcctctcttccaccaaggttccttcattggattgaccagctgtcaggttgaacgcaaacctgcctccttttggtggtgtttgtctggatcgcaacagaatagctgggggagagcctccccctgtgagctccgattggcgggactcaaccttggtgatttctgattggcgcaatgaagaaacaccaaggtaggttgcctagtgatcctgaggaagctgatgtgttattccttctctgcatcgaaggatcaggaagtttgtgctctctgcgtggctaagtttttcacctactaggacgggggtggggtggggagaacaggtgtccttctaaaatacagcacaagctacagcctgcgtccagccataacccaggagtaacatcaggtaagcaacgagaaaattacatttcctaacgtcc

SEQ ID NO: 2593 - DNA, 2300 bp, Homo sapien
gcctcccaaagtgctggaattgcttcttatggatgattgaggaaagtgatttattgagatggaatcgatggaatctactcctggtgaagatgctgagaacaagattgaaatggtaacaaaggatttagaatgttacataaacttagttgacaaagtagcagcagggtttgaaaggactgactccaattctgaaggaatttctactgtgggtaaaatgctgtaaaacagcatcacatgctacagagaaatcttttataaaaggaagagtcaatcgatgtggtgaatgtcattgttgtcctaatttaagaaattgccacagacaccccaacatgcagcaaacacctccctgatcagtcagcagccattaacatcaaggcaaggccctccaccggcaaaaagatgattgttcagatgatcattagcattttttaggaataaagtattttaaaattaaagtatgtgcattgtgtttctagacattatgctcctgcacacttaacagactacagaaagcataagatatgtacaataaatatattaagggctgggcgcagtggctcatgcctgtaatcccagcactttgggaggccaaggcgggcagatcacgaggtcaggagatcaagaccatcctggctaacacggtgaaaccctgtctctactaaaaatacaaaaaaattagccgggtgtggtggcgggcgcctgtagtcccagctacttgggaggctgaggcaggagaatggtgtgaacccaggaggtggagcttgcagtgagccgagatcgcaccactgcactccagcctgggcgacagacagagcaagactccgtctcaaaaaaaaaaatttatatatatatattaagatattaatagtgtaaccataattttttttttttgaaacaagtctcactgccgcctaggcaggagtgcagtggctcaaacagggctcactgccactgcaaactcctgggctcaagggatcctcctgcctaagcctcctgagtagctgagactacaggtgtgtgccacaacctctgcctaattttttttattttttgtagagacagggtctcactttgttgcccaagctgatccccaatttctggcctcaagcaattgttccgcctcagcctcccaaagtgctgggattattggcatgagccaccacatctagccaacataacttttatacacatggaaaactaaaaaattgtgtaatttgctttattatgttgtttgctttattggagggtctggaactgaacttgcaatatctccaaggtatgcctgtaattgaatgtttacactggtaagaaatgtatttggatatataataatctgtaaactaagaagcttgtactactgaataatctccaactattaatacctacccactctgattttattttgtttctaaatgagacaaattacattcaaagctatccattgtccccaatgacataacacagtggaagtggctaagtagaagactgctaaagcaaatggtttcctgaagatacaggagattggaaggtgggaatgcaatttgtggtagttccaatgagaaaatcaaaagtcagccgggtgtggtggctcacgcctgtaatcccagcactttgggaggccgagggaggcaggtcacctgaggtcgggagtttgagaccagcttggccaacatggcaaaaccccgtctctactaaaaatacaaaaattagctgggcatggtggcggacgcctgtaatcccagctacttgggaggctgaggcaggagaattgcttgaaccctggaggcagaggttgcagtgagccaagatcatgccactgcacttcagcctggacgacaagagcaaaactccgtctcaaaaaaaaaaaaaaaaaaaaaagaaagaaaatcaaaagtcagaaaaacaatcagaaattcagtaactgcacatgcagttacttaaccttcccccttctgtctggcttttccactgcctgagacgtggcgctgaggcttcccgtgtctgaggctcccagtgcgccttgcgctgcgcttggcgggaaaggtgacctcgaccaggggtcaaaaagccactgtcgcgccccagcgggtgaccgttgaaggaaagcgcatgcgcgtcgggcacagcgcgtgcagcctcgtgcagctcttctggtctccggcgcccgcccctcagacgtaatgtaatatatattagtgtgtatatatctgtgtgtgtgtgcgtatattttactttttaatctctttgtctgtcagcttccccctacttttaagtttcttaaggtcttagtggtaaaacat

SEQ ID NO: 2594 - DNA, 2300 bp, Homo sapien
gccaggcatggtggtgtgcacctgtagtcccagccactccagaggctgaggcgggaggatcacttgagcccaggaggtcaaggctgcagtgagccatgattgcatcactgcactccagcctgggtgacagaatgaaaccctgtctccaaaagaaaaaagcaaaaaactccaacagagtttttcagggaacttgataaactgattcaaaaaattcatataaagaagagttaacaagtacaaaatacaaagacaatgtttaaaaagaagaacaaagatagggtggcctagatgacttgccttaccatacgtggagacatattacaaagctgttttaattaaaactgtgtgatactgaagtagcaaaagataaaaagaacagcttcatgagctcagaaactgacctatctatgtatgagaatttggtgtacaatagaggtagaatcaaaattggaaaacaaagaaaataagctccctacgtcataccatacacaaaactaaattccaggtgaattaaacacctaaaagcagtagccatagaaaagataaataaaacactctctgaaagtataaaaataagatgagtgtatctttattacatttggatgaggaaaattttcttatacaaaaacagtatagattgattatacggaaaagctgaataaaatgttctacctcaacataaaaaaatttcatatagaaaaactcactataaacaagactaaaggacaagtggaatttcataggcttatgcaaaggaagaaaaaataaaataaaagacaagtggaagactaagggaggatgtttttaagggtatataactgtcaaagattagaagccagaatatatttttaaaacacatacaccttggccgggcacggtggctcacacctgtaatcccagcactttgggaggctgaggcgggtggatcacgaggtgaagagttcaagaccagcctggccaagatggtgaaaccctgtctctactaaaaatacaaaaattagctggacatgctggcaggtgcctgtaatcccagctacttgggagtctgaggcagagaatcgcttgaacctgggaggtggatgttgcagtgagccaagatcgcaccaatgcactccagcatgggagacaaagcacgactccgtctcggaaaacacacaacacacacacacacacacacctcccacaaatcactaagaaaatgcaacaatacaatagaaaaatgagcaaaaaagatgaacaggaaattcacagaaaattcaaacggtcaataaatgtgtgaaaagatcctcaacctcattagtaattaggaaaatgcaaatttaaaagatgatagttcgtcttgctcccaccccacccaggtaatcattctcaattggatatatttgagtgtatccttttttccatgaatatactaacacatacacacacacacacacacacacacgcatattactaaactatacatatagtatatattaataaagacattttgagtttgatgaacgaaggaatggctgagtgagaaccagacaatatcagatcatgaatgagttgtgttaaaagcagtaagacaggttttcctaggaaatcatacaaggagctgggatttggggagctttatctaaatctctttataactaaatgttttccatgtaaaagttggtgtttttaaaattcaatttaattttttttttgagatagggtcttgatatgtcatccaggctgaaacacagtggcataatcatggctcactgcagccttgtcctcctagactcaagcaattctcccacctcaccctccccctcagctgggactacaagcatgcaccaccatgcccagctaattaaaaaaaatttttttgcagagacagggtctcactatattgcctaggctggtcttgaactcctggcctcaagtgatcctcccgcctcagcctcccaaagtgctgggattataggcatgagccactgggctcagacaagggctcttcttgatggcttactgtatccactttgtccccaagaccatagggaaatgactagaggtgactgtactagctagattttaaatgaaactgaaatgaaagttcacttcctcattttgagtacctcatgtgacaagttccaatttcttttcaagtcaattgaactgaaatctccttgttgctttgaaatcttagaagagagcccactaattcaaggactcttactgtgggagcaactgctggttctatcacgtatgtactctttgttctttttctcccatttggtcttcaaacactctgtgtttgtaacttgttc

SEQ ID NO: 2595 - DNA, 2300 bp, Homo sapien
tctatgtgcacacttacagtatacatatatatttatatcacaatttacgaaaccaaaaagttgagtttccaatggaacccttgttttttaataatcgactttttaaatgtgatcaggactataatattgtacagttattatagggcttttggggaaggggaggatagcgagaagatgctctgggggttttgtttttgcttttccttcagggttttatttttgactgttttgttttcttgttggccatttctgtattgctggcatctgtgctaagctttacagtggcaaaaataatgacatgtagcaaagattttcaaacaaaatattttttccttttgtaaaatttcttgtgttgtgtgatcttgattgcggctttatcattcctttccagttcataaacaacaggcacccacaaccagaggaatctatagtttaagctccagacatacaaacataaggcacattgtgtctttaatttcaggaatcagaaatcatagggttctgatcacattgcacgcctcccccctcacttgtcctcctgatcctgacacattctgagtaacatcagcaggaatgctctgaccatgaggtgggggttttggggtgggcgttgcctgggttcttgggagagaggggaagagtcgggacttgaaaaccactagggcacatctggatgccttcccccagtatgtccttttctggattaaaatgagtgaaatttaaactgttcaagtctggacctggtttccctctaggagactatgttggttcattagcaacttttttttttttttttttttttgtgtgtgtgtgtgtgtgtgtgtgtgagagatggagtctcgctctgttacccaggctggagtgcagtggcacgatcttggctcactgcaacctctgccccttgggttcaagcaattctcctgcctcagcttcccaagtagctggcactacaggtgtgtgccaccatgcccagctaatttttgtgttttttttttttagtagagatggggtttcactatatgttggccaggctagtctcgaactcctgaccttaggtgatccacatgctttggcctcccaaaggcctgggattacaggcgtgaaccactgcgcctagcctgttagcagctcttaaaatccagaggcataagcctgtatttttgagggtttatgcatggaatccagctagaaactgagtctattacagatcccatttattatcctttctattccaagaagcctttttttctccttccccacatctgtttatggaagaaaatgaagtttggggtgtggtttgaggaatcagctagattcttatgatctgtcacatgcttggatgttggggaagcatttggagaagctcatgtgacttgtcctagattggggattttaattgagacagatgatgtttatcgggcatcccaccacctgagagttttagcaacagagtcacatgtgagtccatcagaacttacggcattgattcaagtgctgtcataaataaccaggactgctgtttttggttacttttaaagacagtttcatctggactttctgggcatatcctccttcagcaaaaccacattaggctgggaaaactattctgcctggaagtaatgacaacttgcaaccaacaagcttataaaaatacaaagaattctggagcctatggcttccattacattattcttttatagccttttatgttcattaccgcatcccagaggtgagagtcagacacaaatatgaaaataggtttcaatgttggagaggtaaatcctaacaggaaaggggtaggaaaagatataatcccccaatattaaaataaagatattgaagaagaaggatgggagagactagggctgtgtccttccttttactcaccaaaagagaaagtaagctcctatttgagtcaatagatattgaggtcttgttatttgccaccaaagacagtcttgtgagactaaatagctagtaattccctaccctggcacacatgctgcatacacacagaaacactgcaaatccactgcctccttccctcctccctacccttccttctctcagcatttctatccccgcctcctcctcttacccaaattttccagccgatcactggagctgacttccgcaatcccgatggaataaatctagcacccctgatggtgtgcccacactttgctgccgaaacgaagccagacaacagatttccatcagcaggtaacgtttgcaacttcctagatcttttagcttttcattcctgtcaattctctgagtattagggatgtagtgacttg

SEQ ID NO: 2596 - DNA, 2300 bp, Homo sapien
ggctaatttttgtatttttagtaaagatggggtttcaccatgttggccaggctggtctcgaacacctgactttgtgatccgccctccttggcctcccaaagtgctgggattacagccaccccgcccagcccagccaatgtatttcttttgggtggatgatttttttctttttggtgacttataaatataacaacaaaatgaaagaaaaatgaaattttaacagatgtaaacaataatatgtaaattatgttaaaatacctttgcagtaaactaaataagtggatcaatgtaatctgcgcagtacatatacaacttctaagaatgcaaagctgttcaatagcataatgggatttttgttaaaattttaattaaatttgtattaaacattttgtgagcgatacatgaaaatggaagtactttgtagtgctaaaattgtagtgctaaaatagggggatgggtggaacaggtttccagtgtcagactcctttagtttgcctcccacattacttacctgctggatgtcccttgcttaccctctttgtttctgtttccttaattgcaaaatggaaatagcagtagaacctacctcatcgttgttgtgaggattaaatgagtaaatacatataaagcattttggacagtgcctacctcgaatagctcaatgcttcctattaccaggaaacaaaaattagccgggcgtggtggtgcgcgcctgtaatcccagctactcaggaggctgaggcaggataactgcttgaacccgggagggagaggttgcagtgagccaagatcgcaccactgcactccagcctgggtgatggagcaagactccgtctcagaaaaaaataaagaaaaaagaaaataaatctgcacagccatcatcttattgattccctattaaaaactcctcactggccaggtgtggtggctcacgcctgtaatcccaacagtttgtgagaccgaggcgggcagattgcctgatgtcaggagttcgagaccagcctggccaacgtcgtgaaactccatctctactaaaaatacaaaaaacattagccaggcgtgtggcgtgcgcctgtaatcccagctactcaggagactgaggcaggggaattgcttgaaccggggaggtggaggttgcagtgagccgagattgcgccactgcactccagcctgggcgacagagagagactctgtctcaaaaacagacaaacaaaactcctcactctgtccctgtcactgaccaaagaagttacccattctcaaattactttcttcatctattgcctccaattttggctggcaatatctcccataccaaaccgttaacacctggatccttttagactaccggttccatagcaggcattcaaaagttagtcatttaactttttcaccagggacaaaagtccttaaaagaggaaaaaaactggaaaggattacaaatcaccatgtgatgtttaggtgctctttagcacctaaagaggatttacaagatacattgtctgcacggcaaccactcagacgaatccaccaccaagcgaaggtttttagtaaaatatccttttttttttttttgagacggagtttcgctcttgttgcccagactggcgtgcagtggcgctatctcggctcactgcaacctctgcctcccaggttcaagcgattctcctgcctcagcctcccaagaagctgggattacaggcatgcgccaccacgcccggctaattttgtatttttagtagagacggggtttcgccatgttggccaggctggtttcgaacccctggccacaggtgatccggccgcctcggcctcccaaagtgctgggattacagacgcgagccaccgcgcccagcctaaaatacccattttaattgcatttcaatgacgttactcggtcattgacctcttacgcaaggagggcgagattagggagacagctggacttcttcctcgccctcccttcactggactggctggcgcagtgagtagccctgcccttggacgatttggcattttcattggtcaatttttcttaggaggctggccgtgtgttgactccgcctactatataggcggggtctccccgccgcaggggctgggatgctgggggctgctgaagccgccatcttggattccgcggtagcggaggcggcggtcaggcgccgcttctggggagtggcctttcttttcccctccctcccggttcggtggcggcggctcctcccactgggggggggggtggcgcggcggcggtggcatctgcggccatggcggcgactactgccaaccccggtgag

SEQ ID NO: 2597 - DNA, 2300 bp, Homo sapien
aacccaggaggtggaggttgcagtgagccgaaatcgtgccactgcagtccagcctgggcgacagagcgagactctgtctcagaaaaaaaaaaagaaaagaaaagaaaaagaaagaaagggccgggagcagtggctcacgcctgtaagtaatcctagcactttgggaggcgaggcgggtggatcacttgaggtcaggagtttgagaccagcctggccaacatggcgaaacctcgtctccaccaaaaatacaaaaactagccgggtgtggtggcaggggcttgtaatcccagctactcgggaggctgaggcaggagaactgcttgaacccgggaggtggaggttgcagtgagccgagatcgcaccattgcactccagcttgggtgacaagagcgaaactcagtctcaaaaacaaacaaacaaacaaaaaaaggaaggctcggcgcagtggctcacacctgtatgtaatcccagcactttgggaggccgaggtgtgacgaggccagcctggctaacacggtgaaaccccgtctctactaaaaatacaaaaaattaggcgggcgtggtggcacgcgcctgtagtcccagctactcggaaggacgagccaggagaatcgcttgaacccgggaggtggaggttgcagtgagccaagatcgcgccattgcactccagcctgggcgatagaacgaaacgccttctcaaaaaaaaaaaaaaaaaaaaaaaaaaggaaaaaagcacatattattttactcaaattccattttgggaaatcttttctttttgttttttgttttgttttgtttttgagacggagtctcgctcggtcacttaggctggagtgcagtggcgcgatctcctctcactgaagcctctgccaccggggctcaagcgatcctccccccgcctcagctgcggagttgctgggaccacagacgcgaactaccacgcctggcttttttttttttttttttaccttgtatttttagtcgagatggcgtttcgccgtgttgcccaggctggtctggaactcctgggctctagcaatcctcccgcctcggacacaaagcgcccggcctggggaatcttttctacagaaataaaagtactacttcaaaaggatgtttatttttattgttgcgctatttgtcggggctgagaacggaaaacaatctaaacaatctaaactattcaggtgtcaaaaatacaagttattggttttttgtttttttgttttttttggtttttttgagacggagtctcgctctgtcgcccaggctggagtgcagtggcgcgatctccgctcaccgcaagcaccgcctcccgggttcacgccattctcctgcctcagcctcccgagtagctgggactacaggcgcccgccaccacgcccggctaacatttttagtacagacggggtttcaccgtgttagccaggatgatctccatctcctgacctcgtgatccgcccgcctctgactcccaaagtgctgggattacaggcgtgagctaccgcgcccggccaaaaatacaagttttaccttttttattggcttcaggtaatgtccacatgttaaatgaaaacaacaaaaatccaaatacagaaactcgtacatacaagactggaaaatgaagctgtattacctgaaaggagcggagtggtgatggggcaagagagaatattatcacgtttttcttattacatcttgatagcctttacaatttgtatcacttatgtaacaaaacaaactcaagtaaaactgagagaataaagctctgaacctatgagcgtttccctaagtctttacacaatgaatatagtaatggggccactagtcgagggtggtaggagcggcggagactcggtaatatactggccacgcctactctgccctgccagtctcttctcacgtgtgcccctggaaggctctgccttaacgcatgcgtagttaccttagttttcgtcgcctctgaggggcgccccgcggctttggatttgaccccgtcaggctaccgtcgcggtgaccggaacggcactaaaggtttgcttccgggcgtttcttttgcttccccttccctctttcacgcttcctcccctccccctcctcccttatcccttcgctttcgctcttttccgtcgaggccgacccctgagttgtgagtctggggtctggttggtgaaaaagagcccttgaagctggaagacgggaggtgcggggaatactgttgagttatttggtgaccaaaggcttatctgggacgttttgtttgtgggagggggtcgggcgagggtgggaaggaagtc

SEQ ID NO: 2598 - DNA, 2300 bp, Homo sapien
catgtgcacaaaccggttggtgcaacatggactacaagttcggctacagctattcaagacacagaacaagggctggggtatccgctgcttggatgacattgccaaaggctcttttgtttgtatttatgcaggttggtgataaaatataagggttgtttcctgagactgggacatggtagggaattgaaccagagacaaattgaacataagaagaaagtgcttgacatgtgaactggagtaagaggaggccagggacttctacaaagaacgtgatgagtgatgtacctgtctagctagaccagagagggacacaagtgtttcacaaataagagaatgaaaagggatgaaattttggacatggtgatatttcagagaacagacatgattatagagtccagtgtatcattttctcccatgtcactccactcagagatcttttagcatagcccagtactctgtttcaataaagtagaagaaatggaaagacagaaagggcaagatttaaaatgacagtaagttctccatactttcatagttaagatacaaagggaggtattatcaaagagaaacactgggccggcgtggtggctcatgcctgtaatcccaaaactttgggaggccgaagtgggtggatcacctgaggtcaggagttggagaccagcctggccaacatagttgaaaccccatctctactaaaaatacaaaaattagccaggtgtggtggtggatgcctgtaatcccagctacttgggaggctgaggcaggagaatcacttgaacccttgaggcagagattgcagtgagccgagatcatgccactgcactccagcctgggtgacaaaagcgaaactctgtctcaaaaacaaaacaaaaaaaaaaacagaaatgagagaccagaatggaggctttttgactctatatgctggtagagcgggtattgatggaataatccttattctttctaataggtccccgtggccgggtgcggtggctaacacctgtaatcccaacactgtgggaggctgaggcgggcagatcacctgaggtcaggagttcgagaccaacctggccaacatggtgaaacgccatctctaccaaaaatacaaaaaaaattagccaggcatggtggcgtgcacctgtagtcctatctactcaggaggctaaggcaggagaatcacttgaacctgggaggcagaggttgcagtgagccgagatcgcgccactgcactccagcctgggtgacagagcaagactccatctggaaaaaaaaaaaaaaaaaagcaaacaaaaaaaaaaactaataggtccccataaccctagaaggcctttaattctcttcattctcaggcaaaatcctgacagatgactttgcagacaaggagggtctggaaatgggtgatgagtactttgcaaatctggaccatatcgagagcgtggagaacttcaaagaaggatatgagagtgatgccccctgttcctctgacagcagtggtgtagacttgaaggaccaggaagatggcaacagcggtacagaggaccctgaagagtccaatgatgatagctcagatgataacttctgtaaggatgaggacttcagcaccagttcagtgtggcggagctatgctacccggaggcagacccggggccagaaagagaacggactctctgagacaacttccaaggactcccaccccccagatcttggacccccacatattcctgttcctccctcaatccctgtaggtggctgcaatccaccttcctccgaagagacacccaagaacaaggtggcctcatggttgagctgcaatagtgtcagtgaaggtggttttgctgactctgatagccattcatccttcaagactaatgaaggtggggagggccgggctgggggaagccgaatggaggctgagaaggcctccacctcaggactaggcatcaaggatgagggagacatcaaacaggccaagaaagaggtaagcagtggcagaacactctgagagctatggctttaactttggtgcagtaacaatgcagtctcaccatgagtctttgcatgtagattattctacttgatggatatttctgtggccacctcgttatctctccccctaactagcacattcctagtgtttgtttaaagaaccaaattattgaccgggcacagtggctcacacctgtaatcccaacactttgggaggccgaggcaggtggataacttgaagttcaggagttggagaccatcctggccaacatggtgaaaccccgtctctactaaaaaatacaaaaattagccgggcg

SEQ ID NO: 2599 - DNA, 2300 bp, Homo sapien
gaagagggaactttggaattagaaggctgaaggaggagagttccaagggggtagaaagagacaattgggatgcaaggtggctcatgcttgtaatcccagcactttgaaaggccaaggcgggtggatggtttgagctcaggagttcacgaccagcgtgagcgacatggtgaaatctcaaaaatacaaaaattagccgggcatggtggcgtcgcctgtggtccctgctacttgggaggctgaggtggaggatagcttgagcctggaaggtcgaggctgcagtgacagagtgagacctcctctccaaaggaaaaaaaaaaaaaagaaaggaaagaaagatacaatggaagatatgctaataagggagggaggagaaaaacacagctggaggggttgctggaaactgggagatcaggcaggcctggggcttagaaaagcctagagaaaccctgggagctggttaggggccaccactctcatctttcccatggtgtgtcagggctgcgggtccccctgaaaagagaggcagaacaaacagttgggtcggacagcctctacctccttaccctccagaaagggcctgagatgagggatgggccctccaactggattagtgggggttgcactccttcctacgagtacttgaccagataaacggggaaacaagctactgtcagaggctctgattgcaacagcataaaaaaggcaatacttcatctaggtgagaaatttgacaaaagtacctctccatggagtaagctgcagctctccctgtataggagccctcaaatacatcttagtcaccactcgttcacgttaggagttaagaccagctttctaggaaaaccatgttgcatcttccaacagtaattacttctgaaacagtaattttaccacacgactcaaggggaaaactttttttttttaaatttataaaggagttgggggtctcgctatgttgaccaggctggtcttgaactctgacctcaagtgatctgcccacctcggccacccaaagtgctgagattacaggcataagccacggcgccaggccaaggggagaacactttttttttttttttcctgagacggagtctcactctgtcgcccaggctggagtgcagtggcgagatctcggctcactgcaaactccacctccagggttcaagcgattctcgtggctcagcctcccgagtagctgggattacaagcgcgagccaccgtgcccggctaatttttgtatttttagtagagacagggtttaaccatgttggccagggtggtctcgaacgcctgacctcaggtgatctgcccgcctcggcctcccaaagtgctgggattacaggcgtgagccaccgcgcccggccggaaaacactttttaacacgaaatcgaatacggataaacgtggtgtcatttgaaaactcatacattttacaaaacaaaagttggggtggctctttcagacagggccgccgggtgtgcgcaagttcgggtttgctcttccttgccacgggggtaggtcccgtagcacctaggtggaaaggccgcggcttttacggcggggtaggcgagggtcgcccgagtgatcgcaggctccgactgggtctcgagggtcggctgcttcggtctgccctggagaggttttcagcttcggcgcgaggcacttgggcaggatccccgggctgcaccctcctccgcccgcgccccgtggggctggaagtgggaatgtgcccaccctggcggggaccgggggccgcacagcagttgggggtgggtgggggtgggtaggagtaaggggacagggacaccgccgctcggagcccgggaccccgcggcatccagtgcgtctgtgtcggtcccagtgggagacctcccaccccgaaaagagaccgaagtggcggaaggagcccgcacccgcctccccaggtcggcggtttctctagcgcaaggtgacgggcgtggacgcggctgtggggccgggagcggagggttggggtctggcctcccgcgccggggcgaaggggcagccgcagcgcagaggcccgccccgccctcccctcccgtcacgcccagcctcccggcccttgggctgctcgcggcctttttttcccggctgggctcgggctcagctcgactgggctcggcgggcggcggcggcggcgccggcggctggcggaggagggagggcgagggcgggcgcgggccggcgggcgggcggaagagggaggagaggcgcggggagccaggcctcggggcctcggagcaaccacccgagcagacggagtacacggagcagcggcc

SEQ ID NO: 2600 - DNA, 2300 bp, Homo sapien
gaatcccgactctgagaagtctggctccagaagctttgcttttagccaccacgctgagactgagttccattttggggttgtcaggtgaaatacaggacacactgttaaactataatttcagataaacaaaaaataataattacaggcggtggctcacgcctgtaatcccagcactttgggagtccaaggcaggtggatcacgaggtcaggagttcgagaccagcctggccaacatggtgaaaccctatctctactaagaatacaaaaaattagccaggcatgatggcaggcgcctataatcccagctactcgggaggcggaggcaggagaatcgcttgaacccgggaggtggagcttgcagtgagccaacataatgccactgcactccagcctgggcaacagagagagactccgcctcaaaaaaaaaaatgttagtatatttaatgaaatatttgggtcatacttgtaccaacaaatgattcctcatttacgtgaaattctgattaagctgcatgtcctgtatatttatttatttaatctaatacccctactttacagggcacttttctctgccacatgcaattacacagattactttttttttttttttttttttttgagacggagtctcactctgtcgcccaggctgtggagtgcagtggcgccatctcagctcactgcaacctctgcctcccaggttcaagtgattctcctgcctcagcctcccgagtagctgggattacaggcatgcgccgccatgcccggctaattttttgtatttttagtagagacggggtttcactgtgtaagccaaggctggtctcgatctcctgcctcatgatccacccgcctcggcctcacaaagtgctgggattacaggcatgagccaccgtgcctggccacattaccttatttatttatttatttatttatttatttttatgagttcaatagtttttggggacaaggtggtgtttggttacatggataagttctttagtggacacattacttcatttaatcatcccaggaaacctgtcctcggaggccccagcatgtcccacagcctccgtctctctcaatcctcccatttagagagctgaaaggactagcgaagcttacagaacataggtggcagagctggatattgaaccctcattctccagttctgacacaggtgcatgttttccttttaacaggagagaaaagtgaggagcagtgattaccgccacagaaatatcctttcatggcgtgtcctccggcatggtctactcagtgtggtggagccactgcaggtccctcctccagggatgtaggaatgccagtgaaggccttcctgagttgggagagaggcagaggagtgagtggaggcagggctgtagcttctgtgccccgcccctacccaggctctccagggaggcaggaaagaggctgtgtttagacctgagggagccagctgtgaggctggagcagttgctgcatggcggggcgggggctccacagggctgttcacctgctgctctgtgcagagacagcctcaagtccagctgctggggttgcatcacctgcagctaaaacagccacagggcccaggctgccaaaaggcaacagaagcaatctaagaaaccaggcaagggagcctcccccatctccctgttgccttttgggagcatagagcttccctctgaaggtaacaccctttgcatttttctctcttgactctgttcatcaacttccactcccaaatacttgtgcccttccttctccacagatatacacaatccctgggcactctccacctaggtcagctggctctagtaaggcagcagtcaagggagtttctgggctgggaccccctctggggtgcaggctggggtgccctgctggtatgtgccccaacaggtttttccctatcagccttgaaatcagcctgcagcctgtctgacctgccccccagggagctggagccagaggcagagccaggtcagaagctggggcagagccaggtcagaagctggactttgagactaggtctctgtggtcccacctggacccacagggaaggcagtgcataaaagcctcctgtgtttgaggctgagccgctgagaggctgagtggagttcactcacatggattgaggcccagttcctgggagaagagatgctgggcaggaaggtgtctgcatgtgggactctgtacagcccggtcctctcccacgtctgggaggggccagagtcagacaactgctgggttcgtccctaagagaggtcatctgactggctgttcagcctaggctgcac

SEQ ID NO: 2601 - DNA, 2300 bp, Homo sapien
agataggtgcaatgaagggggctgccagtgccagctgccttccagctgtcaacgcctgagcttatacaggtttacacagctttataagcgacggtccaggctgggttgtggccacttccggactcacgcccagtactgggggcactggaggagggtgaaggcaggcagggacacagccaaggtgctccaggtcgctcagagagtcttcaggattcctgagtcgccgagtctatggcatgcgctccgggccctgactacaagctggttttcaaaggaagtttgtggtttttcttttcttctctctctcttttttgttctcatcaggacgaagaaaaattaggcaaggacaagctccctggaggaggaggggcctgcccagcgctggtggatttccatcaggactttctgacccggtcagcagctttgtgatcagcagagagggagcgagaaacaggagagaaaaacaacagaccctttctcttccctctgcctgcctctagaagggacggagcgcttgtgcctctctggtgagaatagggaagagcaagtgcccttgctaagtagggaggagaagggctggacagaagcagcttgttggatctgggctctctctctgggtatggcagtcctttgctctggatccacagaagcaggagcaaagagcacgatatttgcatgtattactcaattaatgttaaaaacaaacaaacaaacccagctcttttccctctggagccctccagagagctcctttccaagtccttgctgtatcatttttaagtctagaaatgaaactggttgggttgtgcacctggtagagtgcagagggtgtggtagaagccccaggctctgggcgcgatggctgacgcctgtaatcccagcactttgggaagccaaggcgggcggatcacaaggtcaagagatcaagaccaacctggccaacatagtgaaaccccatctctactaaaaatacaaaaattagcagggcatggtggcacatgcctgtagtcccagctactcgggaggctgaggcaggagaatcgcttgaacccgggaggtggaggttgcagtgagccaagatcctgccactgcactccagcctgaagacggagcaagactccgtctcaaaaagaagaagaagaagaaaagaactggcagagcaggcaggagatccaacacgcctgtgctctggatcttggttccactgcaggcctctcatcagtcacctcctctcgatttacagctggggaagcaggaaaagctggtgtgaggctgacggtaggaaataaagggatagataaataaatgagggaatttttgatgatgagtgtccatttatttgcagtacctgcactactctgcggctggaaagtggcagttaagggaggttggaacctaactccacattctgaagggttccctaaactctatgtacagggccgccacaggatgaaatttcaagcaactctaaaggctgaaagagcaattggaacaattagggtggcagagagcaaaaagccaaggttacaaccgtccaagaaaggaagaagatatttgccgaggctgtagaaaaaaacaggctacagagttgcaaagggagaagcagcaggagttggcaggagactgtaggtgttaacaagaggggtcaaagattattctaatgttctcctaacatgaacaaccacaaaattggtggcgactgagtcagtttggtaaagggcagaatttgtagaaagaagatgatctgttttgccaagtgtcatttaaaatgtcaccagatgctcggtgtgatatatgtaaagatgttatacttggcctgatctgagagggaaagttcagatgccacaataatgggttactgtgacacatacacatttgtttaccgaacgactgatccctcagaaaacaatccttccctcggttgctagggacattgcggagttgcgggactacgtttcccacgtcgccccacgccacgcccccttggcctcgccggaaagacgtcccaggagcctctgggcgtagagccccgcctccgccgctgggggcggggcgacgccggactccggagcgcccgcttacgcagttcctcccggggtcggaggccgattcgccgtgtggcgggttcgagtcccgcctcctgactctggcctctagtccctgagtcccgggcgggctgcattcgtcggggaaacctctcctcgaccaggggcacctctactcgaccaggggcgacggcgtactttgggcttcatcatggaggactacctgcagggttgtcgagctgctctgcaggtaac

SEQ ID NO: 2602 - DNA, 2300 bp, Homo sapien
gaggctcaaatgcaggattcagacccaagacttctccccgctctcaggcggaccccaaaggcggggagccaaaaaccgggagactgaacaagcagcattctcacgctcctaaactggcttctcgctcctcgctcctcatgccccaaaactgatcaggccccaacccccctccccacaactcagtgttccctccacacggaccgtcgaggctcccccagatcccacgtcttcgtccttcctggaccccgtgctccattccttacagtcacagacagggattcgttacctgcagagcagctcgacaaccctgcaggtagtcctccatgatgaagcccaaagtacgccgtcgcccctggtcgagtagaggtgcccctggtcgaggagaggtttccccgacgaatgcagcccgcccgggactcagggactagaggccagagtcaggaggcgggactcgaacccgccacacggcgaatcggcctccgaccccgggaggaactgcgtaagcgggcgctccggagtccggcgtcgccccgcccccagcggcggaggcggggctctacgcccagaggctcctgggacgtctttccggcgaggccaagggggcgtggcgtggggcgacgtgggaaacgtagtcccgcaactccgcaatgtccctagcaaccgagggaaggattgttttctgagggatcagtcgttcggtaaacaaatgtgtatgtgtcacagtaacccattattgtggcatctgaactttccctctcagatcaggccaagtataacatctttacatatatcacaccgagcatctggtgacattttaaatgacacttggcaaaacagatcatcttctttctacaaattctgccctttaccaaactgactcagtcgccaccaattttgtggttgttcatgttaggagaacattagaataatctttgacccctcttgttaacacctacagtctcctgccaactcctgctgcttctccctttgcaactctgtagcctgtttttttctacagcctcggcaaatatcttcttcctttcttggacggttgtaaccttggctttttgctctctgccaccctaattgttccaattgctctttcagcctttagagttgcttgaaatttcatcctgtggcggccctgtacatagagtttagggaacccttcagaatgtggagttaggttccaacctcccttaactgccactttccagccgcagagtagtgcaggtactgcaaataaatggacactcatcatcaaaaattccctcatttatttatctatccctttatttcctaccgtcagcctcacaccagcttttcctgcttccccagctgtaaatcgagaggaggtgactgatgagaggcctgcagtggaaccaagatccagagcacaggcgtgttggatctcctgcctgctctgccagttcttttcttcttcttcttctttttgagacggagtcttgctccgtcttcaggctggagtgcagtggcaggatcttggctcactgcaacctccacctcccgggttcaagcgattctcctgcctcagcctcccgagtagctgggactacaggcatgtgccaccatgccctgctaatttttgtatttttagtagagatggggtttcactatgttggccaggttggtcttgatctcttgaccttgtgatccgcccgccttggcttcccaaagtgctgggattacaggcgtcagccatcgcgcccagagcctggggcttctaccacaccctctgcactctaccaggtgcacaacccaaccagtttcatttctagacttaaaaatgatacagcaaggacttggaaaggagctctctggagggctccagagggaaaagagctgggtttgtttgtttgtttttaacattaattgagtaatacatgcaaatatcgtgctctttgctcctgcttctgtggatccagagcaaaggactgccatacccagagagagagcccagatccaacaagctgcttctgtccagcccttctcctccctacttagcaagggcacttgctcttccctattctcaccagagaggcacaagcgctccgtcccttctagaggcaggcagagggaagagaaagggtctgttgtttttctctcctgtttctcgctccctctctgctgatcacaaagctgctgaccgggtcagaaagtcctgatggaaatccaccagcgctgggcaggcccctcctcctccagggagcttgtccttgcctaatttttcttcgtcctgatgagaacaaaaaagagagagagaagaaaagaaaaaccac

SEQ ID NO: 2603 - DNA, 2300 bp, Homo sapien
taacaaaaagggattggttccaaatggccttatgcattgaaataactccccaaatttgtttttcacaaggaaaatgtctatgtaattggtgttaaaatggaccttctccccaattcaatatgaagacaattcatttattccagcagctgagtctgcagcaggaattagtgactttcaggatttgttaaagaccagaatctgtccctcaggggaatttgtagagtttaagatatctaaaaaggaaagctcagcaagccatctatctaggtttcttcagggcagtataactcaaagtagaggggccgggtgacctcctggagcctgtctctggttagctttttgctgctaactggggataacagcctaatgcctcatgacggctcagcatggctgggtgagtccaactgagtcagagagcaccaaaaataagccacaaagcattgagtagtcatatttatggttttgattccaaacacactttgtgcttatcccttccaagtggagaatttttatgtcatttgtgtgcgttaaggccaaaggagaaacctggaggcaaaggaatgctggttgtgggtcaacaaatatgcctgatggattttgtatgtttggcttaaaaacactgacttaaagtaaaatactgtgactacttctaacctagaaatgagttcagcccgccagacagaaactgccattcggaggaaataaggccgtgagcaccggttccctccacacccccgaggttcacctggaggccagtgggccaagcgaagccttgggagcggagaactcaaagaggggcggggagaaaagaataaacacacctcgcggggctaggctggcggcggcacagtcctggtttttttgatggaactgaccaagatgacagcaagcagaggctcaaatgcaggattcagacccaagacttctccccgctctcaggcggaccccaaaggcggggagccaaaaaccgggagactgaacaagcagcattctcacgctcctaaactggcttctcgctcctcgctcctcatgccccaaaactgatcaggccccaacccccctccccacaactcagtgttccctccacacggaccgtcgaggctcccccagatcccacgtcttcgtccttcctggaccccgtgctccattccttacagtcacagacagggattcgttacctgcagagcagctcgacaaccctgcaggtagtcctccatgatgaagcccaaagtacgccgtcgcccctggtcgagtagaggtgcccctggtcgaggagaggtttccccgacgaatgcagcccgcccgggactcagggactagaggccagagtcaggaggcgggactcgaacccgccacacggcgaatcggcctccgaccccgggaggaactgcgtaagcgggcgctccggagtccggcgtcgccccgcccccagcggcggaggcggggctctacgcccagaggctcctgggacgtctttccggcgaggccaagggggcgtggcgtggggcgacgtgggaaacgtagtcccgcaactccgcaatgtccctagcaaccgagggaaggattgttttctgagggatcagtcgttcggtaaacaaatgtgtatgtgtcacagtaacccattattgtggcatctgaactttccctctcagatcaggccaagtataacatctttacatatatcacaccgagcatctggtgacattttaaatgacacttggcaaaacagatcatcttctttctacaaattctgccctttaccaaactgactcagtcgccaccaattttgtggttgttcatgttaggagaacattagaataatctttgacccctcttgttaacacctacagtctcctgccaactcctgctgcttctccctttgcaactctgtagcctgtttttttctacagcctcggcaaatatcttcttcctttcttggacggttgtaaccttggctttttgctctctgccaccctaattgttccaattgctctttcagcctttagagttgcttgaaatttcatcctgtggcggccctgtacatagagtttagggaacccttcagaatgtggagttaggttccaacctcccttaactgccactttccagccgcagagtagtgcaggtactgcaaataaatggacactcatcatcaaaaattccctcatttatttatctatccctttatttcctaccgtcagcctcacaccagcttttcctgcttccccagctgtaaatcgagaggaggtgactgatgagaggcctgcagtggaaccaagatccagagcacaggcgtgttg

SEQ ID NO: 2604 - DNA, 2300 bp, Homo sapien
agagaaaggtcgagatgccagcagtattggaaaaatcaagtatttttccagcttcatattgctgtagagaatatactattcgggctgggtacagtggctaacacctgtaattccaacaccttgggaagccaagccagggggattgtttgagtccaggagtttgaaaccagattgggcagcatggcgagaccctgtctctataaaaatacaaaaaattagccctgcgtggtggcactgcctatagtcgcagctttttcgggaggctgaggtgggaggatcacttgagccggggaggtgatcacaccattgcactccagccagggcaacagagtgagaccctggctgaaaataaataaacaaatacaaaataaaaatagagaatatactactaacctgggggtcgggggaggctctggaggatatatgctggagagtagatgcatgcaaagaaatactatttggtgaggtttcaggtccaagggcactttaccaaatggtggaagagaccagtcatttgggttactggggggtaaaatccaactgtttagcacttagaacggtgccccaaaaactctacattagtcctccaataagcgccctgtggtggactcagaggtaacaaaaagggattggttccaaatggccttatgcattgaaataactccccaaatttgtttttcacaaggaaaatgtctatgtaattggtgttaaaatggaccttctccccaattcaatatgaagacaattcatttattccagcagctgagtctgcagcaggaattagtgactttcaggatttgttaaagaccagaatctgtccctcaggggaatttgtagagtttaagatatctaaaaaggaaagctcagcaagccatctatctaggtttcttcagggcagtataactcaaagtagaggggccgggtgacctcctggagcctgtctctggttagctttttgctgctaactggggataacagcctaatgcctcatgacggctcagcatggctgggtgagtccaactgagtcagagagcaccaaaaataagccacaaagcattgagtagtcatatttatggttttgattccaaacacactttgtgcttatcccttccaagtggagaatttttatgtcatttgtgtgcgttaaggccaaaggagaaacctggaggcaaaggaatgctggttgtgggtcaacaaatatgcctgatggattttgtatgtttggcttaaaaacactgacttaaagtaaaatactgtgactacttctaacctagaaatgagttcagcccgccagacagaaactgccattcggaggaaataaggccgtgagcaccggttccctccacacccccgaggttcacctggaggccagtgggccaagcgaagccttgggagcggagaactcaaagaggggcggggagaaaagaataaacacacctcgcggggctaggctggcggcggcacagtcctggtttttttgatggaactgaccaagatgacagcaagcagaggctcaaatgcaggattcagacccaagacttctccccgctctcaggcggaccccaaaggcggggagccaaaaaccgggagactgaacaagcagcattctcacgctcctaaactggcttctcgctcctcgctcctcatgccccaaaactgatcaggccccaacccccctccccacaactcagtgttccctccacacggaccgtcgaggctcccccagatcccacgtcttcgtccttcctggaccccgtgctccattccttacagtcacagacagggattcgttacctgcagagcagctcgacaaccctgcaggtagtcctccatgatgaagcccaaagtacgccgtcgcccctggtcgagtagaggtgcccctggtcgaggagaggtttccccgacgaatgcagcccgcccgggactcagggactagaggccagagtcaggaggcgggactcgaacccgccacacggcgaatcggcctccgaccccgggaggaactgcgtaagcgggcgctccggagtccggcgtcgccccgcccccagcggcggaggcggggctctacgcccagaggctcctgggacgtctttccggcgaggccaagggggcgtggcgtggggcgacgtgggaaacgtagtcccgcaactccgcaatgtccctagcaaccgagggaaggattgttttctgagggatcagtcgttcggtaaacaaatgtgtatgtgtcacagtaacccattattgtggcatctgaactttccctctcagatcaggccaagtataacatctttacatatatc

SEQ ID NO: 2605 - DNA, 2300 bp, Homo sapien
atctgacctcgtgatccgcccgccttggcctcccaaagtgctgcgattacagatgtgagccaccatgcccagcctttattttttattttaaatatatatattttttttttatggaacagttcacaaatgtgcatgtcatccttgctcagcggccatgctaatcttctctgtgtcattccaattttagcgcatgtgctgctgaagtgagcactgatctcagtcttgaaagaggactaggtgtttgcttggtgaattgggagggaggagggaaggtggttaggaaaggcattccaggcagagggagtaattaatagaatcaaatgcaggcaggcgtgaaatagcatggtgagctaggggaaatggaatttgttttgcacagctggagcataaaatttgagggagaagtaggacatggaaaaagatgagacagagggggcaggcaggaggcagattatggaggcctcataggcccttctaaggtgattggattttattttaggccgtggggaactattttaaattatattctgggtcctaaaagaatcagattttcttttttcaaatgatcattcaggccactttgtgaaggacagcccaggagggctcttggttggaagcaggtgattggttaagagactactggaatagtccagacgagagatattgagggcctagagtggggcagtaacagagagttagaaactagggcatggataggaattaagatagaattcacaggacctggtgacccacatggaatctaagtattgagtgggttataaaaataggagagatttgctgggcgcggtggctcatgcctgtaatcccagcactttgggaggccgaggcgggcggatcacgaggtcaggagttcgagaccagcctggccaatatggtgaaaccccgtctctactaaaaatacaaaaattagctgggcctggtggtgggcgcctgtactcccagctacttaggaggctgaggcaggagaattgcttgaacctgggaggcggaggttgcagtgagccaagattgcaccactgcactccagcctgggcgacacagcgagattccgtcttagaaaaaaaaaaaaaaaggagaaatttagatgttgggtatcaagggtgtcaagggtatagggttggaaaggcaacgctaaaggacagcaaatgtgggggtaagatatttgcagcagatgcttcacagaatttgcttatacactatttaaagatgactccaattataacattaaagaaaagaattgctgggcgcggtggctcacgcctgtaatcccagctctttgggaggccaaggcgggcagatcacgaggtcaggagttcgagaccagcctgaccaacatggtgaaaccccatctttactaaaaatacaaaaaaaaaaattagccgggtttggtggcacgtgccttgtaatcctggttacccaggaggctgaggcaggagaatcacttgaacccgggaggtggaggttgcaggagccgagatcgtgccattgcactccaacctgggcaacagagtgagactccgtctcaaaaaaaaaaaaaaaaaagaattgagaggagttaggcagaggtaaaagtaaccaaaggtcagttttaaatgcttgcctggcagatcacctgaggtcaggagtttgagaccagactggccaacatggcgaaaccccatctctactaaaaatacaaaaaaattagctgggcatgttggcaggcgcctttaatcccagctactcaggaggctgaggcaggagaatcgcttgaacccgagatgcaaaggttgcagtgagccaagaacgcaccattgcactctagcctgggcgacaagagtgaaactccgtctcaaaaaaaaaaagacatctgcattttccttgatgtgtggggtagaggttggctagaagcagctggagtgtccgtacctatctttcttcctcttttcccataccctcccctccacagaagtgacacagccctagaggaggcagtagcagaggtgctagaccatcgacccatcgagccgaaacactgccctccctgccatgtttcagttgagctggtggggtcctgtgctaccctggtgaccgagagaatcctgcagggggcaccagagatcttggacaggcaaactgcagcccttctgcatggtaagggtggcttttggattgggacctcagtagttctattcctgtccctgagaagggagggtggaaaagtctagacgcttccagcctaaccatatgctctcagagccattcagctcataccaaaagataggattctttcaggggac

SEQ ID NO: 2606 - DNA, 2300 bp, Homo sapien
tctctctattttatttgccaggggcacgatgtgacatatctgcagtcccagcacagtgggacaaaaagaatttagaccccaaaagtgtcctcggcatggatcttgaacagaaccagtatctgtcatggaactgaacattcatcgatggtctccatgtattcatttattcacttgttcattcaagtatttattgaatacctgcctcaagctagagagaaaagagagtgcgctttggaaatttattccagttttcagcctacagcagattatcagctcggtgacttttctttctgccaccatttaggtgatggtgtttgattcagagatggctgaatttctattcttagcttattgtgactgtttcagatctagtttgggaacagattagaggccattgtcttctgtcctgatcaggtggcctggctgtttctttggatccctctgtcccagagccacccagaaccctgactcttgagaatcaagaaaacacccagaaaggccttaatgacctcataggcactcttccaaaaagacaacagaactggaatgagaggcctgggtctgtctcctgccttagcaggcctatcaatttcttgtcaatctctttttttccttgctcacattaaaaggaagcatggagttctaatgctcccataaactatgtattttggcaagacacttcactactccaggtctcactttccccatctgtaaaacagggtttggactaggtgttccctggtattctgtgatctgcctcttgctgccattctttctctcctctgcttctctgtatttttcttctgttatccctgggggtgctcaggttcacttgattgtctgtatttctgtgtggttgtagcaaggactcagcctcatgtagcacgaataggggtgtggttcatggcgtgttgacccagcagagcactccctcccactaacttgttctgcatgtgtagagtctccccattttttttaacgcaaccctttcccctttttcctaccccacagctctgttccatgtaagttgccaacagtttcactgaacagtggggtatgtgatggttttggcatgacatcttcagtatgagggggacagtttgacttcactttgagggtgtgatgtctgtagctatgtggaaggtaaaaatagtggtgtgatcatgaaccaaaggaatttatgttttgtaacttgggtactttattttgcattttgttatactattaaataattttttcctgtttgggggtcttactgtctttttttacaagtgtattcaggcctttctctgtgatagttgtttcagtctcctcaaaattgatcccccttcttcctactatacttaatgtcttctttctgttgactctttttgggaataaggagcaacaggcttctgtctcccctcatcctcagcctcccgttcaacttgtttattctcccagaaacctccttataacatacttccgtttccccagttttccttatgcttgaaaagtagatccaagataacagtcctagaaacacacacaatggtttctttttctttttttttttttttttgagatggagttttgctctttttgccctggctggagtgcaatggcacaatctcagcccactacaacctctgcctcccaggttcaagcgattctcctgcctcagcctcccaagtagctgggattataggcatgtgtcaccacgcccagataatttttttttttttttttttttttttttttttttggatttttagtagagatggggtttctccacattggtcaggctggtctcaaactcccgacctcaggtgatccgcctgccttggcctcccaaagtgttgggattacaggtgtgagccaccacgcccggccagaaacacaacggtttctactggtttttttgcttatttgtgtaaagagcaactttgagagggatatatggagtctggaaaggagaacaaattgccttcctagactcaaccgagactggcccccactagaaaatgcactctcctccccaaaacccgccccctcacaggaggcagggtttttcttttgggcaaacctgctcctggggagaggagtggcaaaacctgttttgaagatgaggttacctcccttccacacctccctccttggaggcaagagctacaacagctgagacagaaaagaggtaaggaagtgttgggggctgggacaaccagctccccaacaactcctaggtgtttaaagaaggaggcaggaagacttgtgaagatgggaactatacaagaggcaggaaaaaagacagatgttgggta

SEQ ID NO: 2607 - DNA, 2300 bp, Homo sapien
aagaaggaggcaggaagacttgtgaagatgggaactatacaagaggcaggaaaaaagacagatgttgggtaagtaagatcttggctcacttgattggtaacagtgaataaacagtccggagagacttccccaccacccagctcttactgggtcaaatctcgggttcctcaaggagacaagactgtaagagagtttgcagagaagagatgagggtggttttaggtaggaaatgtcagtatggtatggaactggggaacaggattccaggataattccctggtttaaaaataaaggaagtttctgtaatatgttgtacctgataaatctgcctgtgttcttttattttctaaccctcaccctccagaatggccatcaggaaagctgaaccagaaccgagtttaggtccaggttctcgttctggcaaatctttctccttaccttcttcctccacccctccacttatgccatgttttcccttagccactccccagctcggtggaggaaaggcaggcctaactaggtaccgtcttcccgactttgctcaatgatagctgggtgggtctagctgggttccagccacttgtaatgtgggacatctctcaccccaactttgtaggtggagcaactgctacagaggtaaatatgattaactttacattccatctttcgtctgctcccaaacttaacagcaggtaatctgcttctagcaagtggtgaaggtaagagaagcatctgtataggaggcaagagatctgagtccttttgaaggcctatcctctgctctgtatctcaattactgttcttcatttcaattattcttacctactattcagttcccttgatcttttcttcttgggggctgtcttagggtcagggagattgcagaagcaccagaactaggagcagccctgagacatggggagttggagctgaaggaggaatggcaggatgaagaattccctaggtgaggacgtgtgagggtggctgggagaagggaggggtggtcacgaatggacggaggggatggcgcggcggctcatggctgtaatcccagcactttgggtggccgaggcgggtggatcacctgaggtcaggagtttgagaccagcctgaccaacacggtgaaatcccgtctctactaaaaatacaaaattagccaggtgtggtggcacatgcctgtaatcccagctactcgggaggctgaggcaggagaatcacttgaacctgggaggcagaggttgtagtgagctgagattgtgccattacacccgagcttgggcaacaagagtgaaactctgtctcaaaaaaaaaaaaaaaaaaaaaaaaaaaaagcaaatggacacagggatggtgaattaggacttgaaggaaaaaaatgggaaaaagaaaacagaggccgggcgtggtggctgatgcctgtaatcccagcactttgggaggccgaggcaggtggatcacttgagctcagaagttcaagactactctgggcaacatggcataaccccatctctacaaaaatacaaaatttagccaagtgtggtggtgcacacctgtaggcccagctactcgggaggctgaggtgggaggaccgcttgaaccctggaggtagaggctgcagtgagctgtgattgtgccactgcattccagcctgggcaacagagtgagaccctgtctcaaaaaaacaattaaaaaaaaaagcagcataggtgataaaatcatggtggggagagagaacctatatattgagtcctggcttgatgcctttggtgtatatgtctgccgccttttaatctcttcccctctagattgcttcctgaggaggctggcacttctgaagatcctgaagaccctaaaggagattcacaggcaggtaggtcaagtagaaaccaggcctcaagttcttgattctagtccagtaaagggctatgccacctctatccttttacagttccatttcccccttttcccaaatctcccctgcgtgagtccttcttcagcattcaccccatattatcactttcacatacaggaattctagccctctcggctctccaacacacacacccatcttggttctctttttccccctttctccagctgcaggtacccccagcactttagccctgtgtggccagcgccccatgcgcaagcgtctttctgccccagagttgcggctgagtctgactaaggggcctggaaatgatggagcttcacccacccagtctgcaccttcctctcctgatggcagttctgacctggagatagacgaattggagacaccttcagactcggagcagctg

SEQ ID NO: 2608 - DNA, 2300 bp, Homo sapien
gattacagctgacggaatggggattagacccaagtaccagataaatctagaaactagagaagtgaatgaaggaagttacagtacagaaaacagttccacgtgatcttcacacataaaggtggaagaagaaataggatgatctcatgttgtttttcaggctacggaaaaacctgcgagccctggtggttgtccatgctacatggtatgtgaaagcatttctggcactgcttcggcccttcatcaggtactagttctaggaacaaggactcctttctccttccccccattttcaaaatcaagattaagatctttctccaccttgattctttctagccttaaccactctacttctacatttttctttgcaaggatttttgggaacccttctcccaatacaaaacacagttgatttattctctcttttcagttccaaattcacacgaaaaatccgttttctggacagcctgggggagctggcccaactcatatccctggatcaagtccacatccctgaagctgtcagacagtgagtttcacacttaagaataaagccttggggtgggatgtgtaaagccaatctctacttttttaatgccttgggggacatacaaaagaacgaaaagctagagggccctgttttcgggtgctttaatgtatatggggaaactgcacacacccagagaagaaatgaaggacactactgcatccaacaagaataaatgaaaaaaaaaaaaaacctatacatataagtgcagaggcaataaggaataaaggaataatcacagtgcagaggagattcagactggccctagaaattaggaagagatgtgttggcagtgaacagatgatatccagtgggggagagggtgttagggagcaaaagtgctaaatgatgactcaacccaatcatctagctcttccaattcacctggcttctctccccaaaccagaaaataaaacccaagtcctaccccctgaaccacttctctcctccccctctccctctcctaggctggaccgggatctccatggctcaggagggacatagcacaggactggataaaaggccttagaaccagttagtgatctgcctacacctgaatccctgaaacatctgaactgttttgtaaatcatcttatccccaacctcagtaccaccggatcttcacttctcagtgggattttgtcctttgcatgaccctactttcagcagggctttgaggctgggaaactgatctgctgggtgactttcattccagttgctgggacggaaggctgaatgtagggtcattttgtatgggatatgcagagctctgggtttttttgttttttgttttttgagacggagtctcgctctgtcgccaggctggagtgcagtggtgcgatctcggctcactgcaacctccgcctcccggttcaagccattcttctgcctcagcctcagcgagtagctgagactaccggcgcacgccaccacgcccagctaattgttttgtatttttagtagagacggggtttcaccatgttggccaggatggtctcgatctcttgacctcgtgatctgcccgcctcggcctcccaaagtgccgagattacaggtgtgagccaccgcgctcggccagagctctgggttttaatcctactttagctgtagaaccttgggcaaataacttcatctttttgggtcctaattttcctcctgtctaactggagggactgtgatccttccaccttggatggaagaggcttacctgacagccagcctgcctgctgggagccaggagagtcagctcattaaatcttgaagaaccgctgtatgccctttttccttctaagtcatgtctgctgcctgtgagcctgggaaggagtgctttcaaaacctgtatttttgccctctttagtaaatttagaactgtagaggctaataaactgcgatgagacatttaagctctgctccaaagaagtgaacgactctttcaccaccccttgcatcccaaaccttcggttctggcagagttcttgccgcagaggttccttaggagcaccccgcgcggcccgcgcgagcgcgcctgcgcgtcgaaccccacccccttccccgcgggcctcggttcaaacgacccggtgggtctacagcggaagggagggagcgaaggtaggaggcagggcttgcctcactggccaccctcccaaccccaagagcccagccccatggtccccgccgccggcgcgctgctgtgggtcctgctgctgaatctgggtccccgggcggcgggggcccaaggcctgacccagactccgac

SEQ ID NO: 2609 - DNA, 2300 bp, Homo sapien
cctctaattcttcatttttccccaacccttaccacctgccaccaccaccatcaggacaaaccctatgactgactcactgacgtcccactgaccacagctcccctctctggacagcgtgttttagcttccgctccttctggttactcctcccttccagtggtgagaagagaagagaaagcccagcctcctgggttctcccctcccctagaagctacatttgagtgtttgtgtgatctcatctcaaggctgttaaaaaaaaaaaaaacctctgtgtgtgtgtgtgtgtgtgtgtgtgtgtgtgtgtgtgtgtgttttgtatttgagacagggtcttgtcctgtcacccaggctggagtgcaggggtgcaaacatggctcactgtagccgcaactcttgggctcaagtgatcctcctgcctcagcctccccagtagctgggatgacaggcacatgctaccacaccctgctatctcgtttttttgtgtgtgttttttttgaggcggagtttcgctcttgttgcccaggctggagtgcagtggcgatctcggctcactgcaatctccggttcaagcgattctcctgcctcagcctcccaagtagctgggattacaggcatccgccaccacgcccagctaatcttttgtatttttagcagagatggggtttcaccatgttggccaggctggtctggaactcctgacctcaggtgatccgcccaccttggcctcccaaagtgctgggattacaggcgtgagccaccacgcccggcctatctcttgtttttaaatcagtctagggtgccaaagcatcagggttcccggcctgcaagaaagggagattcctgttcatgttaaagtgtcatatttatgaaactgccctttttggaatctttgaggttgtctgtactataggactggggaaatgcaagtgagtctaagaagaaacccagatgtgtcctaccctggctggcagtagtgagaagggaggaagttcttccttggacactagtactattggaaagttccttatgtctggttcactgatgaagcttgaggatagaattggtgaggagggaggggagaacaggtcacagctggaggggagcctgggccctatagggtgtgaggcagagcagagtggcagataggacatgtggacggtggggaaaatattcctcatgggacagaagatacctggcacatgtacccacaacctgtacacagatgatctgtactggacacacgtggagatatggccatgccacgcatgtgcaaacagaggtgtacacacaggagtgcagtgatacaggacacagataaacagaatgtacacagccttcaggaaggatctcaaggtcaggtaataaaggaactgctgctgactggcttctgggagggattggatttcactggagggaaatcaggaggaatagggcagcaaacagagagggaagaaattccttattgtagaaagtctttcctgagggccaacctgccagttagtctcctaggacctcagtggtccagggctctcctgttcttaaagaaactctaggcgttcagggcaaggtaagaaaaaaggcagggacagggtggagaccttgtttgtgagaacaaaaaaccactatttcctcttcagagtcacttaaatgcccctccccttctgccctaaactcagagagaagggagctggagcttgtatcaccccaaactttgctaatttctgccactatcctttggtcctcgcccatcctcttaactctaagtgcttctagcccccttcctctcccttggtaccaccagccactgctccttaaccccttggtgtccttttggttctgttccttttttttagagtcaaactgaggttcatagtgtttgggaatgagtgttggtgtacaggtctagggcctctcagggaggactgggaagatataggctcatcaggaggtttctcaaggattgggggagggggagatttctcactgatctttctttttactttcttctaatccagggttccgagtctgaggaagacataaccttgtgcctgcctgcccacctctctctctggtcctgttcatctctcaggctctgagacactgaccttcactgctcagttaaaggttccagggattccactttgtctggacccatccagctgagtgaacccagggtggtggtgtatctggggagagtgaggagtgggttgtccaaacaccagggaaagagccctttggggcctcagacagcggagtgaagctggaaccatcagggaacatgagtgaattttggcacaaac

SEQ ID NO: 2610 - DNA, 2300 bp, Homo sapien
cctgaggtcaggagttccagaccagcctggccaacatggtgaaaccccatctctgctaaaaatacaaaagattagctgggcgtggtggcggatgcctgtaatcccagctacttgggaggctgaggcaggagaatcgcttgaaccggagattgcagtgagccgagatcgccactgcactccagcctgggcaacaagagcgaaactccgcctcaaaaaaaacacacacaaaaaaacgagatagcagggtgtggtagcatgtgcctgtcatcccagctactggggaggctgaggcaggaggatcacttgagcccaagagttgcggctacagtgagccatgtttgcacccctgcactccagcctgggtgacaggacaagaccctgtctcaaatacaaaacacacacacacacacacacacacacacacacacacacacacagaggttttttttttttttaacagccttgagatgagatcacacaaacactcaaatgtagcttctaggggaggggagaacccaggaggctgggctttctcttctcttctcaccactggaagggaggagtaaccagaaggagcggaagctaaaacacgctgtccagagaggggagctgtggtcagtgggacgtcagtgagtcagtcatagggtttgtcctgatggtggtggtggcaggtggtaagggttggggaaaaatgaagaattagaggaaacccccaacaccagcaggcaggctgtactgtgactggactctccctcaacatcccccactctgctcaaagctgagggacagaggtggatagtgctgggagggaagagaagagagggggaggagaaggagagagggaaaggggcagtggagagaacaaggccatttctgtttcttttccagggacctgaccagagctgggtggagggaaagcgtgtgtgtgggacttggcatgaaatgaccaatgatgacgagaagtgaccaggaaattccattccctaggacattagggtctctgaaacttgagggtggggtcagagtgtgaagaagacaggtcagggtgaatgtgatggtagcgcagggcagtgggggatgggaacaaagccagaaaaggaagtaagagccactggcggccactcttctttaaagcagccagaagagagtgggttgaggaaaaatgaagtcctgagctggtcagcccaggcggaagagccacccgaatccaaccccacagtgaatagggaaggggctgagaaaacaacaggagggatgaggattagacctcataaggccacgtcctgagagccaagtggtgctcagaactcgacctctctgagttccaaatggcaagagtgaaatatggaaccgggaaagccaccccccgcccccaccaagatcatactaggacttgagggtctcagagctgttgggaggtgagcagaagggatgggaaagaggtgccagggaggaaggatgtacaggctagttctctggtcctgttcgggccccaaaccggttctcccggtcccaccgcctctggccctaaggcctccaacccgcggcctgacaagccctcacatgaagcagctggagagaaagaaagaatcgagagaatggcatgggcaattctggctagaagcccggggcagcagctggtccctgtgtggagaccccgagacatggagggctgctgagggactctggagaagcggtgtggactccatatttcagccaagtgacaggcccaacaccaaccttcccttccccaggaaaggtcttctgggggcttaagaggaaagagggctaggccctaagcctcccctccccaaatatattcaatcacacagattccgtatctgtctccccccactacacaactctacctagaagttctctgctgttctcaacccttaaccggactgggacctctctgggaatctttcggaccctctccctcccacctcccccaacattccagttccttcttttccttctactcttcagcggcctcagcctgcgcaccccaggagcgtggatgactacggccaccccgggcgcgcacccctttcccaccaccccagcatctctgcagcccaggacacccgcctcccccacaccccgcatccggtgtgtctccgcctggcccggccggcgcggcaggcgggccaggggaccaactgcacggcctcacctgctcttctccaccatccagacgttcagctacagctggtgggggtgagggactctgctccgtggccgccagtgtgggcttcccgggctagctctgcggcgaggtgggggagccgagtacgagc

SEQ ID NO: 2611 - DNA, 2300 bp, Homo sapien
tgaaatgaccaatgatgacgagaagtgaccaggaaattccattccctaggacattagggtctctgaaacttgagggtggggtcagagtgtgaagaagacaggtcagggtgaatgtgatggtagcgcagggcagtgggggatgggaacaaagccagaaaaggaagtaagagccactggcggccactcttctttaaagcagccagaagagagtgggttgaggaaaaatgaagtcctgagctggtcagcccaggcggaagagccacccgaatccaaccccacagtgaatagggaaggggctgagaaaacaacaggagggatgaggattagacctcataaggccacgtcctgagagccaagtggtgctcagaactcgacctctctgagttccaaatggcaagagtgaaatatggaaccgggaaagccaccccccgcccccaccaagatcatactaggacttgagggtctcagagctgttgggaggtgagcagaagggatgggaaagaggtgccagggaggaaggatgtacaggctagttctctggtcctgttcgggccccaaaccggttctcccggtcccaccgcctctggccctaaggcctccaacccgcggcctgacaagccctcacatgaagcagctggagagaaagaaagaatcgagagaatggcatgggcaattctggctagaagcccggggcagcagctggtccctgtgtggagaccccgagacatggagggctgctgagggactctggagaagcggtgtggactccatatttcagccaagtgacaggcccaacaccaaccttcccttccccaggaaaggtcttctgggggcttaagaggaaagagggctaggccctaagcctcccctccccaaatatattcaatcacacagattccgtatctgtctccccccactacacaactctacctagaagttctctgctgttctcaacccttaaccggactgggacctctctgggaatctttcggaccctctccctcccacctcccccaacattccagttccttcttttccttctactcttcagcggcctcagcctgcgcaccccaggagcgtggatgactacggccaccccgggcgcgcacccctttcccaccaccccagcatctctgcagcccaggacacccgcctcccccacaccccgcatccggtgtgtctccgcctggcccggccggcgcggcaggcgggccaggggaccaactgcacggcctcacctgctcttctccaccatccagacgttcagctacagctggtgggggtgagggactctgctccgtggccgccagtgtgggcttcccgggctagctctgcggcgaggtgggggagccgagtacgagccggcagaggtggggccggctgagggcggaagcggcggcgacgcgattacgaaacccgtccggctcggagcccggcgcactgctcccctctggactgcggaggcactgcactgcgcgggacgtgggagggtgcctctgcagcccctcaaggccgccgcccctgcggggagaactggagaatgcggacacctagatgaggccctggcacccaagctggggcccccggaatctcacgttccctttactcgccaggcatttcggggcaaaacgaagcggagccccccaaacccccagacctaaccaagttcagagattcgcagaagcacgccccccaccccaaatttattgtgctctacccaaaatggaataggactaggtttatttacccattgtgagggtagagaggcgagtctggaggagcagggattgggagaaggggtggaaaaatactctgattcttaaaaatactttgtaacctaaagtccttaaattgtggaagaaaggaatactcctcctttccattgtagtctagagttaagatttcaaatccataaattagaggacctaaaattagagggcaattaactgctcattcattgggcccccagtcagcacgggggtgctggaagagatcgggaataatagcgcagaccaatgagcctagggagatgctttcatcgtctctccttccctcaagtgttctggaacctatcatttgaattagccgagtcaggcaggagggggcggggaatccttccgcccttcttaggaggggctgcattgcagggggagagtgaactgacagactcagtcactgaagagggaaaaggagtgagaagacaaagccgtcaaagccccaacagctttgtatttctccagcccggcgcagaccccggagctcccgaggcactccctccatctttggaacacgccagtaat

SEQ ID NO: 2612 - DNA, 2300 bp, Homo sapien
gtagtaatgacatttttgatttaatatagtatggatttaattatcaaatactccaaatttcgcaaaagatccttttttggctagcttccccttcccctccacaaatgctctccagccctacttcatctatctttacatctttcattatcttaaatggtatcatttacttaaagggttttgacagtgccttgtaccacaatatatgttcaataaatgcttcccactatccttcactttaaattatccgggtattttaggcaaaggcaatatctaattatcactctgttcttagagatacatgattagcaaatgtatagattagaaagatacactctcggagccacacagacacgcccaaatatcctttgtccagaccctttgtgggcatccaaggcctactcaacagggccttgctgtgtcatgctgccaccatggggaagggggaaggacaaggtggtggtggtggtagaggggagcagaacctctctgacatctcataatgtgtgcctcagtcagagcttggattttcctactagcattcctccaccaattccactgagctgcaaatcattcttttccagaatctgtccccatacctagctcctgtgggctatactgatttcactatggaatcaggcagttctccaacacagaggcccccacctttcctaccctaggctgcctctttctttggagcaaagattcgaggtggaatgaaagagattatccaaagaaaggtcaggattacacccaacattatcccatataaccccctcccaaactccctcctacagagaaacatagaacactacagaaaaaaattgcaagtatagggaagtagaggacagagagatacagtaggactaaaaattaaacagctggtaaaacaaattatggtttgaaaaggaagataagtagactgaagatattaaatacacaggacaataaattacagaaaaggatacttgaaatgaggtaggtgctgagaaataactacaagtaaattgttagagattaatggtctgtataaggtaacaaggcatggatgctgtgaagaaataactacccattgttcatagcgcccccttctctcctcttcagctgtcccccacctcatgtggggtctttcaatctaaccataagcagccgctcttctatctttgcagccccctgccccctccctcagtttggtttacctgttatcaatcaattactggcgtgttccaaagatggagggagtgcctcgggagctccggggtctgcgccgggctggagaaatacaaagctgttggggctttgacggctttgtcttctcactccttttccctcttcagtgactgagtctgtcagttcactctccccctgcaatgcagcccctcctaagaagggcggaaggattccccgccccctcctgcctgactcggctaattcaaatgataggttccagaacacttgagggaaggagagacgatgaaagcatctccctaggctcattggtctgcgctattattcccgatctcttccagcacccccgtgctgactgggggcccaatgaatgagcagttaattgccctctaattttaggtcctctaatttatggatttgaaatcttaactctagactacaatggaaaggaggagtattcctttcttccacaatttaaggactttaggttacaaagtatttttaagaatcagagtatttttccaccccttctcccaatccctgctcctccagactcgcctctctaccctcacaatgggtaaataaacctagtcctattccattttgggtagagcacaataaatttggggtggggggcgtgcttctgcgaatctctgaacttggttaggtctgggggtttggggggctccgcttcgttttgccccgaaatgcctggcgagtaaagggaacgtgagattccgggggccccagcttgggtgccagggcctcatctaggtgtccgcattctccagttctccccgcaggggcggcggccttgaggggctgcagaggcaccctcccacgtcccgcgcagtgcagtgcctccgcagtccagaggggagcagtgcgccgggctccgagccggacgggtttcgtaatcgcgtcgccgccgcttccgccctcagccggccccacctctgccggctcgtactcggctcccccacctcgccgcagagctagcccgggaagcccacactggcggccacggagcagagtccctcacccccaccagctgtagctgaacgtctggatggtggagaagagcaggtgaggccgtgcagttggtcccctggccc

SEQ ID NO: 2613 - DNA, 2300 bp, Homo sapien
tctaattttctctcttcacaagaaaagccacagaaatctgagaaattagccttgctttcacacttagcttatacatcttttttttcttttttatttttgagacagggtcccactctgtcacccaggctggagtgcagtggcggggatcaccgctcactgcaacctccacccaccagggtcaagggatcctcccacctcaggctcccaggtagctgggattacaggcgcctgccaccaggcctggttaatttttgtatttttcatagagacggggtttcaccatgttggccaggctggtctctaactcctgacctcaggtgatctgcccgccttagcctctcaaagtgctgagattacaggcgtgagccactgagcccggcctcattttatctttctataataatattcaacttagaggaagaatgatttgagtagcatttagacattagatggtgaacttcgcattgaacagataatgaaagggcaaaatcaacttaaaattagaaaagtagttagggagacaggtacaaccactcttctgcttgcccactgactaccaacattatatttcaggtaataattctcctaggtgcctaagaagataaacgaattcactcaaatatgttatctgcttaacttctggtttttgtgtgcctgctataggaaagcactgagccaaacagaatgtaaacgggaatgagacaagactccaactctcaaaagagaaactgtaaataccaatatggataggacagaattgggcagtgtactataaataaggatgacactataccctaaataaggatgatctagagaagtccccaggtgggagaaaaaaagacaaatcctccctctaggccatgaaaagcccacatctaaagacggtcccagtctaacgaagaatggggccaggaaggataagtagtgcgtccttttctatttttactgagttttgaagggccccttcagagtccttcagccatggcaattggtgggtggagacagggatcaactgtttggtaaataaagtgactaaatggatttgcaaactcatgctccatcctcttgcaggcctccaaaaagaaatgactcaggccgggcgcggtggctcacgcctgtaatcccagcacttcgggaggccgaggcgggccaatcacttgaggtcaggagttcgagaccagcctggccaacatggtaaaataaaaccccatctctactaaaaatacaaaaattagcccagcgtggtggcggacgcctgtaatcccagctgctggggaggctgaggcaggacaatcacttgaacccgggaggcagaggttgcagcgaaccgaggtcacgccactgcacttcagcctgggcgacggacgaagcgagactccgtctcaaaaaaaaaaggccgcgcgcggtgggtcacgcctgtaatcccagcactttgggaggccgaggcgggtggatcacgatgtcaggagatcgagaccatcctagctaacacggtgaaaccccgtctccactaaaaatacaaaaaaatctccgggcgtggtggcgggcgcctgcagtcccagctactccggaggctgaggcaggagaatggcgtgagcccgggagacggagcatgcagcgagccgagatcgagccactgcactccagcctgggcgacagagcgagactccgtctcaaaaaaaaaaaagaaagaaagaaaagaaatgactcagttatttgtttcactgttctcactgacagcttggctctggggtccttacattcggcctgtaactggaaaaatgtgtccatcaggcaccagaacccaatgcacaaagccaggaacgtcccaaacagctgcagccgaggttgggataaggaaacgaggctttcctgtcaaactaaacctggccgccccggaccccgaagaagcagccaagagttaagacgcaatctgcatgactgacgcacgctccgagtctccctcagcagttcgccaggttcttggcgccaacaccagacctaggatccgtcccctgctggaactattcagacgcgcaagatacgtaaccagcagtcctccgccccgttaaatagtcctgcctagcatgcctcggtgacgcacttttccacctcagaagtgcctcagcagaaaggcgatgaacctcgggggtgcatcatctttctgttagaatgggagcatgagttttctgatcattttcccttcacagattcctccgccagaaatcttactcgcggcgccttcatttccgggtccgccattttgttgcctctgtttctccacgagggggggttaaagg

SEQ ID NO: 2614 - DNA, 2300 bp, Homo sapien
agtatgtttgtttgtttgtttgtttgtgatggagttttgctcctgttgcccaagctggagtacaatggcgcgatcttgtctcactgcaacctctgcctgctgggttcaagccattctcctgcctcagcctcctgggtagctgggattacaggtgtgtgccaccacgcccggctaattttttgtatttttagtagaaatggggtttcaccatgttagccaggctggtgtcgaactcctgacctcaggtgatccacccacctcggcctcccaaagtgctgggattacaggccagagccaccacgcccggcctgtttgttttttaaagagacagggcctcactctgtggtccaggctggagtgcagtggtgcaatcacggctcactgcagcctcgacctcaagcgatcctcccacctcagtttcccgagtagctgggaccaccagtgggcactaccacgcccagctgattaaaaataatttttttttctctgtaccgacaggggtctccctatttcgcccaggctggtctagaactccagggctcaagggatcctcccacctcagcttcccaaaatgctgggattacaggcgtgagccactgcgcccggccaaaacctttcaataagtgtgtgttttaataattcatgaagtgcttgagctcttgacaacaaagtactctattatccaagataattagagtaattacttttgtttatttaagaatctggatggggcagttttctctttattgtcatcaaagcacgtgtgaaaatacatgcctaagaacatctctactggattgggtggaccaagtgattagatgaaaatatggtcttggatggccaaaattttgttacatcgttgatagtaagccatagactgtccttttccaaagacgttgggttgggggggaccccctagagagaaagcccttttgggaaaagggagaggaatgggatgacctctggctcaaggaagtatgtgaaaacaggagacagccaacggaaagaattgcaatggaagaatctatggttcttttagtattgctcaagtccccactgggcggccagctgtacaaacaactgtgaaagaagcagaggcgaggccgggagccgtggctcacgcctgcaatcccagcactttggaaggccaaggcggggggatcccctaaggtcaggagttcgagaccagcctggctaacatggtgaaaccccgtctctattaaaaatatacaaaaattagccatgcatggtggcgcacgcctgtaatcccagctactcgggaggctgaggcaggagaatcgcttgaacccgggaagcggaggttgcagtgagctgcaggttgcagtgagccgaaatcgcgccactgcactccagcctgggtgacagagcaagactcagttttgaaaaaaaaaaaaaaaagagcaaaaaagcagaggcggggcccgtactgctctcattcagattaccgagttcactagtaatctttcaggtcattatttgggtcagataatgagagtcgccgtttccctctctatcataaaccctacagttcctcacaccaatgtctgtctgaaagatgggaaccaatttggggcagggggccaaactcagcctcggcgacaggcctcggccccggctccgcgccgccccctagtggtcacctccgcggcctgggcttcccttggtccagctccccagccccaggtcttacacccacccccttcttcacctccttccagtcccctccccttcctcccgacagcatccccttcctccccgtccccctcccgccgctgcccccgcttcagtgacggggagccgcgaggtctgcacccagaagtccgaggctgggctgggaagcggtgtgacttctcacggcactttcctttccagccctgacgccccccggagtccacacatctcttctttcctcctcacctcctcgtccgggacgctgccggccacgcttccacggagcccgccagtttagtcccgtttccttctctagttaagactccctgtcaaggacggttactttttgcccttttcatgtgtgcatgttttgggggcctttaaccccccctcgtggagaaacagaggcaacaaaatggcggacccggaaatgaaggcgccgcgagtaagatttctggcggaggaatctgtgaagggaaaatgatcagaaaactcatgctcccattctaacagaaagatgatgcacccccgaggttcatcgcctttctgctgaggcacttctgaggtggaaaagtgcgtcaccgaggcatgctaggcaggactattta

SEQ ID NO: 2615 - DNA, 2300 bp, Homo sapien
aagctgtgtccctcgggaacattttcttcttttgcaccaagccaactcccaccaaagttttcctgtccttcatgataaaatgtatccagcatctttctgtgcagtcttcggagaatatttattgtcttctttgcacatttggaaatttatgttcaatgtagcttttcttttgagacttggtgttgtctttttaatagtttagtactattaaatatttaatatttagtactgtctttttaatagtttagactttttaatagtttagtatgtgcaaatcttattttaattcaaatatattatcattttcttaaagtctggaaccacaacccacagtggattgtgtagtagattgtgtctcaagtaagtgtttaatacttactggattgaactgagatttgagctgggtcctaaaactttaaatgaattacaccttaatccccactcactaatctattccataagcatgtatctgagtacctaaaccctgtgctaggagctgaggagatttcttttaacctctcagtgcctctgtattttgaggtgtctttctctgaaaatttctttccagcctttaaaacaaccccaactgtctgacagtttgttgaattgccttggacccaagatccctcggccgttaattctgtgtagatattgtccctgtttatcttcttctattttttttagatctgactttactgagttactgttcatcttactggttcacctggccttaaatctgtctctctgtctctctctttctctgtatgtgcgtgtgcacatgtgtgtgtatgtttaggtctcttgtgtactcgctgtggggcttagcctagttgttgatactcccctccctgatcacagtccagttaaggctggcctaaagtggcaaaccccttccccctcctttcctctagtccagagtccaagatgtgggtagaagtgttcagtcagataaaactatctgagaatgccagtgtctcccaggccacccactttcctggagaattttgagaatgtcttttgtcccagccccacatagagaagaatcctaccaggcaataccaaggtaccaagcaatcctgtctgtagtagtttattcttcctcctcactgacattcccaggggctttatgaagggtggggagggagaaggggcagttttgctgtttggagggatgtcacggtcctctgaggaaaggtgggacgtatgtctgtggggcaggaaggctgtgtgggttactttatcaagtcttagcgttgctactctttgtgcctttctctgagtcagttagtcttgatttccacatctgttttggcttcagcctctctcacctgccctcttccattacccaacagcctgactgctagctagttcttgccatagtggcccaaactcatgctgctttgtagaggtgggaggggaggagatcatggaaacaagggaaacctcctgctgacaccttcctttcctttcccaggcctccagcccccacgcgcatgctaggcctccttatccgggtcaggacgaaccagaggaggcctacggggagaaataaggagacagagggacaacgcatagagaggagcaacagagagttgggggcagagtcagggagatgcgggatgcgccctcgggagcaaggtcgcccaagccgtataggaggggaagggaggacggatcgcgcaggctctgacagcccagcccagccccgcgaggctcccaggtttcctgtctgtttctcctcccagctcctcttcctctcttgggaaatttctccccagagcctctcctgtgccagcctgtctctgcttctgtatgtatttcttcctctgcccggtgtcggcgactgtccgtgggtctctccatctcgcgtctgtctctggtctccagttcagcctcccggcctggccctctgggtggacggtgctcctggcgcccctccccgggcagcactattggcggagaggtgacgagaaggcggtgtctagccgccctccgagggcgggattagtcgcggcgacccaaaggcgggcaggaggtgggcccggctgggaggcgggcggggccactggggccgagcccagagccccgggcggtcgcattgttttcctccgcggatccgcggctggacttggacccagggctctcccgacagcgccctggaacccaaattcaagcaccatccaattcggacgctcatcgcatctcgcctgagcacaaccacggattgcgaactcagcgcagcgcgtggccgctggccgcccgcggcgatctcgatcccgctgacccgaatcctggagcaa

SEQ ID NO: 2616 - DNA, 2300 bp, Homo sapien
aggaaaacaggtaaagactaggtagcagaattctgaatccagaagttattattgtatttgcatcttcttatatttttattccctttattctttttcttttttcttttctttttttggagaccgagtctcactctatcaccaggctggagggcagaggcgcgatctcggctcactacaacctctgcctccctggttcaagcgaatctcctgcctcagcttcccgagtagctgggactacaggcatgtgccatcatgcccagctaatttttgtatttttagtagagatggggtttcaccatgttagccaggatggtcttgatctcctaacctcgtgatccgcccacctcggtgtcccaaagtgctgggattacaggtgtgagccaccatgcccagccgagacagggtttcaccacgttggccaggctggtctcaaacttctgacctcaggtgatccacccaccttggcttcccaaagtgctgggattacagtcatgagccaccgcgcccggcctggggcaacttttttaaagtttgccatgatctgatctttttccttcttcacttatctctcaaacaacttacattccagacataaatcaccacttcctgagaacgtcctgtattttgtttttttcctgcatgtgcttatgccgtccccatcatctgggacttcttccccatctctggctattaagtagttgaatctatctttccaagtctacctcttcagccctatcataattaagcttctttactctcaaaattatttaaatctccattaaagttaatggcattgtttgactagtattactgttctttatgtttaagcttatttccctcgccagattccccataagattcttgatagcaagtgtttttgtctcattcaacaactgtgacttccaggatgggtgcagtggctcacgcctgtaatcccaacactttgggagactaaggtaggaggattgcttgagcttagaagttcagcctgggcaacatagttagaccctcctctctacaaaaaaaaggaaggcttgtgagcctctggtcccagctacttgggaggctgaagtaggaagagctcttgagcccaggaggtcaaggctgcagtcagctgtgatgatgccactgcactgtggcctgggcgacagagtgagaccctatctcaaaaacaaaacaacaaacaaacaaacaaaacccaattgtggcttcccctcattttgtatccctttagcagctacaaagtagctactacagtagcctactcagtaggccctgcggggtgcgttggctcacacctgtaatcccagcactctggaaggccaaggtggatcacctgaggtcaggagttcaagacgatcctggccaacatggtgaaaccgtctctactaaaaatacaaaataagccaggcatggtggcacaggcctgtaatttcagctacttgggaggttgaggcaggagaatcacttgaacccgggaggcagaggttgcagtgagccgagatcaccccattgcactccagcctgggcaacaagagcaaaactctgtctcaaaaaaaaaaaaaaaaaaaaaaaaaaaggcaactcagtaggcttgttcctctacgctagtgattcagtgctgtgctggcacctgctggtcacctgtggtgcagcagccctggtcccagcaccttcctcccttcagtattaagggttgtgacagtctgtgctcttacctggcaatcactggaataatatattaaatacttgccccacagcaccacctttcaatcttcagaacttttcccactgacctcctaccccagaaatttgggctttacatccttcccagtactgtagaaatgtaaggacaggatcttcaggaactgggcagcaagaaaagaaagaagcaatttgagagtggaggatgcaaatccctttccccccttcaaagaattgagactatttccaacagaattccactctttttgacctttgtcttatttctaggttgctcttgggccataggccttcttggtgacagaagtgatgaaccggaggttaagcagagagtaggtaggcggggctcaaggggtggggccaagccaaagggctctcacactaagtgaagcttctccattctgtaagctttccgggaacatccaaggcaagactggcacccagcacagcaggtgagggaccggcagtgacagaatggtagactttaggggtaatggtggcagaggaatctctagctctttcagtcttagcttttcatattgtgaaactctcgcttgtacaattcttgggtcctttgt

SEQ ID NO: 2617 - DNA, 2300 bp, Homo sapien
tggagtgcagtggtgcgatctcagctcatcgcaacctccccctcctgggttcaagcgattctcccgcctcagcctcctgagtagctgggattacaggtgagcaccaccacgcccggctaatttttgtatttttagtagagacagggtttcaccatgttggccagactggtctcgtactcgtaaccttaggtgatccacttgcctctgcctcccaaagtgctgggattacaggggtgagccaccatgcctgacccctattcgttgttaatacctttacaaactcaccacattctgtcacttgtaatcattatttgtgtccctgttcatttctcattaggccataaattacatgaggacagcaaccatatagtttaagtttctatctcccagaaaagttatcacagtgctttaaatacagcaagcataaaaatgttggctaaattcaacatttgtttgagtgagatggaacaagaaaacaggggcagggatagggggagtaaccccatcaacttcaatgctgtacatttttacatctatccaatttcccccatgcatgacctgaaatacttggtgtagagtacctgttttgcacaaaggaggccaccttactggaaagaaggcagagcattgaggaggaaccaagagcaaggagaggtgggcactttaggaactgagaactaaaaatcagctctccattagttgctgtaaacgtttaatcactctcaacataaaattttctgtgtggttaatagagtcagacagacctgtttgaatcccaaatctgacgctcattatttgaccttagccaaactggttaaccaatccaagtctcagtttcttcatctgccaaaagggaacgataaatgtatacttgatacagatgtgagggtgaaatgagctaacgtatgtgaagccctcagcacagtgtctggcataataaaataggagctgttcctctccgttggaatagtagggcaggacttgtgcaacactgtgatgggaaaacaaagataaaggcagaacagagtgcaacacattaggaacatttcaggggaggttacctagaagggccactacattcttctcaggactaaatccctcctgactgttgtcttcaccccaatcctggaaaactcaccgtcaccccatatttgagtgctagtccagccagggtgtctccgggctccaactgatgctccaggcgtctttccctcactggggagcaggccgattgcaccaggcttccatatgaacgagcccggctcccttgaagcagtcctgacccccctggcgggggctgtctagacggggaagccatctcttcaccctgccaacagctaaggttgcaactaggggaggtacgaccgagactgcgactgacaggcctgaagtctgggaatgaatattcaggggattcctttccccctctctcttcccctgtgtccccgcctccccagcactacgccatctgccccctcccggtttctcctccctccaagctacttatccacaaatctgtcccttgagtattcagtccctccctaattctcccctaagcacccctccgactttggactcccccacaactcctcgctacattgacctctgacctttgaactctagaaataatcctcaacactctttcctcagtttgcccccaagtagcctggcctcagggcgctccaacatcccagctctccccggtcccggggtttgtttgctagagtcaggaacaaatcaggcccaccccaggtgaactgtcgccgcagacgaagagcgtgaggattgcaagaatttgtagtacaccttccactcagagatcctcaaaggtccgctccgcataagataggtcacaccctcaaatttcggctccacatctaggttgttgtccctccaaacgcctcagatccgccaagatgcaagggcctggatccagttgagcggcaaggtctttgagaaaagacttcatttcccaaaaggctccgcgtctgcggagtcgcagggcaccataggaaatgcagttccctccgagcaccagagagtggatttccggatcgcgcaatgcatgcgtggaagtgcgtccccggaagtacggaggccgacaggaagagaaggaaaaaagagaaggcgctgtcccgctcttgctacggtggcctggaggagtggcgaaaccggaacagagaatttatcacttctgggactcacagtcgtgatgtctttcaagagggaaggagacgattggagtcaactcaatgtgctcaaagtaagcgtgagcggagaggatctggagccgcttcagt

SEQ ID NO: 2618 - DNA, 2300 bp, Homo sapien
taatcttaagactttgtatagtttttaaaactgttattcttcaagtagaattacaaagtgccatttcccaaactttatttaaaaatcacaaaattctccttttctttttctttcttttcttttttttttgagatggagtctcactctgtcacccaggctggagtgaagtggtgtgaccgtggctcactgcaacctctgtctcccggattcaagcaattctcctgcctcagcctcttgagtagctgggattacaggcacacaccacacacccagctaattttttacatttttggtagagacaggatttcaccatgttggccaggctggtcttgaactcctgacctcaagtgatccacccacctcagcctccaaaagtgctgggattacaggcgtgagtcaccgcgcccagccaaaattctccttttcttgaaacactaagtaacatctccagaacactagtattcctcagaatacacactggaaaactcttttagagccatctgtctccttctgagccttcctacctctggctttcccgtcccatacctgtacttccggcggcagcaactgttatagtggggagctctgtgcagagcactctgggtgataagtcgtgtctgagttagcagaggagcctggtaaggagatgggagacagagtcagagccttcagccctccgcccttccagcctggtgtgtgcagcagggtcttgcctagaacacactctccactctctgattacctcagctttggtttcttcccttctcaattcattctgatgttttggattctgctttctttcctttcccggctgcttcttgccatagaaaagctgcaagcctgaggagaaagggaaacagaattaaaagcatagcaccaagagtggtgtgcagagatttcgagggtttattccccatcccgtcttccccctaacttactggacagatgtttcttgcctgcacggtgggcagtcagcatggccagggtgtccagtaccggtcgatgggggcagatggcacaagcaaagctgagcaggggtagagaagaggataagtggtccaggggaagagggttgggcccgtccctgccataggtcccaccctgtcctagcagtctttgcaaaacccaactccctggtgacccaatctccacttcttccagtcctcactggccgccaaagaatcctaggtactcctgctgtcctaattaataacaaaagtttgttgaagccaggcgtggtggcatgcgcttgtaaacccagctaatcgcgacgctgaggaggcaggatcacttgagccctagagttcgagggcagcctgggcagcaccgcgagacctccgtctcaaaggaaaaaaaaaaaaaagtctattgagcctctaaccgcagaaccctcaggcttgagccactccttgctcttaccgtccatcccgaagcatcagcgcctcatcctctggaatgtaactggctaggaggtccccgactcttcttttctgcagggagtaggggaagaaatccggacgggatcagcgggataggagagaggggtggaagtgaaattatagaaatgaggagtgaaatggaataaggaccctggggagaacagcgatcatagaccgaaaaaggagtcactacacagctctaagtcgcctggttctctcctgcacccccgagttgttgccagagcaatgaaacaaagctccttcccaaccttcagggagcgactgaagcggctccagatcctctccgctcacgcttactttgagcacattgagttgactccaatcgtctccttccctcttgaaagacatcacgactgtgagtcccagaagtgataaattctctgttccggtttcgccactcctccaggccaccgtagcaagagcgggacagcgccttctcttttttccttctcttcctgtcggcctccgtacttccggggacgcacttccacgcatgcattgcgcgatccggaaatccactctctggtgctcggagggaactgcatttcctatggtgccctgcgactccgcagacgcggagccttttgggaaatgaagtcttttctcaaagaccttgccgctcaactggatccaggcccttgcatcttggcggatctgaggcgtttggagggacaacaacctagatgtggagccgaaatttgagggtgtgacctatcttatgcggagcggacctttgaggatctctgagtggaaggtgtactacaaattcttgcaatcctcacgctcttcgtctgcggcgacagttcacctggggtgggcctgatttgttcctgactctag

SEQ ID NO: 2619 - DNA, 2300 bp, Homo sapien
aagaagcaggttcataagaagcggaagtgccccgggcccataatcacctatcattcagtgacagtgccacttgttggggagccaggccccaaggaagagaacgttgacatagaagggtgagtgaatctcaagaggaaaagagattgtgtgttcagctcatgttctcttggccccattttgcttgcttttctcacacagctctccttaacacttggagatttctttcagattcctaactcccttcagctcaatttctttttctttttttttttttgagacatgatgctgctctgtcacctaggctggaatgcagtggtgcagtctcggctcactgcaacctccacctcctgtgctcaggcgatcctcccaccttagcctcccaagtagctgggagtacagccacacatgctaatttttgtattttttgtagagacggtttcgctgtgttgcccagactcctgggttaaagtaatcgtcccgcttcatcttcctaaaatactgggattacaggtgtgagccaccgcgcccagcccagcttatttctttcttattcctttttcttttagcttctctgttcttctctttcctgtttttccttctagcctagctttcttttcccatcagtcacttagtacgttcctcagaatgttcccaacaccctgcctcctttttctctttcctcatctctctgatttccttctttctttcttttcttttttttttttttttgagatggagtctcgctgctctgtcacccaggctggagtgtaatggcacgatcttggttccatgcaacctccgcctcctggcttcaagtgattctcctgcctcaacctcctgagtagctgtgattacaggcatccgccaccacgcccggctaatttttgtatttttagtagagacagggtttcaccttgttagtcaggctggtctcgaactcctgacctcgtcatctgcctgcctcagcctcccaaagtgctggaattacaggtgtgagccactgcacccagcctgatttccttctttctgtatctgttgtcttctctcctcagctctttgtgtttttccttgtcttttgtcctcagacttgatcctgctccctcggtgtctgcattgactcctcatgctgggactggacccgtcaacccccctgctcgctgctcacgtaccttcatcacttttagtgatgatgcaactttcgaggaatggttcccccaagggcggcccccaaaagtccctgttcgtgaggtctgtccagtgacccatcgtccagccctataccgggaccctgttacagacataccctatgccactgctcgagccttcaagatcattcgtgaggcttacaagaagtacattactgcccatggactgccgcccactgcctcagccctgggccccggcccgccacctcctgagcccctccctggctctgggccccgagccttgcgccagaaaattgtcattaaatgaagagatgtctagtcctcagaaacttctttcctgccctgattggggctcttgctgttccgtttcttctccctgcttctcccctttgtcatctctgatctttgcctaatctgtttctttttccttttcccctagttcttacaggtttcgttgtgttttttaatctaataaaatagaaagatcccttttgtctggtgtccagtctagggttgggagcaagaagtatttgaatacctgcatatatttgggtctttattcgatagcatttattatgagctgtcctttctaaattgtattcattcctccaactaaattataaacatctgaaaattgcacaccaaaacacatccttgtattgaccttcctatcactttacactcactgttttgaatacagcaggcaccaaataaggaggaactggctgattctagtcgaactcatatgtctcagactggggcttgtatgaagggaagtggaagagatgccatggctgttaatgaccactagaggctctcagggctgggcagggtatgggggctgtgtatatgtgatctcccactaccccccacctggccagagctaaaataataaaatgctgagctcactgttcccccaccctctcccccggcaccgggctcctcctgctgctgggacagtgctctagtagaacagacagacctactgacacaggggaggtgagaagggaggtgaccaccaggactggtaggtggggaagacagggggcttatggatgagagcccggtgggagatgggaggagaagagtggctcctatggggaatgatgtggagtgtgtccctgtctctgtcac

SEQ ID NO: 2620 - DNA, 2300 bp, Homo sapien
atgatcacttgaacccaggaggtcgagactgcagtgagcagtgattgcatcactgtattccagcctgggtgacaaagtgagatcctatctcaaacaaacaaacaaacgaacaaacaaatgtaattgggggccagtgtggtggctcacagctgtaatcctagcacttttggaagccaaggtgggaggacagcttgagcccaggaggtcaaggaggcagtgagccatgatcctgctgctgcactccagcctgggcaatagagaccctgtctcaaaaaaaattgtaattttgtgtcttttttttttttcttttgagatggagtcttgctctgttgccaggctggagtgcagtggcacaatctcagctcactgcaacctctgcctcccgggttcaagcgattctcctgcctcagcctccctagtagctgggactacaggtgcgcgccaccacacccagctaatttttgtatttgtagtagatacggggtttcaccatgttggccaggatggtcacaatctcttgacctcgggatctgcccgcttcagcctcccaaagtgctgggattacaggtgtgagccactgtgccaggcccaattttgtcttttttttttttctgagacggagtcttgctctgtttcccaggctggagagcaaatggcgcgatctcggctcactgcaacctccgcctcccgagttcaagcaattctctgcctcagcctctcgagtatctgggataacaggcgcccaccaccacgaccagctaatttttgtatttttagtagagatggggtttcgccatcttggccaggctggtcgtgaactcctgacctcatgatccacccccttcggcctcccaaagtgctgggattacaggtgtgagccacaattttgtgtcttttaacaaatctttccctgtcccttccttccccctgctcttcccagcctccagtatcctctgttctttcacttctatgaaatcaactttttaaaagcgtcacatatgagtgagaacatgcagtgttttaactttctgttcgtggcttaagtcagttaacatgtcctccagttccatccatgttgctgcaaatgacaggattttcttctttttaatggctgaaaagtattccattgtgtatatacaccctatttcctttattcatctgttgttggacacagagattgatttcctattttggctactctaagtagtgctgcaataaatatgggggtgcataaatatggagtgcagacgtctcttggatatactgatttcctttttttttttcctcctaaattggcttcctcaggttgaattatgtcctttcctttggataaatgtctatggctgtgtttttaaccacaatactatgcttccttcctcaaggatttttgactttatcttgtagatgatgtggagccattaaaaatgtttgaggacaggagtggcaaaacgtgggtttttagaaagtttcctactagcagcagtgtagaaaatggactggagcggagagaatgacctcttctaaaagaaaatgtgagctgggggcgcaggcttatgcctgtaatcccagcactttgggaggccgaagcgggcggatcacctgaggtcaggagttcgagaccagcctggccaacacggtgaaagctgtctctactaaaaatacaaaaattagttgggcatggtggcgggcgcctgtaatcccagctactcgggggactgaggcaggagaatcgcttcagcccgggggacggaggttgcagtgagccgagatcgtgccactgcactccagtctggcgacagagcgaggcgagactccgtccctacggaaaaaaaaaaccatatatatatataaaataaaaataaataaaataaaatgtgttgacttagggttatgggggtcttcgtaccaccaagtggactcattgagcaagggagatcgctgggtactagagcaagcggcctagagcatccgcgcaggagtaggagaggctgaagagtaaagagggtttagagggtgggactgggagtctctcgacactctgttacttctgcctgtaaacgcccgacttccgccgctggtggccacccgcaggtagtgatgtcgagcgtcgagctcccaaaaccgagctggtgaggggctgcaggtggcggcgcagtctcggtaggcggtatgagtttggctgggggccgggcaccccggaagaccgctgggaaccggctttctgggcttttggaggcagaggaggaagatgagttctaccagacgacttatgggggtttcacagaggcaagatccgggcc

SEQ ID NO: 2621 - DNA, 2300 bp, Homo sapien
ccaaaggaagacgaataatccagcaggtggcagcagggaaacaattatcttagatcttcataagggaggagtagaaggctgcagtaaatgcatggggatttttttttttttttttttttgagttggagtttcgctcttgttgcccaggctggagtgcaaaggcgccatctcggctcaccgaaacgtctgcctcccaggttcaatcaattctcctgcctcagcctccggcgtagcgagtagctgggattacaggaatgctccactacgcctgggtaattttgtatttttagtagagacggcgtttctccatgttggtcaggctggtcttgaactcccgacctcaggtgatccgcccgcctcggcctcccaaagtgctgggcttacaggcgtgagccactgcgcccggcctttttttttttttttttgagactgagtttcgctctcgttgcccaggctggagtgcaatggcgcgatcttggctcactgcaacctctgcctcctgggttcaagcgattctcctgcctcagcctcccgagtagcagggattacaggcacccgccaccacgcccagctaattttttgtatttttagtagagacgcggtttcactatgttggccaggcttgtctcgtactcctgagctcagatgatccacctacctcggcctcccaaagtgctggaatttcaggcgtgagccacggcgcccggcctgcatggggatattctatggatgttcgggtcctaggttactttatgaggacccacaagacatctggaaagaggataaccaggtcattctgggggttacaaaacctgttttttttgtttgtttgttttgttttgttttgagacagtttcgctctgtcgtccaggctagagtgcagtggcgcgatctccgctcactgcaagctccgcctcccaggttcatgccattctcctgccccaggctcccgagtagcctgggactacaggcgcccgccaccacgcccggctaattttttgtatttttagtagagacggggtttcaccgtgttagccaggatggtctcgatctcctggcctcgtgatccacccgcctcggcctcccagagtgctgggattacaggcgtgagccaccgcgcccggccacaaaacctgttttaatggagttatttcatgggccatgagtttgagaggatctatctgaccgactcttaccccgaatgttttaccattcctctttatttattcattccacagataattatggagcccctactatgtacgaagtcactggaggagctggagatacaagagtgaaccaaacacagtccttgctccccagaagttttacagtctgctcagagagactggtcttcccaccagggttcatagcctacggggtactttgttaaaaacgagcagttactacgaagactacaatgggagaaatttttctgtgtatctccatgccctttggagcacagataattgacagttggaggctaaaggggttgggtcgcgggaaggttgtgataagtccctgatagcctcccgtgcccttttttgacaggtcttcactgattcatgcatcaaatatttactgaactccgtcactgtgcagtgcctaactttgtgcttgaggcaaacaaaacacagatctatttcgaatgccattccgaggaaggtaagacatgcacgcacgtttaatcaaatagtaaacaagagtagtaaaacaggaaaaagactaagaagagttcttggtggtattaaatgttttgtgatattcgacaccttaacgtctctgacttgacaccagtactcccgcagagagttctttcctgggttaggaatttcagaggacttggcggaccgactcttgtcccgagttcagatcactcgacccagtcctagcaaagaactgaacctaagaggacctgccgagccaccgtagggactgtcggccaacccgcgcgcgcacatcttccacccgtggactcgtcagggcgtgaggacccacctcacgtgaccattagcagcctcccgattggttttgctccttttttctccccaatgagtgggctgatgccccgagaaggtcgggcgcatgcgcagtgctcggattttttgcttggctacccggagtgaagcggccgggttgggcgattaacaggccgtggttaggaaggacggagaaggggcgttcgctcctttgggacttttcatgcctcgtttttttttcagatgtggcttggtctgggcgcaaggtcccagcagccagcttaagcttactcttctgtgaaaggggaaagtatcccctgt

SEQ ID NO: 2622 - DNA, 2300 bp, Homo sapien
gcctctcagtgctgggattacaggcgtgagccaccgtgcccagctggccttctttttttcattatgggaatttccaaaccaaaagtagagtagtatggtgaaccactatgtacacataacccagcctcaataattatcaacataaataagaccagcgtggccgggtgcagtggctcaagcctgtaatcccagttttcggaggctgagatgggaggccaggagttagaggttgcagtgagctatgtatgattgcaccactgctgcactccagcccagtgagaccttgtctcttttgttttactttgagaccctgtctcaaaaaacaaaactatttgtttcttccagaggattaagttaaatcccaaacttcatatactttttttatctatgaatacaacatataacccttaataaagcctacttttataagggtgataactttaacactattatcatgcctaaaaaaattgcttaatatcaaatatccagctgatgtgatggctcacgcctgtaatcccaacactttgagactttttttttttcagagatggggtctggctatgttgcctacgctggtctcgaactcatgcgctcaagccatcctcccacatcaaaaaattaaaaacaaattagctgggcttggtggcatgcacctatagccccagctactcaggaggctgaggcaggaggatggcttgaacccgggaggtggagattgcagtgagccgagatcaggccactgcactccaatctgggcaacagagcgacaccctgtctcaaacaataaaactttgtagagacggagtctggctgtgttgtccaggctggtctcagactcctagcctgagttgatcctcctgcctgggcctcccaaaacgctgggattataaaacctaagccattgcatcaggccttgaatgtaatttttgattaaccaaaacggtttagtggtttgttctttggcagattagttaatataattgagttgtcaaatcttttccgggctctgtactgggcttagggaattgtaaagattaagacacgttgccggccaggtgtggtggctcacgcctgtaatcccagcactttgggaagctgaggtgggtggatcatctgaggtcaggaaatcgagaccagcctggccaacatggtgaaacctcgtctctactaaaaatacaaaattagccgggcatggtggaatgcccctgtagtcccagctacctgggaggctgaggcaggagaatccctggaacccaggaggtggaggttgcagtgagccgagatcgagccactgcactctagcctgggtgaaagagcgagactcctccgtctcaaaaaaaaaaaaaaaaaaaaaaaaaaaaaaaaaaaaaaaggcacgttgcccacccttagttaaacgagggaggagataaatatacaaataaattcaattgaagggtataagggcttgttgaattaaaattctacagggaactgagggctgtagaaagtcattagcgatcccgacacttttttttttctttttttgagacggagtctcactctgtcccccaggctggagtgcagtggcgcgatctcggctcactgcaatctctgcctcccgggttcaagtaattctcctgcctcagcctcccgagtagcggggattacaggcgtgcgccaccatgcccggctaattttttgtatttttagtagagacagggtttcaccatgctggccaggctggtctcgaactcctgacctcgtgatccgcccgccttggcctcccaaagtgctgggctaacaggcgtgagccaccgcgctcggccgatcccgacacttttttaaaatgccgaagccggaatcgacacagcactttcaaaggttcctccatagctcccctgagatccggccagcgggaaaccccaactgagaactgcaatggcagggaaagtggaggctagatcctgttttttgtgttaccgcgattcccttcaactaccctcaagacgcctacaaatttgtttggcggcacctacaactcccagaacgcaacgtgggggacggaggcggaagcagctggccaagccgaggtctgtgattggtgaagagcgacgggccaattggaggagttgttgttaggccgtcccggagacccggtcgggagggaggaaggtggcaagatggtgttggaaagcactatggtgtggtgaggagctacttcggggcaggaggggcagagctgggttccgggcgcgtgtagcgccaaggcagggagggcctggggtgggggccaggggctcatgggcgagaggcggccc

SEQ ID NO: 2623 - DNA, 2300 bp, Homo sapien
cgtgagttattaataatatgtttattaataaaataaataaagtttttctgtgtgtgtgtgttttttttttttttttttttgagacagagtctcgctctgtctcccaggttggagtgcagtggtgcgatcccggctcactgtagttttgacttcctggactcaagcgatccttccatcccagcctccccagtagctgggatcacaggtgcctgccaacacccctggctaatttttttttccaaatattctgtagaggcagagtcctgctgtgttgcacaggctagtctcgaactccagggctcaagtgagctacccacctagacttctcaaagtgctgggattacaggcgtgagccccccaaaatattatgtgtatatgagtagtaattgttattccgcatagggagaccagaagaggaggtggaaatggaatgccggttggttacatcgggttagggacctttaattagttgctcagagaaggaacagcacctgagcaaatgcacaggatgcaaggctccgggagaaagggcacactaatcccaactgccaattactttacaaagcgtgtttacattctaaactcatttaattctcacaaaaataatattgtcaggtgggtattataatccccgttttactcatgagaaaacaggatctgggaggttgagcgacttgcccattgcgaccatagggcaagtggtggctccaggattcccatccagaagttctgattcatacttcaaaggagctcggaaactctccgggtgcgccggggagtcctggttccggtgtcctgggactcctgggcagggtaacgaaaccacttttaaaaactttgccgggcccggtgggtcacatctgtaatcccagcactttgggaggccaaggcggatggatgatttgaggtcaggagttcgagaccagcctggccaatgcggtgaaaccccgtctctactaaaaatacaaaaatggccggccgcggtggctcatgcctgtaatcccagcactttgggaggccgaggcgggcggatcacgaggtcaggagatcaagactatcctggctaacacggtgaaaccccgtctctactaaaaacacaaaaaattagccgggcattgtggagagcgcctgcagtcccagctactcgggaggctgaggcaggagaatggcgtgaacccgggaggcggagcttgcagtgagccgagatcgcgccactgcactccagcctgggcgacacagcgagactccgtctcaaaaaaaaaaaaaaaagaaaaaaacaaaaattagccgggcgggtagtgtcgcacacctgtaatcccagctggtcggaaggctgaggcaggagaattgcttgagcctgggagacggaggttgccgtgagccgagatcccgccactgcactccagtctggacgacagaatgaggccccgtttcaaaaaataaaaaataaaaaacttcgccaaggtagggagtagtggctcacgtctgtaggattgcttgagaccagcctgggcaacatggcaaaaccctgtctcttcaaaaaataaaaaagttagcagggcgatttggcgctcacttgtagtcccagctactcaggaggctgaggcgggaggatcactggagcctgggaggttgaggctgcagtcagccgtgatcgcgccactgtgctcccgcctgggcagcagagtgaggctctgcctcaaaaaaattaattaaaaaataaaaacacgccgttaacgagcggctgcgtgcgcgaggtggcacactgggcttgcatacgaattctgccagtgagtgctattagagcatcaaggagattcattttccgagcgactcctccctttcccccgcctccagggggcgtggcaacaaagcgcgggaaaactcgaccttgaccccacccccactccatgctgggggcggggaaaaggggagcccttaaatgggaaatggagctggcggttccccccccagcccatacttaggacgcctatcagttgctcctttaatgcctctttggaaatggcccggccacgccagcactcctacgtcacctcccccgcttccggtccgcgagcccttcccaacctttaggtcccgattccttccatgctccaaatcccgtgccccgtccacgccctcccgcagagggaggagcgacgggttacgctgtcgcccaggagctgaaccgcgcgaggaccccatccatcagattatatggcgatttagacggtgggaagaccgcaaggaaatggtcagcggatgacgtaatgtttggggtggcgtcccattctgtaact

SEQ ID NO: 2624 - DNA, 2300 bp, Homo sapien
actctccgggtgcgccggggagtcctggttccggtgtcctgggactcctgggcagggtaacgaaaccacttttaaaaactttgccgggcccggtgggtcacatctgtaatcccagcactttgggaggccaaggcggatggatgatttgaggtcaggagttcgagaccagcctggccaatgcggtgaaaccccgtctctactaaaaatacaaaaatggccggccgcggtggctcatgcctgtaatcccagcactttgggaggccgaggcgggcggatcacgaggtcaggagatcaagactatcctggctaacacggtgaaaccccgtctctactaaaaacacaaaaaattagccgggcattgtggagagcgcctgcagtcccagctactcgggaggctgaggcaggagaatggcgtgaacccgggaggcggagcttgcagtgagccgagatcgcgccactgcactccagcctgggcgacacagcgagactccgtctcaaaaaaaaaaaaaaaagaaaaaaacaaaaattagccgggcgggtagtgtcgcacacctgtaatcccagctggtcggaaggctgaggcaggagaattgcttgagcctgggagacggaggttgccgtgagccgagatcccgccactgcactccagtctggacgacagaatgaggccccgtttcaaaaaataaaaaataaaaaacttcgccaaggtagggagtagtggctcacgtctgtaggattgcttgagaccagcctgggcaacatggcaaaaccctgtctcttcaaaaaataaaaaagttagcagggcgatttggcgctcacttgtagtcccagctactcaggaggctgaggcgggaggatcactggagcctgggaggttgaggctgcagtcagccgtgatcgcgccactgtgctcccgcctgggcagcagagtgaggctctgcctcaaaaaaattaattaaaaaataaaaacacgccgttaacgagcggctgcgtgcgcgaggtggcacactgggcttgcatacgaattctgccagtgagtgctattagagcatcaaggagattcattttccgagcgactcctccctttcccccgcctccagggggcgtggcaacaaagcgcgggaaaactcgaccttgaccccacccccactccatgctgggggcggggaaaaggggagcccttaaatgggaaatggagctggcggttccccccccagcccatacttaggacgcctatcagttgctcctttaatgcctctttggaaatggcccggccacgccagcactcctacgtcacctcccccgcttccggtccgcgagcccttcccaacctttaggtcccgattccttccatgctccaaatcccgtgccccgtccacgccctcccgcagagggaggagcgacgggttacgctgtcgcccaggagctgaaccgcgcgaggaccccatccatcagattatatggcgatttagacggtgggaagaccgcaaggaaatggtcagcggatgacgtaatgtttggggtggcgtcccattctgtaacttctgtacggcatcagtgacacgggtttagcttgaaacagcgcaaaaggacctacacttctgtgctccactccgactcaatgcggttctgctctcagtgcccaccacacagaagctgggttccttacattcgcgaaagtgaactgcagcttcaagcttcgagcggccagtagggagcgaggggcggagacgcacctgggtgctcccccttccagtaggcaagctgggaagcaggctggcttctttctaagcgacagtggcggaggccaatcgtttacgagactcgtagatggggcagacggaccccggcgcagccaatggggagaggtatcttcagagggcctcggccccttgcccaatgagcataagaggactgtgcggggctagttccgagcggcagtatttagggccaacccagtgcggggctggaaggggcacagggctgagcgacgggggcaagggccaatggcgagtgcgaaaacgggcagcccagacctggagcgcggagggaggagagggagtggggaggccgaaccggagagaagcaggaagtagcggcggccgcggggagggcggcggtggctgcagcggctggagcggggtagagaccgccgggtctcggcccgcaccaggagcggaacaagtaagcgtgcctggggtaaatacccgcccttggctccgcccccttggggggggcgggtaaatacccccgcccctcccccacttggtcaactacccccttctccgcgccgccccctg

SEQ ID NO: 2625 - DNA, 2300 bp, Homo sapien
gccagctcagagtttgtgggagacccaggtctgtcccctaccagtgtctccccatgagtgtttctgtatctacgaagaagcaactaaagagtctatccctatccattccctgcccaggttgcaggccatttcccagccagctctcccacctctctccagtcttcagactgtaactagagacagtcccagcaagtggcagctgggattgctgggaccaaggttggggtgggggcaaaaccaaagggggagtcctcccctcacccccaccctattcaattctgcagaatctgggtttaaacaaaaacccttgtctctataggcctggctcctaagcctggttccctcctgaccagaggcctgagctaccttccactcaggtactcagaaaagtggactgctacaacgaagaccagcggggactaggagaaaacacctgcgaactcacccgcccccacaccccgccagccacctccctcttgggtgccccagtgacttagaggtcatccgatggccacccacccagagcagacagtcgaccaagcaagccgccaagctcaagccaaggaggatcaggccttcctgcgactgctgagccctgtctctagggctcctatctcccccgccccctttccctctgtggttccccaaaagccaaagaggctgaacaggaagaggctgaacaggcccaggtcgagtgggggctccactgacctttgcccgggcccaaggcctgcagcgcagaggagggcgaggggctggcggcgattaggttgaggccaagctgggtagcagacggaattaagtccctgccatctgccgagggctggcgcggggagcaagtcctgggtttcgaggagggggcggggtgtacacatgagaaactacaagggaaactgaggcgcgcggcccttctctcactcgcaccggcgtgcgaagcgaaggccgggcctcagccaggccaggccctttgggagctgctgcgcagcacctggggacccaggactacacaggatagggtggggagctggaaagaggggaggagagaggggacggtctctgcgcgactctcagctctctagctggggtccgtcccaactcggacctcgtcccctcccctccgggcgcagcggagcctcctcccgccgcgcactcccggaggctcgctagagactggagactgatcggggggtgcgcagggggccgggggcgcaagcctgagtcttgcccgggcccggacgctgacccgcacccagtcggggtgcaggttctgctccggcctggcccaggtcccccgcccccatccccgggaacggacaccattttaggtcgcgacatcccgcagccttcaatctccgggccgcacttcgggtgcctctcgagccgggggcgccaggacctggggttctcgaccctcctgggggtttacccggctacggactgtgcttacaacaggccaggagtttcgcccatccgccccaatggatggaggcggtgtctgggccttcctagaagccgccccagggggcggcgcggagaagggggtagttgaccaagtgggggaggggcgggggtatttacccgccccccccaagggggcggagccaagggcgggtatttaccccaggcacgcttacttgttccgctcctggtgcgggccgagacccggcggtctctaccccgctccagccgctgcagccaccgccgccctccccgcggccgccgctacttcctgcttctctccggttcggcctccccactccctctcctccctccgcgctccaggtctgggctgcccgttttcgcactcgccattggcccttgcccccgtcgctcagccctgtgccccttccagccccgcactgggttggccctaaatactgccgctcggaactagccccgcacagtcctcttatgctcattgggcaaggggccgaggccctctgaagatacctctccccattggctgcgccggggtccgtctgccccatctacgagtctcgtaaacgattggcctccgccactgtcgcttagaaagaagccagcctgcttcccagcttgcctactggaagggggagcacccaggtgcgtctccgcccctcgctccctactggccgctcgaagcttgaagctgcagttcactttcgcgaatgtaaggaacccagcttctgtgtggtgggcactgagagcagaaccgcattgagtcggagtggagcacagaagtgtaggtccttttgcgctgtttcaagctaaacccgtgtcactgatgccgtacagaagttacagaatgggacgccacccca

SEQ ID NO: 2626 - DNA, 2300 bp, Homo sapien
cactgagctctattacccttccctgttccctgtattttttttttttttctgagacagtcttgctctgtcgcccaggtgggagtgcagtggcacgatctcagctcactgcaaactccacctcccaggttcaagcaattcttctgcctcagcctcccgagtagctgggactacaggtgtgtgctgccatgcccagctaatttttgtatttttagtagagacggggtttcactatcttggccaggatggtcttgatctcctgacctcgtgatccgcccgcctctgcctccccaagtgctgggattacaggcgtgagccaccatgcccagccccctatatttcttttttttgagacagggtctcgctctgtccaggctggagtgcagtggcgtgatcttggctcattgaaacctcaacctcatgggttcaggcgattctcctgcctcagcctcctttgtagctgcgattacaggcatgtgccaccacacctgtctagttttttgtatttttagtagagacaaggtttcaccatgttggccaagctggtctcaaactcctgacctcaagtgatccatctgcctcagcctcccaaaacgctgggattacaagcatgagccaccgcacctggccccttccctgtatttctaagaactctcttttcccctgctttctctggattttggagcccaccaaggtatggacactaatcctcttctgattttaaggtttggcaaacctagcagctctgtaggattcatgccgtggcggaggtgtacctaagttggagtgtatgtgggttctgagagaggataaatatggagatgctgagggaagagctccaggatctctcttctagacatctcagtttctcctcctcgttcctgttttcatcaggtctgggatctgccgatatgggggatatgaagacccctgattttgatgacctccttgctgcctttgacatccctgacattgatgcgaatgaagccatccattctgggccagaagaaaatgaggggcctggaggcccagggaagccagaaccaggtgtaggaagtgaatctgaagacacagcagcagcctctgctggggatggccctggagttccagcccaggcctctgaccatggcctgccaccgccagacatttctgtagtcagtgtcattgtcaagaacactgtgtgtcccgagcagtctgaggccctggctggaggctcagcaggagacggggcccaggctgctggggtaactaaagaagggcctgtggggcctcatcgaatgcagaatggttttgggagccctgaaccttccctcccaggaactccccactctcctgctcctcccagtgggggcacctggaaagaaaaaggcatggaaggcaaaactcccttggacctgtttgctcattttggccctgagccaggggaccactcagatccgctgcctccctctgcaccctctcccactcgggagggggctctgaccccgcctcctttcccctcttcctttgagctggcccaggagaatggcccaggcatgcagccacctgtttcttccccaccattgggggccttgaagcaggagagctgcagcccccatcatccccaggtcctagcccaacaaggctcaggctccagccctaaggccacggacatccctgccagtgcctcgcctcccccagttgctggggtgcccttcttcaagcagtctccagggcaccagagccctcttgcctcccccaaagtgcccgtctgtcagcccttgaaggaagaagatgatgatgaggggccagtggacaagtcttccccaggaagtccccagagtccctctagtggggccgaggctgcagatgaggacagcaatgactcccctgcctccagctcctctaggcctcttaaggtgcggatcaagaccattaaaacatcctgcgggaatatcacaaggactgtaactcaggtcccctcagatcctgatccacctgcccccttggctgagggggccttcttggctgaggctagcctcttgaagctgtcccctgcaacacctacttctgagggtccaaaggtggtgagcgtacagttgggtgatggtacaaggctgaaaggcactgtgctgcctgtggccaccatccagaacgccagtactgccatgctgatggcagccagtgtggctcgcaaggctgtggtgctgcctggggggactgccaccagccctaagatgattgctaagaacgtgctaggcctggtgccccaagccctgcctaaggctgacgggcgggcagggctggggactgggggacagaag

SEQ ID NO: 2627 - DNA, 2300 bp, Homo sapien
atatcacggacccagtccagcctggtggaggccttcaacaagatcctcaacagcaagaacctgctccctgcctataggccaaacctgagcccaccagctgaggctgggctggccctgcctcccaccggctaccgctgcctggagtgtggggatgccttctcattggagaagagcctggcacggcactatgaccgtcggagcatgcgcatcgaggtcacctgcaaccactgcgcccgccgcctggtcttcttcaacaagtgcagcctgctcctgcatgcacgtgaacacaaggacaaggggctcgtcatgcagtgctcacatttggtcatgaggcctgtagcccttgaccagatggtggggcagccggacatcacaccgctgctgcctgtagctgtcccacctgtctctggacctctggccttgcctgccttgggcaagggtgagggggccatcacctcctctgccattactacagttgctgctgaggcccctgtcctgccgctctccacagagccgcctgctgccccggccacctctgcttacacatgctttcgctgcctggagtgcaaggaacagtgccgggacaaggctggcatggcagctcacttccagcagctcggcccccctgcccctggggccaccagcaatgtgagtcacctttcacagcccttctgtggggacaggatctaggaaggcgttgggggcttggttagaagtaatggagacaggacactcctcaccgactttccttgtttaacccactcgacaggtgtgcccaacctgccccatgatgctccccaatcgctgcagcttcagcgcccaccagcgcatgcataagaatcgacccccccatgtctgtcctgagtgtgggggcaacttcctgcaagccaattttcagacccatctccgggaggcctgtctgcacgtctctcgccgtgtaggatacaggtgcctcggacccttcctccatagaactgtagggtttcgtgtgtcctagcctcagcctcagatggcctttcaagatcccctatcttccctgctatatccctcagccctgttgttttgccagactcaaccctgagatagtacgtcctgccttcccgtcgtcccccatggagatggggggaagcagggccacctctggagctccagctctcccttggcagcctcccttggggcacagcctctgcacctctctcctttctccaccctgctcatgctccactactgatttccttcttgtagtctacccagtcccagagaataaatgtatggtcccggggtgggcatggagatgcctcccacctcaccacagggcctcctgcttcctccctaggtgccccagctgttcagtggtgtttgggggtgtgaactccatcaagtcccacatccagacgtcgcactgcgaggttttccacaagtgccccatctgccccatggccttcaagtctgggccaagtgcccatgcccacctctactcccagcatcccagcttccaaactcagcaggccaagtgaggcccgggggagggccgggctgggccagggagggctggtggggcgcaggaggggaggggctgcacccaaccctgcctgatgtctgcactgtcctcacttcaggctgatctacaagtgcgccatgtgcgacacagtcttcactcacaaacccctcctctcctcacacttcgaccagcacttgctgccccagcgtgtcagtgtctttaagtgcccgtcttgtcctctgctctttgcccaaaaaaggaccatgctggaacatctcaaggtacaggagcagagggatggggaatgggtgcttagctgtactgacctggggctggggccacatacttcagaagtggggggctttggcatagccaggccctcccccacaacagcaacctcccttgtctcctctcacagaacacccatcagtctgggcgcttggaggagactgctgggaaaggggccgggggtgccctgctgacccccaagactgagcctgaggagctggctgtttctcagggaggggcagcccctgctactgaggagtcgtcttcatcttcagaagaggaggaagtacccagctcccctgagcccccccgtccagccaaacggcctcggcgggaactagggagcaaaggcctcaagggtgggggtggggggcctggaggctggacctgtggcctgtgtcactcctggttccctgagcgtgatgaatacgtggcccacatgaagaaggagcatggcaaggtgagtgggccccaaggggagtaccatgggctgggggcagcattgggactg

SEQ ID NO: 2628 - DNA, 2300 bp, Homo sapien
gcctttgtcgtttcactcacctctcccaacctggccctgtccagcccctccctggagggctgggcatatggatgctggaggtcacaggctgcccaggcaggttggtgacctcggaggcagaaccacggcctcgagtcgggcctctaacggcgaaaagactgacgcggttggaccgcgccattcccgaaatgttaaggagcttaaactccgcatcgtcctccaagataagtaggaaaagggcagtcagaaagaacgtcttccccgtccgccgtcttcctgcgcgcccttctaggaacccagcgtccatcccacggcctgatttactaagggagtcttgtagcatacgggagggggaaaagtcattgattgcaattacggtaatttggttagttactcaaacggtcgtttacatataacttgcatgttaatatacttctggaagtatgcatatgtccatacttctttaacagggcacccacggccgcctgctcaccctacttatgcagcaaattttacttctctctcggcttctttagcctcgcaaacgctatcgcttaggtccgcttcttaaatattggcccctcctcccacccgtaagctcctcccttcgccctctctccctcgagagcttccaaacatcttttccccgcccccttttctatttctgaacaggcatgttccaggcagctcacccgactccttagattactatggaatcggtagggtcctgaccgctggggaagcaggaaagcgtatcctgggaagaaaggcttggcttggactccggagaagaatactacatcgagacctgctggggaattttattttattttattatttttttggtcttggttgtactgagggaggaagaagaggttgtgtggcccggtcgaacttgtggcagcctgaaggccccctcaggcggcgccgcgggcagccccgcagccggggcctggtgcagcctccgcggccgctgtcagggaagcgcaggcggccaatggaacccgggagcggtcgctgctgctgaggcggcagtgtcggcagtccaaccgcgactgcccgcaccccctccgcgggggtcccccagaggtaagctactcctccttcatgagtcacctttgccctgttgggtgggggggggggtccctctcccaccctgtcccgcacagtcttccccacctgagttcgactacgaaactgccctcttggtgtcagctgcaccccgggttccttctccaccctttcctctcaggcctggggtcctcctccgctttttggcttcctcttctattagctcctccctctgcctcggggattcccccctccctcactcatccctgttgcctacgtctcgaataattcttttttttaagtcatgaaccctttccatatcagacgactcccataatgcccatccttgtccttcctcgtcgtctctgcccctgccccaaaccttttccatggactccacctttatctcttttcctagtttgcacttttcctcctatgtccctgtgcaactccagcactgggttcccatttccctgagctaaagattgcatccctgtcttcctgtgctgcttctgattccattacctcactgtcacccacctacccagccagctcctggcttccaagaattgcctgttcccttctccttaagggatctcgggcccttgtcatcaatccaaaagtaccatttacattcttactttgaacctagtcctcactcttctctgggatgcattatgatccctataactttctttagcttctctttctccctcctcaatcccccaactttctagaggtttctgtctgtaggggagagatttgacagtgcccttcccattcaggatttccaactttgacacctccctcgagtttcagggatttctctgatccttgtgacatttgttctgtttttcccgtgggcttcatgtgttctctgttacactctttatctccacataccacttatttcaggatcaactaaaccttgaactaagaagaaaaatgtgttgtgagcagggggagcctcagctgcctcaggccgttcaggacagaagggtgtttctgaaggccggagcaagttttgaagaagtccctatcagattacacttggttgactactccggagcagccactaagagggatgaacaggcctgcgtggaaattgaatgagattgtgagaaaacttgtttcagattatttaattttaggcttttgttaaaggaatcacagaatagagtgccttctcacccctgtccagatccatgaggaatcagtttattcttgtg

SEQ ID NO: 2629 - DNA, 2300 bp, Homo sapien
atccacccacctcggactcccaaagtgctgggattacaggcgtgagccaccacgccaagccgatttttttttttgagacagggtctcactccgttgtccaggctggagtgcagtggcatgatcttggctcactgcagcctctgtctcccaggctcaagtgatcctcctacctcagcctcctaagtagctgggactacaggtgcatgccaccatgccagctaggctaatttttgtatttttgaagagacgtggtttcaccatgttgcccaggctggtctcaaacccctgagctcaagcaatctgcccacctcagcctcccaaagtgctgggattacaggtgtgagccactgtgcccagctgacaaatttaaactatctttggcactcttgtccccattctttgttcatctttcatactgtactcctgctttaacctagcttgtctgcttgccctctcctcatgatatgagcaaattcccatttatattcttcaacatacaatttttttgctttcagaatgctcgcttgtcttttattttgctgggttatatccaatatctattctaagacctgactcacaatatttctaagaagccttccattcattcattcaccatatactggtgtgtgtgtgtgtgtgtgtgtgtgtgtgtgtgtgtgtatgtgtgtgtgtccatacacatataggccttccaaattaacttaaactccactatgtcccttcagcaattaggttaggtaccccatttgttctactgttgtatatactgcatgttttacacaggcattttcaagctattacactttattctgccttccaattaaacattgtagcagtgactctttcatcatctatcctgtatgattgtcccaataattaataataaagtactatagtagcaacttgtactctcttgatcctaacaaaaccctgtaatgggctaatattacttcatccatatgtcttctttgtagacatagaaactgaggtttaaagaggttacattagttattccaaatcaaacggcttgtaagtggcagggaagatggcattcaagacccgggctcaaataactagcctcaatgtattaagtaaggcactaatgaggggcattgcatattaagtaaagccctaggaaaggcattgagatagaggttctgaggacaaagagggctctaaatcaacaatcttaaccgaaaaatacacaaaaaacttgctgggcgaggtcgggcctataatcccagcactttggtacctgaggccggcagattgcttgaggctaacagttcgagacaagcttgggcaacatagcaagaccctgtctttacaaaacaaacaaacaaacgaaaaatacacaaaagcaacaccagaggcccatttgcatggcgtgtttttgtttatttgtttggcctaatatggtttcgttttgtttggaagaagggattgtgccctccaagcctttgtcgtttcactcacctctcccaacctggccctgtccagcccctccctggagggctgggcatatggatgctggaggtcacaggctgcccaggcaggttggtgacctcggaggcagaaccacggcctcgagtcgggcctctaacggcgaaaagactgacgcggttggaccgcgccattcccgaaatgttaaggagcttaaactccgcatcgtcctccaagataagtaggaaaagggcagtcagaaagaacgtcttccccgtccgccgtcttcctgcgcgcccttctaggaacccagcgtccatcccacggcctgatttactaagggagtcttgtagcatacgggagggggaaaagtcattgattgcaattacggtaatttggttagttactcaaacggtcgtttacatataacttgcatgttaatatacttctggaagtatgcatatgtccatacttctttaacagggcacccacggccgcctgctcaccctacttatgcagcaaattttacttctctctcggcttctttagcctcgcaaacgctatcgcttaggtccgcttcttaaatattggcccctcctcccacccgtaagctcctcccttcgccctctctccctcgagagcttccaaacatcttttccccgcccccttttctatttctgaacaggcatgttccaggcagctcacccgactccttagattactatggaatcggtagggtcctgaccgctggggaagcaggaaagcgtatcctgggaagaaaggcttggcttggactccggagaagaatactacatcgagacctgctggggaattttattttattttattattttttt

SEQ ID NO: 2630 - DNA, 2300 bp, Homo sapien
atatatccttattgccccaactccacaatctcctgggttcccccagcactcatagaagctgataatagggaaaggtaggctgtaaagggcaatggtgatgagctcaggcagcactactgtcttctttacaaaagcacattaatgatgagcctggagaacatattagatgtcaggatggcaaatacagttttggttgtaacatgaccgctgcgcaaaacaaaatacatccatgtaagaggctttcaacctggagtccatgacctctctgaaattagatgcaaaacttggtctctgtgtgcatttttcatggtagagggtccattgcttttgtctgattcataaccttaaaatgtcttaagtaagagggttaagaacccatgacctattcagtacaatgttccctgagtgtaaaaagttcctgtggcatccagcacccccgtgggagtccatcaaaattccagggttcaccgactgcagaactatggggatgcaaatgcatttgcaactctttggaagtaaagtacacacgggaaaccaagaaatactaagagggaaaaagcattttagtttaatgggtacaactgctgaggttttgaggcctccatcaagaaggaaaagagagcccagattgcaggtctgttgcgagtaagtgtgtctgcaggttgtattaggcatgtggtgatggtgatggggggttataggagcttacagtgaacttccatcactcctacccatcattgtctagttattttatcatccattgattcttctcttccggcagctctgaggaccgtagactaaactgaaacacaaaaggggagggcaaaagaaaagacagttccaaagggagccgagcgcccgttctttcatcctgcggtccctttaagagaagaacctcttgggacctgcagtcccaaccgaccccagttttaaccgaaacccaacccggacttccccctcttgactcaaataagaccaactttggattttccctcccctattgaccaatcagattctgttaccaggcagacttcagcggccgccggtacgagcccggcgccttctgtctccgggtggcagcagtgaccaatgacagagcaggccgcccgtgtatctaggcagatcgcggctgttacaaccattcagaaaaaggaaaataaagcaacgcacgagccggctgggccaggaccttggggctgggctggagtgaaggtggctacgaggtagtttctctttctcccttacctttattgttgcttgtgttggaaggcgactgttcagaggtagggaggggcaagatgagttgggaggagagcagaaaaagattgtagctgtattttcaacagcttcttcacccatgtgcacgtgcccggaatctgggaccccattcccctgccgggtttctgacgcccagcgcatgagttccgctaccccgccccacccccgctccactttgcagaaaccggggattgaatggagggggaagggaaggaggtgggggcgcgcctcaggatgggctgttgtgggagatgacgtaggggccggcgacgtggggagggggagcagcgggggaagtcgtggcgagattaagtaatgagaacttgggcccagttttttttccaagcctagaagggcagaatatgttcgtatcctttctgacctcccaggcatatgcaatggtgaggagtatttttgagaattagagaactttgttttgtggctgttattgttgtttttgagggggaggagggcagtatggggtcagaggcagaaatgaaaatttcttgctaacatggattcccaatccccctatctcttcctttacagttttccagatttaggagacttcagaaaggtggggcagatagaatggagatggcaaagatctctttgggcatatatgggcctggcgaagtaatggaataatttctaattttcggagaaggcaagtggtgagaaaaagaccaccggggaaattcggaggctttgtttctgtttctctgcctttctgggtaaagagatgaggagtgccctggggccttctggggaagggaaggccagtgtgagttacatctttatgcctgtccctctcaattctagccctcatgccgggatggcagaagatgagcctgatgctaagagccccaagactgggggaagggcccccccaggtggtgctgaggctggggaacctaccacccttcttcagaggctccgaggtaccatttcgtaagtactcatcacatctccaagtcctgtccaagacctgagtatagatccctgcagcacttcactttggc

SEQ ID NO: 2631 - DNA, 2300 bp, Homo sapien
ctttgcctcccaaagtattgagattataggcatgagccatcatgtccagcccgttatacccatatttatttatgagtatctgcaaatatgtatacatgcagtctaaggcagtgctcaaaacaatcagctttgaggcagactgcctgcctttggatcctgattctagcactttctacatatatgactaaggacaagtcccttcacctctccacattggtttcctcatctgtaaaatggagacagtaacagtacctacttcagagagttgctgtgagcattacacgaggtgtttagcatttggtatggtgtctgatacctaataaacaccaaataaatttttgtttgtttttgtttgagacggagtttcgctcttgttgccaggctgtagtgtaatggcacaatcctccgcctccccagttcaagtgattctcctgcctcagcctcccgagtagctgggattacaggcatgcgccaccacgcccggctaatcttgtatttttagtagagacggggtttcttcatgttggtcaagctggtctcgaactcccaaccttaggtgatccgcccacctcagcctcccaaagttttgggattacaggcgtgagccaccgcgcctggcctaataaacaccaaataaattttagctgttattagaaaacctggccaggtgcagtggctcacacctgtaatcccagcactttgggaggccaaggcaggtggatcacctgaagtcaggagtttgagaccagcctgaccaacatggtgaaactccgtctctactaaaaacacaaaaattatctgggcgtggtgatgcacgtctgtaaacccagttactcgggagggtgaggcaggagaatcgcttgaacccaggaggcggaggttgcagtgagccaagatcgtgccattgcactccagcctgggcaacagagcgagactccgtctcaaagaaaaaaaaaaaagaaagaaagaaagaaaaaagaaaacctcttgccaatatatccttattgccccaactccacaatctcctgggttcccccagcactcatagaagctgataatagggaaaggtaggctgtaaagggcaatggtgatgagctcaggcagcactactgtcttctttacaaaagcacattaatgatgagcctggagaacatattagatgtcaggatggcaaatacagttttggttgtaacatgaccgctgcgcaaaacaaaatacatccatgtaagaggctttcaacctggagtccatgacctctctgaaattagatgcaaaacttggtctctgtgtgcatttttcatggtagagggtccattgcttttgtctgattcataaccttaaaatgtcttaagtaagagggttaagaacccatgacctattcagtacaatgttccctgagtgtaaaaagttcctgtggcatccagcacccccgtgggagtccatcaaaattccagggttcaccgactgcagaactatggggatgcaaatgcatttgcaactctttggaagtaaagtacacacgggaaaccaagaaatactaagagggaaaaagcattttagtttaatgggtacaactgctgaggttttgaggcctccatcaagaaggaaaagagagcccagattgcaggtctgttgcgagtaagtgtgtctgcaggttgtattaggcatgtggtgatggtgatggggggttataggagcttacagtgaacttccatcactcctacccatcattgtctagttattttatcatccattgattcttctcttccggcagctctgaggaccgtagactaaactgaaacacaaaaggggagggcaaaagaaaagacagttccaaagggagccgagcgcccgttctttcatcctgcggtccctttaagagaagaacctcttgggacctgcagtcccaaccgaccccagttttaaccgaaacccaacccggacttccccctcttgactcaaataagaccaactttggattttccctcccctattgaccaatcagattctgttaccaggcagacttcagcggccgccggtacgagcccggcgccttctgtctccgggtggcagcagtgaccaatgacagagcaggccgcccgtgtatctaggcagatcgcggctgttacaaccattcagaaaaaggaaaataaagcaacgcacgagccggctgggccaggaccttggggctgggctggagtgaaggtggctacgaggtagtttctctttctcccttacctttattgttgcttgtgttggaaggcgactgttcagaggtagggaggggcaagatgagttgg

SEQ ID NO: 2632 - DNA, 2300 bp, Homo sapien
caaggcagatcacttgagcccaagagtctgagaccagtctgggcaacatagtgagaccccccatctctacaaaaaaaatttaaaaattatccaggtcagccaggcacggtgtctcaggcctgtaatcccagcactttgggaggcggaggtgggtggatcacttgaggtcaggagttcgagaccagcctgtccaacatggtgaaaccccgtctctactaaaaatacaaaaatgagccaggtatggttgtgggcacctgtagtcccagctactcgggaggctgaggcaggagaatcgcccctctacctttactgcctccctctgtagcccagattaggataacttccccaaccacctgctggctgtagagcaagagttcagggagaaaaccacaggcagaggtgaggggtgccatggagttgctgcagagaccagccaggtcagagctcaggagcatgaaagaggtagtcaatgacagaccacaacaaacaaaataacagcctttttttttttaagttaatgactcaataattttttatgagaaggtggggataaagtttctttctctttcagatcttgggtggtggactaacccaagccaagaagccggagaatagagaggaggcaggagatggagacctcaggaggaggaagaggggagggccagagggaagggtgaaggcagggtgagtggaggtagtcaggacaggaggaagctggcaaagacaaggaagcagccttcagggccttccccgtggggcagctgcacacacaagactctctttgatgcctggcaggctgatggcacaatggtgaggataatagatgcaggatggagccaagaggggttgagtggcgctggggataagagaagacccttgccccgggcagccacagggagtcttccttgatgggcacatgatccctcactgatgggagccaggaagacagatacccaatgcaccaaggcccaattttgctccccttcccccactctggtttggaaaccctgtattctacttgcaatctcaagcccagactttattctttttcctagccaataaaaacttcaccccagagcttttatccaaagagtatgaatatctggaataagagggcaatcttagggaagaagtgaccctggctgatgggcccacagtcccgggtgcccctaaatgctaagagacaggtccaaatacaaagacgagcatttggagacacaggaacacatacgtgcgcaggcttacacaagcacatgcacagccacatagccacacactacacatacacaagcacttatgcacatgtccacacaggcgtagatactctagcaagcacatactcacagaggcgcgcacacacacacacacacacacacaggcgtagatactctggtaggcacatacagaggcgcgcacacacacacacgcacaaatacacacaagcacactcacaggcacattcacacacgtggaaattcacacacaggcacagatacacactcatgcaggcacgtgcacgagcaacacgcaggtatacaggaacacacacatgcccagacacacaaatccacacacacccaggcacccactaaagagcacgagctggtcaggggcagcggctcacacctgtgatcccagcactttgggaggccgacacgggtggatcacctgaggtcaggagtttgagaccagcctggccaacatggtgaaatcccttctctactaaaaatacaaaattgctgggcatggtggtgggtgcctgtaatcccagctactcgggaggatgaggcaggagaatcacttgaacccaggaggcagaggttgcagtgagccgagatcgcaccactgcactccagcctgggcaagagtgagaccctgtctctaaataaataaataaataaataaagcacaggctcccacacatacacacttaaacacatacacgcacaccccataattcaaacaccagttgccctaggccacttgagagtatcctggccagctgccctgagtagtttactctgggctacagcccgggccctcctccttctctgccccacccccagctggttgtataaattccctcccttcgctccttccccggaacagcggcctctgacaccagcacagcaaacccgccgggatcaaagtgtaccagtcggcagcatgggtaaggagaggggtttccaatcacccattgcctgctctgtctgcccctaatttggaaggccctcctccagaaaatgctagaaaacctgagtggggagctggggagggagtagtggactctgcttcattgt

SEQ ID NO: 2633 - DNA, 2300 bp, Homo sapien
gtgatgaaaccccatctctactaaaaatacaacaacaacaacaaaaaaaaaattagctgggcatggttgtgcacccctgtaatcccagctactgaggaggctgaggctggagaatcgcttgaaccagggaggcggaggctgctttgagttgagatcgtgccactgcactccagcctgtgcaacagagcaagactccctctcaaaataagaaaaaaagaaaaaaaacaaaaacaaaaattagccgggtgtggcatctgtagtccccagctactcgagaggttgcagctggaggatcgctggagccggggaggcaagggtcgcagtgagccgagatcatgccactgcactccagcctgggtgacagagccagaccttgtctcaaaaaacaaacaaacaaaagacacctaaggacagtgttgaggatggtatcctcaccagtctctgtgggaggatggaatcctaacttccataaatgccagctagcagacatcattgacctaagcacatttacattgactaattctgtaaatgttcacttccctgactctactgaccctctgtctcactgtcccctaacctcattttccctataaaatacccattacttgcatacaaattgcagttgagttcagttcatgctgaactgtttttccttattgtagtagttattactgattgaaatctgtcctttccactttagtgtccggctttgtttatctttgacaaaattcaccagtttgattcaagacagtttccagcccctgctatggagttacactgagaaggaaacccctggaatttagtttcacccctacacttccaatggaatttttctgtttctttagaggtgggcaagggcccttgacaataaggaaactttcagacttgtctaaggtcccacagagagtgcttgatccacctgagctatcacaccccacagggtatacacaagtgtattctttttttttttttttttttttttttttttgtgacagggtctcgctctgttgcccaggctggagtgcagtggcgccaccttggctcactgcaacctccctcgggttcaggcgattctcccacctcaccctcccaagtagctggaattacaggcctggctaattttttgttttgttttgttttgtagaggtgaggtctcaccatgttgccaaggctggtcttgaattcctgggttcaagtgatcctcccgtcttggcctcccaaagttctgggattacaggcatgagccaccgcacccggccctgattcctttttttattctagcttcaagattcagttctaccgttatcggctgtgtgactgggtaaatcactacaccgcaagcctcggtttcctatttaccaaatgggtcgaataatgcctgccacatggggctgctctgaggagtacagatgtaagagatcctgtgttcactgatattttcatgtgggctttttgataatgatacaaaaggaacatgagaactgtgacttctaggccgggcgaggcggcttactcctgtaatcccagcactttgggagtccgaggcaggcggatcacctgagatccggagttcgagaccagcctggccaacatggtgaaaccccatctctagcaaaaatacaaaaaattagccaggcgtggtggcaggcgcctgtaatcccagctactcgggaggctaaggcacgagaatcgcttgaatctgggaggcggaggttgcagtgagccgagatcgcgccactgcattccagcctgggggccagagcgagactccgtctcaaaaaaataaaaaataaaataaaaaattgtgacgtctcactcaggatcagcgtctttaagtggccacctccccaccccaccttcatgcctccctcctccttgaatcgtgtgttagaacgctgtgatctggtccaaactccacggagatgcgatgcgatgcgaagcgatgttgggcaatttcaactccctgtctcggtcgccacctaggattactgcatgttcagctacgacctcatcaacatggctgctggaagtcgtctacaggaaaaagaaagaaatgacactgaaggatcacttccgcttccgttggcgcaagcgctttcattttttctgctaccgtgactaagatggaagcgtttttggggtcgcggtccggactttgggcggggggtccggccccaggacagttttaccgcattccgtccactcccgattccttcatggatccggcgtctgcactttacagaggtccaatcacgcggacccagtaagttctcggcgctttcgtttgcgtagcgggaggg

SEQ ID NO: 2634 - DNA, 2300 bp, Homo sapien
tgcctagtacatgtgctcaataattttttttttttttttgagacaggatcttgctctgtccctcccaggctagagtgcaagtagtgtcatcatagctcactgcagtctcaaactcctggcctcaagtgatcctcccaagtcttccaagtatctaggaataccacaaccagctaatgaaaaaaattttttggggccaggcacggtggctcacgcctgtaatcccagcgctttgggaggcggaggcgggcagatcacgaggtcaggagttcgagaccagcctgcttggtgaaaccccgtctctactaaaaacagaaaaaattagccaggcatcgtggcgcacgcctgtagtcccagctactcaggaggctgaggcaggagaattgcacccagcaggcggaggttgcagtgagccgagatcgcgccacttcactccagcctgggggagagagcgagactctgtttaaaaaaaaaaaatttttttttgtagagatgggatgttgctaagttgcccaggctgccctcagactgctgtgatcctcctcccttggccttccaaagtgttgggattacaggtgttagccaccatgcccagcccccaataaatattcattgaatgaatgaatggatgcatgatccattttcaataaagcatgctaacagttactggtcaacggtatatggcatagtctgcgctagatctcattggctgggagaataaattgacagggcatggggaaatatgttggaatttttcaaaggttaataacgtaatatacataatgtaaatataacatatataatgaattatactaattacacgacagtataaaataggatttgagtttcatgtagtcttttggtgattgatcccataatcctaatatgggcttctccagatcaggtctggaaagtcttcagaagtattttcagaaggatttagtgattcttctcattcaaataatgaagtccttcctaagcatcctacactagtggaaatcactcacatggttttggtatgaaatggaatgaaactgggtggtggcagtgtgtgtatgtgtatgcacatgtgcacactcacacgggcaggtgcatacaatttggaatgcctacttccactgcctattttcagtctggtggtttgaatggagtgtgtatataaagagcacaaataaacatagttctggatttcccctttctgcaccaagtaccttgatttcacatttggtttgaagcaaatatttgtgtattgcttaaatagcaaacattttcaaatattcaaggaaaatattacatttttataatctcagaaggcaataaaggacaaaatttcttagctacctgaaaagaggtagtttttgtctggggaagaataaacaggtggatggtcgtttgagtggactaaccaatttctttgagccaacccatctcagccttgattggagcaaaaagcataaggatgtggagtgtgtgtggtttcttggaactggggatctctgctgaatctactcacaatgggagcaaagcagtttccatcacaataatcgctttaacaatcgtgtgccacttctttccaggatccagaagggcttgaggatcaaaatggcttttaaaagttcttcacttaaacaaggccgcagccacaaggttacttggccgagtgtctcttgagaaagagtgagtgccattttgttctttgttccaatgacagttgttggtgccactgggcctcaccacctggcctgtgtcatgaagtctccctcttgactgggtctaagccttgagtggaaagtgggggagcctcccaacacttccttggaaactcttggcaagtaaattggggaatattttctttggaagtctcatttttctcaccaaaatttagatatagcttctgaagctaattattcttttttcattacaaaaaatgttttcctttatttatttatttgcaggcccagccaaacttgactagaaaagaagcccgggcaggggtttggatgagcccatgacgtgcagcgcgctccgaccaattgggaggccgtgaaaaaggggagggcggaagtgacgagccgtatccctccgcggggcgagagggtcggtggggggagtcggcgtctctctcccccgcgccagctcccgtacacggagccgcattccttggcccccccacccccctccctcggggcccccccgcccccctcgggaaaaaaatccaccccgaatcactcgaacccgagggaggcttcctttcacccttggggagacgagctttcaacggttacctcttcttcgtctccccc

SEQ ID NO: 2635 - DNA, 2300 bp, Homo sapien
aaaaaaaaaatctccttacaaacacttggtgggggcgagcgtggtggctcactcctgtagtcccagtactttgagaggtcgaggcaggcggttcgcttgagttcaggagttcaagaccagcctggacaacatggaaaccccatctctactaaaaatgccaaaattagcccggtgtggtggtgggcgcctgaagttccagccactcaggaggctgaggtgggaggatcgcttgagctttggaggctgaggctgcagtaagcagagattgcaccactgcactccagcccgggtgacagagtgagactccgtctcaatgaaaaaaacaaaactaaagcaaaaacaaaaacaaaaaaacccaaaacaggctgggtgtggtggctcacgcctgtaatcctagccctttgggaggccaaggtgggcagatcacttaaggacaggagttcaagaccagcctggtgaaaccctgtctttattaaaaaatacaaaatattagccggaaatcaattgaatctgggaggcggaggttgcagtgagccgagattgcgccactggactttagcctgggcgatagagcaagactccgtcttaaaaaaaaaaaacaacaaaaaaaacccaaaccaaaaaccatcccatgggagtgtctctgaacctattctggttcaggaggctgcacaataaaagaaaaataagaaaaaattttttaaaaaaaagtcttttaaaagccacccagtgttcaggaggtgcgctcctggaaggacatttcctcttctgtccccacccccactacatgttttttgctgttcctccccagggaacaggccggtttgatggccctaatccttatatacagcttgctctggaatgcagagactttgcatcccagctgaggagctggtaagtggactttactctgtaggacccacacctagcttttgaaggcttggggaggggcggaaaccagctcccgagaatacaccggaatctgtgctgcatcgaagattcctcttctactccaatagatacagggtaaatatttgttgtaactaaatgagaacaaaatccggagcccagcaacgtaaacgaagtcaatctcttttttacatatctcaacggttaacagctaggatgccagctttaatgttgttttaactgcagctggtatgagcggtcctgcagtttgcagagcccctagtttttactcttttctaggaactgggatcagcatccctactttttgagaggctaactctgaggtaaatttacaactgagtccctttcagtttagaacgaaggtcattcctattttggtaaatttgcgtccccggtttccattcattcagtcaacaaatatttattaagcatgtagtatgtaccagtccctgttgtaggcgtttggggtgaagcaaggcacagaacaagagatccttgctctggtgaagcttatcgtaggacgggaggcaaaatgatgaaaatgatttttaaaattatgttattaactagaaggtgataaatattacatagaaaaagatgtcaggctgcaaaatgattgcggaggccacaagataaaagagaatccaagatcagggttctggttcgggtcagggaaaagggagacgagctgaggtgcaggaggctctgacgtcgggggacaacggagatattttctgcagaaagtgacgaaagagcattctggttcctgcagaggtaggtgaaggacagaaagggccctggccggcgattcccttggagtaaacgggaggcaggaggctgttttctagcagagcccagaagatgctctggccgacggctcccgggatcttggccggcggtcactcgcgaccatccgcgacgcccccaaaatggcctccgcgcccctcgccgccccgccccgacgctccgcagcccgtgggtccacgtgacctggcccgcccttcgcggctggagaccccgggtcccggtccccgcaccggaggccccgccccctacgggaagcggaccaaccggagcggggaaaggcggggcgggcactgacggcccgcgggggtggagctccgcagcggagtaacaggttggtgggagggagagaaaggagggagctccgaggacgagggggagggccggagctgcgcgtgctgctttgcccgagcccgagcccgagcccgagcccgagcccgagcccgagcccgaacgcaagcctgggagcgcggagcccggctagggtgagtggacccggtgcgggccagggcacccgagaggaaagcgagccttcaggggtacctttgaggggcaggcatcgaggc

SEQ ID NO: 2636 - DNA, 2300 bp, Homo sapien
gatgcaacccaggcatgtgacaagagcagggtctgagagaggagggcactgctggagaacaaggctgccttgggatcttggacttttggacttttcatggttgcaactgggaactccccctctcctcctaaaggacacagtgagatctgctgaaaaccttgggcaggaaaactataggggcagagggagggagtacaggccagaagtaccttgaggttgtgtgacaaaagtcccaagggggactgggtgcggtagctcatgcatgtaatcccagcactttgggaggctgaggcgggtggactgcttgagctcaggaagttagagaccagcctgggtaacatggagaaaccccatctctgccaaaaatacaaaaacttagctgggtgtagtgatgcgtacttgtagtcctagctacttgggaggctaaggcaggagaatcgcttgaaccaaggaagcggaggttgcagtgagccgagatcatgccattgcacttcaccctgggcaacacagcgagactctgtccccctaaaaataaaaagtcccaaggggaaataactggggaggtttcctgtagatgatagaggggtggactgtgacttgaggagagaatctctgctagcattgtaccaggtaccacaagagtgtcagggggtgcacctggcatggtgccctctgggtctaagcctttccttgtacacactcacactttgatttgaagtgacctcttccctctgagccttctggtgtccaactctccccttctctaggaccatgcagtgctggaggccgagaggcagaagatgtcagcccttgtgcgagggctgcagagggagctggaggagacttcagaggagacagggcattggcagagtatgttccagaagaacaaggaggatcttagagccaccaagcaggagtaaggacattggccctctcagaaatacccatgattcatatgccacttcctttcttttttttaatttttaattttaattttaattttaatttattttttgggacagagtttcgctcttgtttcccaggctggagtgtcatggcacgatcttggctcactgcaacctctgcctcctgagttgaacagattctcctgcctcagcctcccaagtagctgggattacaggcgcatgccactacgcccagctaatttttgtatttttagtagagatgaggttttaccatgttggccaggccagtctcgaactcctgacctcaggtgatctgtccaccttgcctcccaaagcactgggattacgggtgtgagccgctgcgcctggccccctttctcctttttttttttttttgagatggagtcacactctgttgcccaggctagagtgcagtggtgcagtcttggctcactgcagcctccgcctcctgggttcaagcgattctcctgcctcagcctcccgagtagctgggattataggcgcctgccactaggcctgggttttttgtatttttagtagagacggggtttcaccatattggccaggctggtcttgaactcctgacttcgtgatcctcccacctcggccccccaaaacgctgggattacaggcgtgagccactgcacccagtccctttcttcttttttttgagacagggtcttgctctgttgcccaggctggagtgcagtggcacagtctgggctcactgcaacctccacctcctgggctcaagccatcctcccacctcagcctcccgaataggtgggactataggcatgcaccaccacacttggctaatttttgtattttttgtagagacggggtttcattatgttgcccaggctggtcttgaactcctgggctcaagtgatccatctgccttggcctcccaaattgctgggattacaggcatgagccaccatgcctggcccacttcctttctatctatggtatgctcttactctcccatttctcaaactgctcttttccacgttcaccttccttcctcttgagagttggtgcccagcgtgttggcctccagagaggtggcttttattgtcatgctaacctcccccaggcatgtggccttactctgttccctttcccctttatttcaccttgcctggctcagactcctgcagctgcgaatggagaaggaggagatggaagaggagcttggagagaagatagaggtcttgcagagggaattagagcaggcccgagctagtgctggagatactcgccaggttgaggtgctcaagaaggtatttgggaattggggggcagaatggtaggtaggggtgatgaacacctgccttacctctccatgag

SEQ ID NO: 2637 - DNA, 2300 bp, Homo sapien
tggatatggttataaggtggttgcacctgggagccctgacaactggctgcacaaattccaaaagtaaaggtgtcagtccctgtggccttccttggggcttctctgaccacatgtgcccaacttcaataagagaaccaagggaccctcattttctgaggtgcttggctctgattcagggctttgcaaggggttagaagctgactgtaaaaatgggaagaggcaacggaagacatttatttctcctttggattttggggagaaccaagccctggtagggaagaggtaagggggatgattcacctccatatttcctaagcaggttgtatagggagccggtggcaggaggaaggctgttttcacaaatgacttgtaatgtcgtgattaaaaaaattcctatattcttctgcaaatcaaacgttctttcccaatccaatccagccttggttttattttaaattaaatattaaaattacacatttatattgaaatccttggtttgtcttctcattctttttcttggcatatttggaggtccagattttatgaagtcatattaactgtacagcttaggagccgaagctggagttttcttcacctgacttttcagaggccctttagaacagagcagatgggacctacgaaacctggagatgtttatagcagccccattctcttctctcctgaacaaccttctgggaagaacaaggacagtaaatgccttttttttttttttttttttgagacggagtctcactctgtcacccaggctggagtgtaatggcatgatctcagctcactgcaacctctgcctcccgggttcaagcgattctcctgcctcagcctcctgagtagctgggattacaggcgcgtgcctccacacccagctaatttttgtatttttagtagagatggcgtttcactgtgttggtcaggctggtctcaaactcctgaccttgtgatccgcccacctcggcctcccaaagtggtgggattacaggcataagccactgcgcctggccagcagtaaatgcctttttgagggttagagtagaacagaccagaactgggttttattcccttgggtcatagtgataaccccagcattcacttcccaggtagaaaaatcctcattcattcctaactgacataggacccagtccctaactgggaggtagggacatttctgctgttcctgccctagtgttgccttgaagagggagctggcccttcactagagcctattgccaggtataggagtactatcccttcaggagtgggtcagacctcctcctaaagtattctgtctgctgtctctgtggaccacagccaagtgaagaagccatctgccaagagcagctgggcggggacgaagctccagggtcctgcttggccaaccctctcttctaggccctcaagatcccagcctaggcttggggagaaaatgcaactggaaaagtcaaggctcatcctttctcacgaacacaaattccttttaaggcaatgtgtcccgcctctcccaactatataagggcagcgtcagtaaaagagcttctgcaaaacaagccccacccagagcctaagctgactgggcctcctgggcctcttgccaaggaagtgcacctgccagactggcttaggccagtctgagtgagctggaccttggtgcctgcctttctgcggtggaggaaaggtttactcagctccacaaagcctacaggtggcttacgtatagggagaggagcatgtatggaaggaagcttttgcaggttccaactcctcatccactaggagcaggcagggtgattccctctgaccaacactgatcttggaaagatggaaagcgacaagattaatgaagaatgtgcaaccacatactccagataaagctgttcagttaaagcagccccatgtcgctcccaagccccacctttgtgtaaatctatgcgagcaccgatggggcatgtcccagacccattggctccgcccacctcacctcctcgcctatcgttagttctctgcgaaaccgcgaactgggggcgcggcctatcttcagccccgcccctgatgggcctatacaagggggcggttccgcgcgcgcccgcccagttggagccagacagcggggtggacaagtggcgtgtgtgctgcgaccccgagggaagatgaacgggacgcggaactggtgtaccctggtggacgtgcacccagaggaccaggcggcggtaagaaaaagcgctctcgctgtcttctccgttttgtattcccggtttctaagtccgccccttccgtgccccgcgccg

SEQ ID NO: 2638 - DNA, 2300 bp, Homo sapien
gtcattcccactgttgggctaggttggcacacctttttataattaagaggttcccttgcgggcagggttggctggagctacagagtcaaatgtggaaggggagtctattttttttaaccttttgctccgacagtggggtgcaagaatcagaccatggccttattaacactgtgcttgagctcacatcaacctaggtgcagtgtttatttatgtacagaaatgtacataaataaacataaataaatgtacataaataaaatttttttaaaaggccttacttttaagttcctgcctatggggatggcctatttcaggttaatatgggtcatatgaaggcttgtctcagtctctcctagtgaattggactccttggtctacttttctgaacctatgggtaggaaaggcaagatgatcaattaccatgaaaataacttgccattaagcatgggtttcctgttctactggctgcttgctgtcaagaaggatttgcagtgagagtgagtttgctctggacatggctggtgtgtagcatggacacgtcccatcacacatcacctgtgccgtactttctcctccccagttctgaccttgggaggggctggacgaactggctgctgatgttctgttttcccagggctggctgctaggctttccagaagttacctggattcttttttaataaatgatgagcagtcagtgtgaggcacctgggaagcactgaaatggatggtgaagtatctgggtgctagcactggctgtcattcactagctgtgtaaccttgactaggtcagttgacctttacttgttaaaggagagggttggattagaagaacgtcagttccactcattattttattgagtagttactgcatatgaggtactgtgggagctctggaagtgtaatggtgctcaggtctgtgccatcaggacactgacagtctacttcggggtgcacagagtgactgggcaaaatctgttcaatgctatgagagggaaggccgtgtgttccttgtatgtcctctccctggacacacaaaggaagggctcctcccccaggctctgaaggctctctggaagaaggggcatctaagtgagacctggaggatgagtaggagttggaaagatgcaagttggaagaaaggaggcaagttctttgctttctcattctaacattctgcttctatcctctaaattggtttctcatctctgataaaaggctcactcctgtaatcccagcactttaggaggccaaggcgggcggatcacctgaggtcaggagttcgagagcagcctgaccaacatggataaaccccgtctctactaaaaatacaaaattagctgggcgtggtggcacatgcctgtaatcccagctactcgggaggctgaggcaggagaatcacttgaacccaggaggcaaaggttgcattgagccaagatcgtgccattgcactccagcctgggcaacaagagtgaaactctgtctcaaaaaaaaataataataataaataaataagacaaattcttcctgatgcttagtagcccttccaggtgccattttggctgttgtgtgtgggctctattgctggaagtgagaggggaggtgttgaggagacagaagaaaggaactggaggtatcctccctgggattatttgcttttgaatttgtaggaaagccacaacattgggttaagcttgggtggtggtggagggttcatggggatgttgaaggagtcacctatctgaaaagtggtgcttgtgggttccaggtgtcactttaaagtggacctcaatcaactgtgagccagttaaccctggaaatagacaccctgctggagtgctgaggtggtcctgtgcagtgaaggggaggtggtggtgagcccatcagtgtcaccacctttctcccgtcatggctccagagccgcccaggttcctgggttcttttctaaggtttttttccatgtttgctcttttttccacaccatttaacatattcctgctccgtgttttaggtcacactcagccggtaccagagggaagcagaacaaagtaatgtggcccttcagagagaggaggacagagtggagcagaaagaggcagaagtcggagagctgcagaggcgcttgctagggatggagacggtaaccgggggatcttgcttgtcagtgcctggactcctgggctggaaggggcctgcaggtggatcgaaacggttgccgagacccttcttttccaagcctctccagaaaagcacacttcgcaccttcctttggcagatcccttggaatacattttagccttc

SEQ ID NO: 2639 - DNA, 2300 bp, Homo sapien
acacatgtggaaagcaaggctaagaaaggttaaaaactcagtcaagaccaattctggtactaatagtcaggatcaggatttaaactcctgtaagtagctccaaagcccattttctttccattttaccatgctggtatatgatcagagttgatcacgttttttttgtttttttgttttttttttttgagacagagtcttgctctgtccgccaggctggagtgcggagtgcagagtgcagtggcgtgatctgggctcactgcaagctccgcctgccgggttcacgccattctcctgcctcagcctcccaagtagctgggactacaggcgcccaccaccatgcccggctaattttttgtatttttagtagagacagggtttcaccgtgttagccaggaaggtcttgatctcctgaccttgtgatccacccgcctcggcctcccaaagtgctgggattataggcttgagccaccgcgcccggcgcctgatcatgttttttgatcacaggtctgactgaatgaattcaaagcccaagtttccatcagtgaaaggggctctttatttttttctatagctagcttattgtaaaattactgatttttttgtatataagttagacttgtaggatgtgaaatgtcaggagtgctgaatttactggctagattgttaaaccctaaattaaatcccaggaggctagctggggggtctcctgactgttctgtttatataaatggatatttcagataccagactctgacagagacaatttcagtgactgaaaagtttatggaaggcttgttactaaatttagtatcatttttcaggaaggaaaatccctaatggtttggaacaggactgaaaaagaatttaactctaaagggtagataagctttaaatgttaaattgattagaggtcaggtgtgtatttcctacctctcttgggatagccatgggagggaacctccaggcctgctgcccagtggtttttgctgagagagcagctggatcagcattctggaaggtagtttggtttgctgagggagtcttgtgagactcagcatctttcttgacaaaatacttcatctaaaccttgtactttgtttgccttatttcagccttttgtacacagcaaaacaggaaggaaaattagtaggctgaccatataattataggtgtatattttttagtttggactgattacacaggactctaaatgagatagcatagagcaggaaaaaagttgatggaatcccaagaggttaattgaattggaaactagtgtatgtgaagagtaataccatttagctcccaaagtaatgaaacttggcataaaggaaaattaagttgactgatttgagatatggagagaaattggatgtaaatgtaaaggaattatcttcagtcataactttttttgagtctctatttacaaattaagagaatttattttgtgaaggttcttttaacagaattcctttgaggtttaaaaaggacaaagtacaattcaagtggcagggctgtcaaaagccactttgattgaattgtatacatgcttagttagaatgaggaaattggattgtttgactgaaaaagctttgtttcctcctcagcttcagcctctttccatgtgcgttcctgaagctatgtgtgggatattagtatagaggaaggggaggtcttctcacctctttccatttttccccccgccataagttcacaaagtttttcacattagaaactgttaaaacataaacaacttttctggaaccaaattaatcttttgacttcatggttcataccgtgtgacactggagtttgggcaggagggtggagatacaaggtgtttggacccttctggtttatgggattgtctttttccctttttccccttaggaaccacgtgaatgttgagggggcgacacacaagcaggtggtggacctgattcgagcaggcgagaaggaattgatcttgacagtgttatctgtacctcctcatgaggcagataacctagatcccagtgacgactcgttgggacaatcattttatgattacacagaaaagcaagcagtgcccatatcggtccccagatacaaacatgtggagcagaatggtgagaagtttgtggtgagtgtcagcccaactcgatcctcgaacatctagctttgtttcccctagtcttataattatgaaactattatagtggtagataaaaggctgcaacctaggtcagtttgtctaccaggaggatgagttcacacataaataaaagacactgaccctgatttattgcagggggtgaatt

SEQ ID NO: 2640 - DNA, 2300 bp, Homo sapien
tttttttagacggagtctcgctctgtcgccaggctggagtgcagtggcacgatctcagctcaactgcatcctctgcctcctgggttcaagtgattctcctgcctcagcctcctgagtagctgggactataggcacatgccaccacgcccagctaatttttgtattttttagtagagacagggtttcaccatgttggccaggatggtctcgatctcttgacctcgtgatccgcccacctcggcctcccaaagtgctgggattacatggacctttatttttagggttatattatctgccagcaaacacatatagactcagcaatatgctgaattgatttgggaactaagtgggcaatattaagacattttaaatatttaagacattttcattaaaatgattcttggcttactgctgtatcctacatgaaaactttattcattttacaggtattcatagataggtttgctgagttgtaggtaatctagagtgcccttgttctaagcaggctaaaggtagatactaatacttctgtattgaattttttgttttgttttgttttgttttgttttgagacagagtctctctctgttgcccaggctggagtgcagtggtgtgaccttggctcactgcaacctctgcctcccaggttcaagcgattctcctgcctcggcctcccgagtagctgggactacagaaacgcaccacatgcccggctgatttttgtatttttagtagagacggggtttctccatgttggccaagctggtctcgaactcctgacctcaggtgatccgcccgtcttcaccttccaaagtgctgggattacaggcatgaaccactgcacctgaccctgtattgaaatttccttgttatctcactgcctccagatgatacatcaggagtctgtggatgtggatggtgaaacatttgtctagaggcgtgagccactgcacctggccctgtattgaaatttacttgttatctcagtgcctccaaatgatacatcaggagtctgtggatgtggatggtgaaacatttgtttgtctaggaaggcagggaaatgacacagatctcctcaataagatagctcatcttctggctcagggaagagacctttccttgctacattataaagttatattatttggtagctgttcagtaggtttttctctaaaatactggcttatagaataacagttttacgtgatatgtagtcattctgtttccttgtaactaactgacctagttgaatattttaaaaacttttgtagggagccttatcgtgaagagaaaccattttccccatagaaggtagtggaacttctttatctgtttttagctttttctaacatggactggcctctctgaacaaagcccttgggaaatgagaaagggtacaatttttaaaaatcaaacgaagtaaagtcaccagtttaatttaccattctcatgagagtgtcaggaaattaactttcttaaatttagaggattagctacctaccttacctgccggcttgctttcctatcccatcacgtccccccagtttttttttttttttttggtggttgttttgaagctaaagttaaagtcagtaaggtgaaattatgtgaattcttaattacctaccccagttttcccaaaatagcttttaatttttgtggttctctgactggcctgtttttaggccaaataaatatttttcctttagtatttcaattttatatttggtttattcctgattaatctttccctaccactacctctttaccccatgttctgttgttctgcttgttaataggtcacacaagactgcaaagttatatttacggaacttttatttctccctctggttatgtttaatatttttagcaagctacatctttgtattttctattatttctttgttctgatcatatttagatgaatgtttgtcatgccttaaaatcttatataccagacatggtttgctgcctcattattgcctgctactgatgatttaaacttaaaactgatgatttaaacttaaaactttgatacgtctttgactttatattcttgattttaaggccttatgccagattttatctttattttctacagtgtgttcaatacgagtaattggtgagagtgacatcatgcaggaattcctatcagaatccgatgaggtaggtgaatatctcttttagtgattattttccttttggctccttgtgggggaaaataagttaaaggtattgattatgcattaaatttccataagctctccaaaggactccattttttctacttcctttttata

SEQ ID NO: 2641 - DNA, 2300 bp, Homo sapien
tctgtctccatgtttcttttcctgctctcctacaatttgttctcccaagaagccaagagtcatcttttaaaagttaattcaccaacatttactacccagtctgctttgtccagcactgtatcctggtcaccctaaacagtgccccaaatattagacattgcttagtaaataagaaatgactgttggacatctatactggacttcccatccatatctacatcatcatagggccaatgctaaaactttctcccataaagtcctgactcatatatttctattttctagtcacatagacagaaaacctcaagagtttttagtactttcgcataaactcaatggtattaaatcatttaagatttcacttccacaaactttctcatatcatttccctcttttcaattatcactgcctacacttattaactgagtaatcatagcaatttcctaattggtccttctgtctatgttctgaagcatcaatctttctaaactgcagctaataaaaaacaaaacttctctgctgctgttttttgttgtttttcatagaacacctcagcctggcattcaaggctcttcgaagccttactttccacttcattcctacacatacccaaatagaactattcattgttctctaggcaagtttggtcccttttctcccatgtcttttcattcccagttactacagtgtctggcacataacggctcaataaatgtttgttgaatgccttcttgttgaaatccttctcacactaaaacagttcaccttaaacactactttcttcatgaaaatcttaacggccctcatccacaggtctttctccttccttttctagtccttatggcacttaaacctttcactgctgtgtatcatggccatgcgtaagtgtctcattcttctgtgagcctgtaagctggcagaaatgtttctttctttgcttttgtgtctgttgcagtatctcaaacaatctccccaccccacccccaacagcagatacctaataaatgtttgactttaaccactgtaactctaattctggaattccactttgttcttctttatggattctttgcttaggaaaggtaacacttcccccctccattagcacagtagtgtttcttagattttaaatatccaaagctaatgggtgggtgaatgaatgagcccctgaacaatgtctcttcccaaactgccaaacaaagtgccacaatggtccttggtcttatggtcatcagttagggaacaaaagcgtgtgatcggaagttgtaaaaataataataaatgaagctttataaaaaaattaaaatgtctcacccaccacaaatgctgagcttttcagaccagagtcagctcataaacaaatgtgcagaggaacagatacccttgagagaaggtaattaggccccagcccctcagatgcctctgtaaaagcaaaaggctgtaggaccacccttcttctcaggagtgtgggagcaggggagagtaaggccacccacagtgcctagttttgtgctggacagttcaatagtcataatgtgttcctttcagtccagatcccaaagagaaaaactttcccgatttacctgaaaaagtatatacctgttgctgggggtggagaggagggtccattgctaagatctgtaccaaaggctctgccaggctctatctgcatggcagagaaaggaatcctgtgattcttcaaaggatttttgtgcaagcttgcagatgggaggggtaagctcaatcacctctgagatctgaaggagaagaaggaattttcaaaggagccactgggaagagaactgcaaaccaagggcctcctgtggcttctttcctcacccttctccattccctgcactcaaaaaactgccacactagttacctgggaaaactggttagatgtttcttcttttcagactgaccactctgactcaaatctcaaaggtcccagttcacttcttcccacacaacccaaaggatttgtagtctaggaaaccaaagaagtgtttgatcaataaatcaatttatttaaaagaatatgttacaattaattacactaagtgacattaccaaacaattttagagtggttagctctagaacaaggaatgaaagaaacaatgttagccattattgtgtctgtgtattttctcttcacatttcttaaatcacaaataaaaaatacaagatactgcagtgaaaatacaattagagtttctctgaaataaattaaatgtgcatggcctgggaaaaactgaagcccagctcactggcttaaaagggggtcatgatataaaattaa

SEQ ID NO: 2642 - DNA, 2300 bp, Homo sapien
cagtcctcatggtgtgcctcaaatcttaatactagtctgagctgaataaaaaccaaattggagcatttgcaaggatgatggtagaatcctagaatctcaaagctggaaggggcatagggtcattggacacagttctctacccaatgctgtgtcccctccaccaaggccccgtgaaatgtctgcccagcctttgctggagagctgtgagttatgggaagtgcacagccttctgagtcagccagttccaatttagaggtgggctctagactggtcactgacctaacgctgctgtgcaggggcagggaagaggggtgcacgtggggcctctaagcaagtgtcctggcgccccagcaaatgagggtagggggatatgggaaggctggagaagagacgggggtgaagggagggctggggaatggagggagaaggagagggatgtgagggaatttggctgaaggtggatggggaataggggaggagtggggaggtggggaagtgccatttgaaatgtgagggtgtccctaagcagtttggttcttctgccaggacattcctttccaataaattcaaatagcccatcctgagtggactgcttctctgggccagggcctggcaggtgggcagggtgggaaggagaggcccgggggcaggggagtggggctcactggcagggtccggctgctgtgaagggtgttgatggccgcctgggcctcagcgtgggtctggaacttcacgaaggcgcagcctggagaggttgagatggaggaggagaggggtaagcacccatccctgcgggaccccgcggtggaacccgatgcctagggagtcttgggggtggaacaggaaggggaagggcccggtggggaagggggaagtgggtggactacctttgctggtgccatctggcccccggagcacagtgcactcgtcgatggtcccgaagggctcaaacatcttccggacgtcctcatctgtctgctgcttccctagcatccccacaaagagcttccggtcttctgggtggtagggcacaggaggagggcatgttcagggcctcctggctgccttcccagcccttcttccgcccttccctggagctcctaacactacttctgctacccttagggtccaatggctgtaggggctgatggttggggaatggggtatagttgcagagggtgctcatcccagctctgagggactcgcactccaccctgggcctcagttttgccatctgtacccgccccagatctcacccgctctggccacactgactcctatctcaccgcagctgggaactcttcagaatcatcaggctttctccctcaagaaaggctacccctcgacaactccaggccctgggcctgggggtgggaggagagggacagagtccaaaggcacagaacctacctcctcggctctcgctgtcggctggcttgacctggatcggcctgttcatctgaaggagagaagagaaggcagctgctggggacctcctctgaacacccaagagccctcccaggccaggccctgcagagagactagaggggcaagccccaggccctctaagtttctgatgggaaggaagggacagggcctaatactgttcaggatgaaggcctgaggggatcagaggcacagagagagaggatgtagagggagaggctcatgggcacagctccaggctcaggttgggctcctgatgacttggccagggatgggtgctgctgtcctgagtgggagaagggggcctgcacataggacccggggcctgagagagagcccgaccaaggagttatttaataagaattgcctcaattctacaaagtgggcgcaacagaggccactctgaagaagccccaaggaggactctagactgagggagaccccacaaaggcccagacttccttctgacctctagaggtgtgtctgcctctctttctgcccccctataccccttgaccccagggggaaggcactcgggcagcacaaagggagcagatgcccagtctccgtggcaacgggagaatgcgcaccatggcaaccgcccactcagcctgatttatccgtccccgtcgccctggcgaccgtggtgacgtcatcacttctgctgctccacacacccagagaaggagtggggtggggggtggttaacagggtatgctgggggtggaggatttggtgggggctgggaggtgggggaggggcccagaaaaccttcctgattctggagggaggcttgcagagcaggccctgcaggggccatcccatcccttctcctgcctccctcctccagagca

SEQ ID NO: 2643 - DNA, 2300 bp, Homo sapien
accgggaaagcaggcagccccagcggcgggagcagccggcagcagcccaggcccggggactggggtgggggtgggaggggggctgaggggaggacctgaaggggggcggcagggcaaaagggacccctggagccctgccgccatcagagatcaagcatctggcatcagggatcttcggacccagcagaaggatccgccacaggggaggtgtcctcccagggaagccaacgagagattcacctgccccacatcaggagtgggccccccttactgacgctgctggcaaccatagcaggccccttaacccctcagtctcctccccatcaccctcctcaggccctttccccgcctccagctctcatctcaactcccagttcccagccctctaagccctagcacccccggctaccacctaaccctccaggtcttggccatactcacccccatcctgggacatttgccagatctctgggagggagatcgtttgtttaggcgatgccccctggtggcatgacagcgtctgcctagacccctgacccctagcactcaactccctgggcctcctttgtgtgaagagccgcccctctgcttagcagcgtggttgggggccaaagggaaagccagccccagctgggcccccgggccccaccacttatctccttgctgggcagctccccttggcctttgggcctctccctgctcccctcggcccctcctcctgggccgcctcaatgaaggagccggatgccatcaagctgtttgtggggcagatcccgaggcatctggaggagaaggacctgaagcccatcttcgaacagtttggtcggatctttgagctgactgtcatcaaggacaagtacaccgggctgcacaagggtgaggggtcgggcaggctgaagaggcttcggggtgggctgggaggctgggggaagttaagccaggctggaggggtggagcggctgggaagggctgatgtggaaggagaagagttcaggcctgaggaaagtggatggaggagctgaaaaagaactcagctagagtgatcaggaaaccccggtgaaggactaaggagggcctcttttggctgaagagttgtcaagacggctgcaaagatgtggatcccagacatatgggtgtgttgatgtcatgggatgaactcaagaaagaatggagggacaagagagctggtttgggagataagcagctgggtaggggtgtgtgtgtgtgtgcgtgtgcagcaagactgagaatctgagcagcctcagataatattgggatgggggtcaggacacagggtcaggtgttcaatgtggaaagcgtggagctggactgggcagggcagctccaggactaaagagagggactaggaagcagggcatgaaggctggagattggtaaagatctggaaagtgtgggaggcttagaaagttaagagagtgggggagaagggagggtgctcctcaggcctatccaagggctgtgcggctaagtgggggcggtcagggtcagcacttggagagctccacacaccggggatcccaggggccacaccagctccccctccacctggcacagggaagaggcacttccggctaactaactgttcttcccttcccttctctatttcactctccgtcctccacctgcctatggtggaggtggggagagatgaggaaatagggaaaatgggagaagagagggatgatggtgatcaagatggagggaggtggaggtgagggagagaggggaaaggagaacagctcagcaggagagaaagccacactactcttacttgtctggcggtcacatggtccttctctccctacacaaagcccatctcctgacagcccaagtgtcctccctctcccatcaccaccagtatttaggcctccaggtgtctgccccacttctggggcagagagtctaccccttggagacacctctctaccccagcaggcagaagatgacaagaagggaaagcttcccagtcgtcagtctttggaagggagcctttcagagaggggagatggaggactcaccccccgccgtgtttctctgcccctgcccctcctcaggatgtgccttcctgacatactgtgcccgggattcagccctgaaggcccagagcgccctgcacgaacagaagacgcttccaggggtgagtcctgccctttgcagggccaggggactgagaagggccatagaagtggcaggaggctcaccaccctcctgacactgagcataatttccacctcctctcatcaccaggaagtccccctctctctctgtagcatccatct

SEQ ID NO: 2644 - DNA, 2300 bp, Homo sapien
cgtgatagctcaggaatggaggcccctgggactcagctgggacacagtttagagacacgagtgcctctgtggaaacagcagccctaccccgggggagaagaagggaatgacaggaagacagggtgctctacaaaagcccagagccccaggagagcccccgttgctgagcactgacagaaagcaagggctaccaccactgacaaggtttgatgtccacagataatccctgcactgagggcgtgctctgagtgggcccagtgcatggaggggtcacgctccctccagatcgtggagcctgccaatcatccatagaagtatccatggtcaggggagcaatggtccccgaatgtgcctcccctgctcttctgtgctacctggctcaatttgagtccaactcaaagaacccaactgaagaaagaagcaaaggaaagagtaattgggtttctgcatcctaaggggaagcttgacagctgtggttcttcccactgaaggaatcaggaatccactgttgtcagaggttgtttgcatggagtgtttgttaagctcctgctacgcatgagcaagacagggtgctagacactgtgaacagtaagatgctgaattaaacggtgtcctggtcttcaaggagcttacaagtgagagcgcccgcggcgccgcctccgcggcctccctgcccacgcacttatacacacaaaccccccagagggagagaagggggcatcggcaaatgccagaaagctatcgtttttcttggttccttttctggaaaatatacagttctctttctgcattcttctcatcctgctcctccttctccacgtccctttccatttttcctctctgcattttttctttttcccccagactctgcgacctgcttccctctccatctatatctcctttcccttcagcctatgcaaccgtcctttctcatttttctttcccctgatttctttccttgactctctactcttggggctccccagatgccgggctcccctctttccccgccaccccccatctgctgagtcttccagcaccggggacagctccagcccccggaacaatggaccccactttagggttcctctataaattctccatcttagtgctttgcccaactcctgactggggagtaagatgggggaagggttattatcaacaggaccagctgctcttctgggggcgggaagggagtcagggaggatggagatagaaagagggcgtggctcgtgcctggattgtgcgtccctctccagggtagagaatttgtattcgacccctgagactgacatcactgatgtcaggggaaaggaggtgggagtggggaggggggtgtggaggggggaggtttttgttgaggagagcgcggccggagagcagagctccgggacccaggtgaccgggaaagcaggcagccccagcggcgggagcagccggcagcagcccaggcccggggactggggtgggggtgggaggggggctgaggggaggacctgaaggggggcggcagggcaaaagggacccctggagccctgccgccatcagagatcaagcatctggcatcagggatcttcggacccagcagaaggatccgccacaggggaggtgtcctcccagggaagccaacgagagattcacctgccccacatcaggagtgggccccccttactgacgctgctggcaaccatagcaggccccttaacccctcagtctcctccccatcaccctcctcaggccctttccccgcctccagctctcatctcaactcccagttcccagccctctaagccctagcacccccggctaccacctaaccctccaggtcttggccatactcacccccatcctgggacatttgccagatctctgggagggagatcgtttgtttaggcgatgccccctggtggcatgacagcgtctgcctagacccctgacccctagcactcaactccctgggcctcctttgtgtgaagagccgcccctctgcttagcagcgtggttgggggccaaagggaaagccagccccagctgggcccccgggccccaccacttatctccttgctgggcagctccccttggcctttgggcctctccctgctcccctcggcccctcctcctgggccgcctcaatgaaggagccggatgccatcaagctgtttgtggggcagatcccgaggcatctggaggagaaggacctgaagcccatcttcgaacagtttggtcggatctttgagctgactgtcatcaaggacaagtacaccgggctgcacaagggtgaggggtcgggcaggctgaag

SEQ ID NO: 2645 - DNA, 2300 bp, Homo sapien
ttctccatcctcagaggacatgatctgtttagcatctccataaataccaagatcagattagaaggcaaggaaaggagcagtgggggtggggtaggtgagtggaaagttactttcaagatgtgtgtgcccttcttgattccctggctctgccgtcattcgcttcttctgagcacccaccactgagtcctctagcacctccccccactgccaccccatcttaggggaccctacttgggggacccgggcatccatgtgatgaagtgtaatcaagtctacacacatacacattcactcaaatgcaagcacctgccagagcgtggctccaggccacaacaaaaaaacaggctaaggaaggatgggaggtggtccacagaatcaagcagtaaaaagaaagactctctctcatccagggcttaaatggagacagaagaggaagaaaggccagacttcaccactgctcccattctcaagaggaatgtttgatgtgggagttaaatgcgtggactcaggagccagactgcccaggctccagtctcagctagacctctttctagctgcatggctttaggcaagttatttcagctctgtgtcttggttacctcctctctatttggagatgacaaaatctacatcataggggggtggtgagggtttaggagttagtaaatataaagcacttggcacaaagcctgggacactgtaagagccatgtaagcactggctgttactattatttcccttccagaagagaagcctgcctgccgtgatagctcaggaatggaggcccctgggactcagctgggacacagtttagagacacgagtgcctctgtggaaacagcagccctaccccgggggagaagaagggaatgacaggaagacagggtgctctacaaaagcccagagccccaggagagcccccgttgctgagcactgacagaaagcaagggctaccaccactgacaaggtttgatgtccacagataatccctgcactgagggcgtgctctgagtgggcccagtgcatggaggggtcacgctccctccagatcgtggagcctgccaatcatccatagaagtatccatggtcaggggagcaatggtccccgaatgtgcctcccctgctcttctgtgctacctggctcaatttgagtccaactcaaagaacccaactgaagaaagaagcaaaggaaagagtaattgggtttctgcatcctaaggggaagcttgacagctgtggttcttcccactgaaggaatcaggaatccactgttgtcagaggttgtttgcatggagtgtttgttaagctcctgctacgcatgagcaagacagggtgctagacactgtgaacagtaagatgctgaattaaacggtgtcctggtcttcaaggagcttacaagtgagagcgcccgcggcgccgcctccgcggcctccctgcccacgcacttatacacacaaaccccccagagggagagaagggggcatcggcaaatgccagaaagctatcgtttttcttggttccttttctggaaaatatacagttctctttctgcattcttctcatcctgctcctccttctccacgtccctttccatttttcctctctgcattttttctttttcccccagactctgcgacctgcttccctctccatctatatctcctttcccttcagcctatgcaaccgtcctttctcatttttctttcccctgatttctttccttgactctctactcttggggctccccagatgccgggctcccctctttccccgccaccccccatctgctgagtcttccagcaccggggacagctccagcccccggaacaatggaccccactttagggttcctctataaattctccatcttagtgctttgcccaactcctgactggggagtaagatgggggaagggttattatcaacaggaccagctgctcttctgggggcgggaagggagtcagggaggatggagatagaaagagggcgtggctcgtgcctggattgtgcgtccctctccagggtagagaatttgtattcgacccctgagactgacatcactgatgtcaggggaaaggaggtgggagtggggaggggggtgtggaggggggaggtttttgttgaggagagcgcggccggagagcagagctccgggacccaggtgaccgggaaagcaggcagccccagcggcgggagcagccggcagcagcccaggcccggggactggggtgggggtgggaggggggctgaggggaggacctgaaggggggcggcagggcaaaagggacccctggagccctg

SEQ ID NO: 2646 - DNA, 2300 bp, Homo sapien
ttaatgtatgtggggcaaccacaacaccaagctgcaaaaaaaaaaaaaaaaaaaaaaatctcagctcaaatgaactctgttttcatgactgccactctagggaacctcataaagagggttacaggattccctgcacagggatgaataaaactggggtgtctactctggctgattccatgggagagaagggcatacaccttcatagacggtagtagagaaattcaattctgatttctcagaaagggaggtagattcacaaagagaaacagggcttgaggccaaaaccacttcatccacaaaagtaacaattctccagtgagtcacaaatccccagcatttccctaggtagacaggaaataaatggaaaccaccaccttttcctatcagtcttcaaattctatgtgaccatccttagtccttagccatttccttcccatattcctgcaaactaaccaagaatactttccttaactacaactggatgatcacaccccttcctaacaaagggatcaatcccaggcctcctttccagaggcagcttccacctcaggggtagagtggtttttgggaacactcactcacattcttaaagaagtggcgggcaactatttcagggttcagctcccatttgacattgttcttcatccctacctccaggcgacagctttttagaaatttcactgtctgaaaggaattatgagtttgagtcaaaggagaggaaacatgtcagggtcacagggtatgcaagccaagcaagatggctcatgcctgtaatcccagcactttgggaggccaaggtgggtctcccaaagtgggtcacttcagcccaggagtttgaaaccagcctggccaacatggcgaaaccctgtctctaccaaaaatacaacagttagccgggcatggtggcgggtgcctgtactgattatcttctcatgtgtccatgttctctccaacttgtacgtaaatatccttgaaggcagagccctcatctcagactattccatgggttccctgattcccagattgggacctcccttggtactttaaggcacttcacccaacacatcagggatctcccaagaggtctccatacctgttttgtggggcagccacaacacttcccctttctcccactcttgggtctgcaatcaggagacctcaagggaatcagggagactctcagggtgaggttggtaagtcttgtgacaaataaacactttttatgtttctactcaccgcctcacctgccttggtctggatcttctctaattttccttcttgtctcagctagaaaagaaagttaaagatgaaaagcagtaaaagaaaaatgagcccatgttaaatagcatcaaactattcctatgttggacattggctgggcttctgcattcctgttcttctagttcctatttcattttcaagttaagttaaatgtcaaagggaaggaagctgcaagagaaaagaagttttatctccccaagtctctctgtccttcctttgagctcaccaatttctcctcttcaaacagcttcttgttttcaggggatgcatatacagccagtccctgaggaaggagtcgattccggcctaaagatttcttcactgagaccaggtcaccccggactccaacatctgtcaattagaacagagacaggggaattagaaccatctaggagtccctaaagaaaagatgtcaaaaagagaagcacctcttagtttctcacagtgcttatttttcctaaaagaaatgctaattcatattcactaggaacaagatttaagagactgctaattagtttctttagaacttgatgtataaatttaatatcccctgtatagagggagttgtcgtcccatggaggatttcagtatctgtggcacaaattgtcaggctcctctccccacacactgttaatgatgttgctgcctttatgttttaattttcaatgctggaggccagtgtcacaatcacaatagtttttatggcttcctcttctcacatatagagttggattgtttccacaaagaaaaagcaaggcaaatagttgagggggacgggctagaaaaagctgatgccaaaccggaccagcctgagaggaagcgcctcggcccgggccttactctccaccgactgcgtcaggatgagctccaggttttctttgggccgatgcttcgtgtcctccaccagcttatagacgcgatgtcgccggtgcaggcgcggcttccggccctccccggccagcggtaccttccaccagcgctccacgatgaccgtgccctggcggccaggaaagcgacgg

SEQ ID NO: 2647 - DNA, 2300 bp, Homo sapien
ttcagggttcagctcccatttgacattgttcttcatccctacctccaggcgacagctttttagaaatttcactgtctgaaaggaattatgagtttgagtcaaaggagaggaaacatgtcagggtcacagggtatgcaagccaagcaagatggctcatgcctgtaatcccagcactttgggaggccaaggtgggtctcccaaagtgggtcacttcagcccaggagtttgaaaccagcctggccaacatggcgaaaccctgtctctaccaaaaatacaacagttagccgggcatggtggcgggtgcctgtactgattatcttctcatgtgtccatgttctctccaacttgtacgtaaatatccttgaaggcagagccctcatctcagactattccatgggttccctgattcccagattgggacctcccttggtactttaaggcacttcacccaacacatcagggatctcccaagaggtctccatacctgttttgtggggcagccacaacacttcccctttctcccactcttgggtctgcaatcaggagacctcaagggaatcagggagactctcagggtgaggttggtaagtcttgtgacaaataaacactttttatgtttctactcaccgcctcacctgccttggtctggatcttctctaattttccttcttgtctcagctagaaaagaaagttaaagatgaaaagcagtaaaagaaaaatgagcccatgttaaatagcatcaaactattcctatgttggacattggctgggcttctgcattcctgttcttctagttcctatttcattttcaagttaagttaaatgtcaaagggaaggaagctgcaagagaaaagaagttttatctccccaagtctctctgtccttcctttgagctcaccaatttctcctcttcaaacagcttcttgttttcaggggatgcatatacagccagtccctgaggaaggagtcgattccggcctaaagatttcttcactgagaccaggtcaccccggactccaacatctgtcaattagaacagagacaggggaattagaaccatctaggagtccctaaagaaaagatgtcaaaaagagaagcacctcttagtttctcacagtgcttatttttcctaaaagaaatgctaattcatattcactaggaacaagatttaagagactgctaattagtttctttagaacttgatgtataaatttaatatcccctgtatagagggagttgtcgtcccatggaggatttcagtatctgtggcacaaattgtcaggctcctctccccacacactgttaatgatgttgctgcctttatgttttaattttcaatgctggaggccagtgtcacaatcacaatagtttttatggcttcctcttctcacatatagagttggattgtttccacaaagaaaaagcaaggcaaatagttgagggggacgggctagaaaaagctgatgccaaaccggaccagcctgagaggaagcgcctcggcccgggccttactctccaccgactgcgtcaggatgagctccaggttttctttgggccgatgcttcgtgtcctccaccagcttatagacgcgatgtcgccggtgcaggcgcggcttccggccctccccggccagcggtaccttccaccagcgctccacgatgaccgtgccctggcggccaggaaagcgacggtaagctagtctccacaaggaacaccctctccctccaccacggccgccagcccctcaaggaaagcccgccacccccacatcggccccctccaggtcccagtgcgcctccagaaacaatactcgagcgtatctaccccctaccccagactcagccctcacccgattttgagaaaggctgaagttgcaggccaggtcaggggcgttcccttcatgtcgcggccgcagtagctcctggacgcctccccgaagcagccgtccagcgcccgcccgcagcagagctctgcccggggccgtgacaacgggcgccgccatgttcacaggcacagaatgagacctgagggaggaccccggcgtcggcggcaggaaaggcccccgccagtgctgcctgcggcgcgccggtacggctgagcgaaagtatggggagcgggccggggaacagatggcaccgcggcttgcctatttttgctttttggcagaggtgacggacgcctagaattactgactgataatggaatgagtgttaggtggactgacgccggaaaagacgctcttcctcttgaaagtgtgggctttgctgtagctccagttgctgggctaacttttaattcta

SEQ ID NO: 2648 - DNA, 2300 bp, Homo sapien
aaatttggttctgggactgccactttgagacctctgcatatttatccattcaacaaatatttattgagggtctactattagccaggcactattctaggtgcttgagatgatacatcagtgaacaaaacaaatccctgccctatggaacgtatcttctaaaagtgagaggacaaacctagaaaataaacatagtaaattgtttagtatgttagaaggtaactgctatggggtggggggaatagagcaagataaaggaagataaggaatgtgaaggggatgggtcagggttacagtaagaaatagggtgatctctcactgaaaaaaactgacatttaattaaacacttggaggatgtgaggttgttaaccaagccagcatctgaggataagagcatccaacgcaaaagcagccagtgcaaaagccctgagcaggaaacgtgcctggtgttttcaagaaacaaggaggccactgtgggtggagcagtgtaaattagagaggagctaatggggtcagagtatgtatggccttgtagaccatctgatggcctttttcttttaccttgagtaaaggaggaagtcattacaaagttttgggtggaagaatgacatgatctgacttatgctttaaaaagatcattctggctgctataaataagctacatagaattataaactgtagagaattaagggatatcttttaggggactattgcagtaatccaggagaaagtagtgtcttattccaaggtagagcattggaggtggtgacaagtggctggattctggaaatacaagtgctccttgacttaaaatagggttatgtcctgataaacccatcgtatgttgaaagtatcataagttgaaaatgcatataatacacctaccaaacaccatagcttagcctagcctatcttaaacatgctcagacaacttatccgacagttgggtaaaatcatctaacacaaagcctattttataataaagtgttgaatatttcatgtaacttattgatgtcctactgagtgcacatcactttcacaccatcacaaactcaaaaattgtaaatccaagtcagggactatctgtaatttaaaggtagaacccacaggatttcctgatggagtatgagagaaaagagttagaatggaaagaatggagtttctgtcaactgagaggaaaaaggctgcagatggggcagttttgggggcgaggggggaataaataaattagtttgggacagttaactttgaggtgtcctttggatacgtaagaggaaaatgacgaataaacagttgaatatttgagacgagtttgggagatgtctaggatggaactagaaatttgggagtcattggcttataaatggtattgtaagccacgagactggatgagatcaacagtgagtgtatactgagaagagtaaaggttcaaaaacggagtcccgagggcattctaagaagcggggagaaaaggagaaatcagcaaacgagactgaagaagaccggtgtccaggaggccaagtagtgtatttaggaggaaggaggactggtcagtatgtttaagggccagtctttccataatctctgccaaatggaccttctttcatccagtttttatggtcttctgtccagtactgagaccctccccagagggaactgtcgcggccttaccatagttgcttttttttctacggtttacatagcttgtgatttagaattctcctttattagcttaaatactgcagtataatgattaagggtcaggctcctcctggagctggcagagttttccaagggatcccatcctttaccacttttaggtagatttgaagtaaggaaaagtgagagcatcattcattctccggtcagtatccagtcatcacagaacgttagaattaaaagttagcccagcaactggagctacagcaaagcccacactttcaagaggaagagcgtcttttccggcgtcagtccacctaacactcattccattatcagtcagtaattctaggcgtccgtcacctctgccaaaaagcaaaaataggcaagccgcggtgccatctgttccccggcccgctccccatactttcgctcagccgtaccggcgcgccgcaggcagcactggcgggggcctttcctgccgccgacgccggggtcctccctcaggtctcattctgtgcctgtgaacatggcggcgcccgttgtcacggccccgggcagagctctgctgcgggcgggcgctggacggctgcttcggggaggcgtccaggagctactgcggccgcgacatgaagggaacgccc

SEQ ID NO: 2649 - DNA, 2300 bp, Homo sapien
aatcctgtgggttctacctttaaattacagatagtccctgacttggatttacaatttttgagtttgtgatggtgtgaaagtgatgtgcactcagtaggacatcaataagttacatgaaatattcaacactttattataaaataggctttgtgttagatgattttacccaactgtcggataagttgtctgagcatgtttaagataggctaggctaagctatggtgtttggtaggtgtattatatgcattttcaacttatgatactttcaacatacgatgggtttatcaggacataaccctattttaagtcaaggagcacttgtatttccagaatccagccacttgtcaccacctccaatgctctaccttggaataagacactactttctcctggattactgcaatagtcccctaaaagatatcccttaattctctacagtttataattctatgtagcttatttatagcagccagaatgatctttttaaagcataagtcagatcatgtcattcttccacccaaaactttgtaatgacttcctcctttactcaaggtaaaagaaaaaggccatcagatggtctacaaggccatacatactctgaccccattagctcctctctaatttacactgctccacccacagtggcctccttgtttcttgaaaacaccaggcacgtttcctgctcagggcttttgcactggctgcttttgcgttggatgctcttatcctcagatgctggcttggttaacaacctcacatcctccaagtgtttaattaaatgtcagtttttttcagtgagagatcaccctatttcttactgtaaccctgacccatccccttcacattccttatcttcctttatcttgctctattccccccaccccatagcagttaccttctaacatactaaacaatttactatgtttattttctaggtttgtcctctcacttttagaagatacgttccatagggcagggatttgttttgttcactgatgtatcatctcaagcacctagaatagtgcctggctaatagtagaccctcaataaatatttgttgaatggataaatatgcagaggtctcaaagtggcagtcccagaaccaaattttgcttacaatgttgtttttttatcaacaattttttagtagttgatttttttttttttttgagttggagtctcgctatgttgcccaggctggagtgcagtggcacgatctcagctcactgcaagctccgcctcctgggttcacgccattctcctgcctcagcctcccgtgtagctgggaatacaggcgcctgccaccacgcccggctaattttttgtatttttagtacagacagagtttcatcgtgttagccaggatggtctcgatctcctgacctcgtgatccgcccgcctcggcctcccaaagcgctgggattacagacgtgagccaccgtgcccggcccagtagtcgatattttttaaaattggtgagatttactacaaaactgtctttccagtttctgttcaaaaatcatacgatacagcaccatcaagtctgcattcttgcatggaactggatggaattgagttgtgtggacttcctttagataacgtgtgagctttcctattttgctacagccctaccctgccactccactaatttccataagctgtctaggcccctgaaggggcctagacaattagtttgcaattcctaccctacaaggatcctgggttattaagggtagggatgataataaaaatactcaactggtatgaactgggaaccaactaatcaggtcaccactggatcagagccttggaagagtcagataccaactctttacttgctggattttgggggaaggggagtgtccacagaggagcagggtgggtgggcacaagtgctcaggcagggcttttggccaaccagtacagaagtcttcaagttctattttttaatcattcatacagccataacatgcatactagtcgaatatgagccttggataagggattagggtagataagcagcagagtggagtcctgaggtgacataagggctgaccccttatccatgtcatagtgcccactgggtcacaatgccaccaggttgcctaaacctctgccacccacctgtgaacttcactttgccacagggaggcactgaactgaaaaactgccttgtaagaggtgtcgcccctctgtctactccctttcttatatcaagaggggaaaaacacgtaactacctctacccgatctggtcaccatacgcctattacctttactgttacaagtaccggatcactc

SEQ ID NO: 2650 - DNA, 2300 bp, Homo sapien
agaggcccaaaggactagcagcacttttgttttccagttctgacactatcaagatcaagtgcagaggggtctctgcagccaaggcccctcaatctcgaccccctacactgggttgaattacattgctatgggtttccacagaatccccaatatcccttgataacacatgccatgcttgtcattcttgattaacatctgtgtccgtggtgaggagaatgaattgaaggcagcaaccgtggctgcaggagaccaatcagggcctagtccaggtgtcaatgatggagatggagaacagatgaattggagagtttgttgttgtttatttagagacagagccttggtctgtcacccaggatggaatgcagtgaatgataatagctcactgcagccttgaactcccgcagtcgtccggcgtagctgagattataggtgcggttttggccgacttctatttgaagcaaaaggtaaatttcactaactcctcttcaaacattacaaatgaatttgtgctaattgagttatcagctgatgtctcaaaaaatgagactctacttgatctgtcactatggttttgttcacaattttcatatcctttcagctataagtttctcttaaagagaaatggaaaataatataatgtaaacggggataactgcatagtactgactgctagcttgtgtttgattttattacttaaaaattgaatgggaaggaggaaaatactagaacttaagaccacagtttctaggggaagctaagaagagaagatgaggatcattgttcagtgaggaatgtggttagataatggttttcagtgaaagctaactttgaaatttcctgacatttgtattgaacaattgccaaaaactatctgatatgcatcgctaaggcttactttatcatttaaaatgacaggagtcaaataggatgtgatgagaagtcaaatcacattgttagctccatgaaagcatagataactcattccagtatctcctaataaccagaacctacaaagaacctacaacatggtgacatgcttgaatcgaagcagctcaatgttctcatccttggtacgtttattttaaattcacgagaaaaaaaaaagtgtcaacccctttctctcaaaacaaggaaagggtctaaaagtcagtctttgaaataggggtctccagccaacccccacgatgatacctggattaaggaatgagggatactggaaaaacaaaaaccccaatgtattattctgacgactgtaaacagccatcctattagcgataactaaagaaaaagctggggaaagttaaaggcaaagtgatatacggatggcagctctcagtctcaaaaaggcccagtggaagagtctgaactgactcagggcaaacacaaacgctcccgcaccgggtccgttgtggcgtaagcgggtgactggagcatcttcctcagatacagttacgagttcccagtgggtcaagttgcccccgagcggcgtctcacagcccagggctctgactcccccgctgcgccccacatccttccctcgccccggggcacgccagacccctcccttccctcgctcccgcatttccgtctcctagtggccagggctgcccatgaccctgtctttcccactccccaaaccttcggtctccatcctcgcctttaccgctgctccagtcagccgtcgagtgcgccgcctcgcgcctcaccccagctgcagccaccagcgccgccgcctcccactcacaccaccacagtgagccccgccggcggcgcttcagccgccacttccccgcccccgcagcccgacagcaccaatcaacaccctgctcgcagtccgaccaatcgccttctcccgtcacaaccaatccttccgcgggctgcccctgagcgacgtggctgctgctagccgctgcccaattacccggatggaatccaaagcaggcccaccctgtcagccaataagatccaggaaaagcagatgttgttaactgagaccgcacctgctgagaattaaacagccaattacaagcttcccggcgtcctcgcagaccacctctaggccaattaccgaggagttttctatcttctaacccttggaggaaaatctgcgctccagcagctgggaccgaggcatgagagcgttgaatcatgagtggcaccgttcgcaaaaattggtgtctttgtacaaagacagtgccacaacacaactcagtgaccatcgggagagcagcctcatgatgggcgatgctccatcagttttctcttgcgatcttttgcatagatcggtcccgccccgcata

SEQ ID NO: 2651 - DNA, 2300 bp, Homo sapien
acacctggccggggaaaatacttttaacttatatacaaacagcaagtattaagaaatgaccctataaccaataaaaatatgaacagaatataaaaacagagaatttacaaaaaaattgccatttaaatatattaaaagatgctcaactttacttataagagcaatgaaattttatcttgcaatgagatagcatttacactatcagattgtcaaaaatcaggaagtttaacagcaccagtgtgctatcaaacaggttcttttcatacattgctgacaggagacaaaattggtaaaatttccagggaaggcaatttggtaatactaactaaaatcattttcaaaaattgctggtgggattaaaattataaaaatctttgtgggaggaagggaatttacaaaattttatctatccaaatgaaaaaacaatgcacacatttctttaacttggcacttgcatttctaagtatttatcatacacatatgcaagagggaaatgaagtatccttgcatatcaatcaaatgttaaaggactggttaaatatatcttcatatatccctcaggcatactatgaaactatcactatgaggcagatacgtatatgctgctacggaaacatttccagactgtatcaaagaaagttgcaaaatagtatgtatgttatcaactgggttaaaaaaatatatgtgtgtgtatatatatatacactttatatattacacatatacacacgttaactatagaatatcttgtgaaatttttcacaagaaactggtaaccctagttgccttgaaggaaggaaaatttattcactataataaccttgtttcttctgaattttgtagaatgtaaatgtattacttattcaaaacgcatacacatttttatattaatagaaagcaaaacctgaggcccaaaggcatctgcctaattgacaaaagatacaaccttgcgttctttcagcaaatatttattgctcatcacctgccaggtattgtgatggaagctagtgcggaagatcccccaatgaccaggatcgcccgacccctgttcccagggtgagcccctagcgcggagcggggacagggtggaccgagtagggcgcagtgctggtctcgcgaggctccctgccccacggaggcagtagcaggacccaaccgttcctaaccgtccagggaccaggacagcgtctggaataaaatcttccaaagcaaacttccgcctgcggagacccgctcccttcctcgcccccacagaaacgccccccgccaccaccccctcccccggcgtaggccttcacgctgtcgcctcgacccgtttcctcgaatccccagggaagggtgggcccctggcgcccctatggcccgccgcccccttaccaccgcggtcggagcccgggtctcactctcctgccgctgtttcgggccacaccgtgtgtccgtgcctccgcaaaggaatagaagagtgggtcctcgctctctgcggcgcaccgcttgtcccttgacttcctgtccatctacaaagcctatttcatgttttccagaaagaaaacgttttccgtgtctcttgagtcctcatcgccatatgcggggcgggaccgatctatgcaaaagatcgcaagagaaaactgatggagcatcgcccatcatgaggctgctctcccgatggtcactgagttgtgttgtggcactgtctttgtacaaagacaccaatttttgcgaacggtgccactcatgattcaacgctctcatgcctcggtcccagctgctggagcgcagattttcctccaagggttagaagatagaaaactcctcggtaattggcctagaggtggtctgcgaggacgccgggaagcttgtaattggctgtttaattctcagcaggtgcggtctcagttaacaacatctgcttttcctggatcttattggctgacagggtgggcctgctttggattccatccgggtaattgggcagcggctagcagcagccacgtcgctcaggggcagcccgcggaaggattggttgtgacgggagaaggcgattggtcggactgcgagcagggtgttgattggtgctgtcgggctgcgggggcggggaagtggcggctgaagcgccgccggcggggctcactgtggtggtgtgagtgggaggcggcggcgctggtggctgcagctggggtgaggcgcgaggcggcgcactcgacggctgactggagcagcggtaaaggcgaggatggagaccgaaggtttggggagtgggaaagacagggtcatgggcagccctggccactaggagacggaaa

SEQ ID NO: 2652 - DNA, 2300 bp, Homo sapien
ctgaaaccgagtcacctgtggggctgtccaagtgacctggaagagggactccttgcctctccctatggcctgctggcccacctccctggaccccgttccaccctcacccttttcctttcccatgaaccctggagggtggtccccaccagctctttggaagtgagcagatgctgcggctggctttctgtcagcaggccggcctggcagtgggacaatcgccagagggtggggctggcagaacaccatctccagcctcagctttgacctgtctcatttcccatattccttcacacccagcttctggaaggcatggggtggctgggatttaaggacttctgggggaccaagacatcctcaagaaaacaggggcatccagggctccctggatgaatagaatgcaattcattcagaagctcagaagctaagaataagcctttgaaatacctcattgcatttccctttgggcttcggcttggggagatggatcaagctcagagactggcagtgagagcccagaaggacctgtataaaatgaatctggagctttacattttctgcctctgccttcctcccagctcagcaaggaagtatttgggcaccctaccctttacctggggtctaaccaaaaatggatgggatgaggatgagaggctggagataattgttttatgggatttgggtgtgggactagggtacaatgaaggccaagagcatctcagacatagagttaaaactcaaacctcttatgtgcactttaaagatagactttaggggctggcacaaatctgatcagagacacatatccatacacaggtgaaacacatacagactcaacagcaatcatgcagttccagagacacatgaacctgacacaatctctcttatccttgaggccacagcttggaggagcctagaggcctcaggggaaagtcccaatcctgagggaccctcccaaacatttccatggtgctccagtccactgatcttgggtctggggtgatccaaataccaccccagctccagctgtcttctaccactagaagacccaagagaagcagaagtcgctcgcactggtcagtcggaaggcaagatcagatcctggaggactttcctggcctgcccgccagccctgctcttgttgtggagaaggaagcagatgtgatcacatcaccccgtcattgggcaccgctgactccagcatggaggacaccagggagcagggcctgggcctgtttccccagctgtgatcttgcccagaacctctcttggcttcataaacagctgtgaaccctcccctgagggattaacagcaatgatgggcagtcgtggagttgggggggttgggggtgggattgtgtcctctaaggggacgggttcatctgagtaaacataaaccccaacttgtgccattctttataaaatgattttaaaggcaagaagtgtgtgtgtcagagggtgggggagattcttaaattagattacctgcatgcctgctctccagtctcattcctgggtcaagactcaggtttccagctcagcaatccatcagcattatacagatccaacccaccctcacccgacccctgcagtttctccccaggtggagcagtccctcagtgaggactgtgaacgaatcttcaggaacccccactgtaggagcctcaaactgagccccacgggagatgctctagactgagaacttcccataaatgatacccacggggaacgtttagatttagaggttgcacagaattgctccacatctgggagaccaaaagacagtcctctggaaggtggctggcccaagctccccagtgggggaatcaggatgtcagagagatcctctagaacctgctgttcttgctattgcatgacccctccctggcaccagagcctccctcctggctccctcccctgtcacttgccagcctgtagtggtgcttgctgcagccctccctggttgctttatttatttattttgcaccaacagggttgctgcagactcattcttgcctggtttaaaaagagagagagagagagaggaaaaaaaaaaaggagaaatgctttctggctcttttctccacctcagtcttggcagcagcggccgcagcagcaacagcagcagcagcagcggcaggcagcagccgggcagccaggcagcgggggttgaggcacacagggaaggtgcaggggcctgaggtgcagctcgaatgggacagggcccccagcgctggacagatgcagtgccaaacttgatgccaccttccagcttctccggtaagtgcccccactctctgtcc

SEQ ID NO: 2653 - DNA, 2300 bp, Homo sapien
ccagagcttgtgggctggaggcctttgtgagtgagctgggcctgaccaggataagcagtcttgccctccacctgctttccccagggcttcttccgccggagccagcgctgtaacgcggcctactcctgcacccgtcagcagaactgccccatcgaccgcaccagccgaaaccgatgccagcactgccgcctgcagaaatgcctggcgctgggcatgtcccgagatggtgaggccaagtcgacagccccctggggttttcctggtgtctccagaggggcagcctggcctgctgagctagacaaggcttaacctgcaagacggcccatcctctggtctcctctccattcctccccgttacaaccccttgtctcctcccctccagggatggatgggtcacccccatcaaagttctttggagtccccaactttaggctttgctagaacaaacatcctctttccaaggtcccatacctcttcatctcttcttacttggaacgaattctcctcactctgctgccctctggcccagctcccatgcagctctggcaccttcccctgctaccctgttgttgtagttctagctctatctccttttctaatcccccattcccatacttggacacaggactatagccaggaatggaaacagaattggcctgagaacaaccagagggtggtcgtgggggagggctggtgttcctggtgccttatccaccctcctcacccaccacctcctcaccagtctccctgcacacctccaccaccacagaaggagcctagggtggagctgggggggcatgaggtgatgaggagccagaaggagcccgtcagcacttttcagtgcccaaaataacaaagcaaaaggaagcacgcaggggtgcaaaggggcaggcggggcgaggggctgtgcccctacacctgggaggggtggcggggggagtaaaaaggcaggaaagagagagcagaagaggatgttcagaaacaagccgcggagcccgggttgggctgtggtgagtatctaggtcaccagggagcctgcaggcctgaccacagggagacctgtgttctcagctctcctcttcctccgaccctcccaaagaggcgaggtgaccccaatacagcttgaggccctctgctcgaccacccccagccccaagatctggaggccagaatccccagcctagactcattgcttgaattctgccatgattcaaatctgatttagaacttagaagattttgcttagcagattgaaatggcagactggacagaccccagaagcaaacaagagtgagaggtggacggggtcttgagcataagttccctaaaggctagagaagctgtgcttggagtcagccattcagagagcagcaagttaatcctttaatgaccaaatgcctcctgaccctgccctgtgccatgttctcctgcctcataaacccctggtccctggacctctttcagctgtcaagttcggccgcatgtccaagaagcagagggacagcctgcatgcagaagtgcagaaacagctgcagcagcggcaacagcagcaacaggaaccagtggtcaagacccctccagcaggggcccaaggagcagataccctcacctacaccttggggctcccagacgggcagctgcccctgggctcctcgcctgacctgcctgaggcttctgcctgtccccctggcctcctgaaagcctcaggctctgggccctcatattccaacaacttggccaaggcagggctcaatggggcctcatgccaccttgaatacagccctgagcggggcaaggctgagggcagagagagcttctatagcacaggcagccagctgacccctgaccgatgtggacttcgttttgaggaacacaggcatcctgggcttggggaactgggacagggcccagacagctacggcagccccagtttccgcagcacaccggaggcaccctatgcctccctgacagagataggtgagcagctggggaggtggagagggtggtagagatgagggaggggtttccaccagtaccccgtatcaatcaaacatgcgcctgagggaattgaggggtccagacgaggggcggagggaggaggcggagcaggataggccaggctgagaagtgcccttgcatgggtaggcgtaggagctggctgagatcaagccatgccttccttctccggccccagagcacctggtgcagagcgtctgcaagtcctacagggagacatgccagctgcggctggaggacctgctgcggcagcgctccaacatcttctcccgggaggaagtgac

SEQ ID NO: 2654 - DNA, 2300 bp, Homo sapien
ccctgttccaagtagagacatctcagagagcaaagcattgcccttctccatgagctgggcagcccagggctgagggccatccaggatgctacctcctcctgggtgggggttgctttgctcagcataatcctgatcagtgtctcgcctgcccctagccacagggccccacggaaatgctgagcagggccccgggaggaaagcgggtcagggagtgacgcgggtgagctgggggaggggggtcacggaccttatgtgggtggggggagtagggggactttcggagcagcaggaactgggagaggtcaaaccctattcctacccttaacccctgacctcagaaacctcagccaggactatacctccttatccctttcccatcccaccagtcctcgtgtccccaccccaagagtgttgtcctgaggatccaggctgacagcctctcccccactccacggcccagctcctgaagccccaggaaggcccaggaaggcaaggaaaggcctgtgcctggatgagagggtctggagtcccagcaagatcagacacctctcaggagtttgccccacagaatccaggagacattaaggcctcccccaggccgagagactctgaaaattggctcctgaattgagacaaccccaagatgggggtccaagatggggaacccgggggaactccccagaccaagagggagcctgaatactgaggggccctgaagagggactctcaaagccaatgtaccccacaaagcacctaagaggctgagaaggtctctggaattgtttggcccctgagaaggacccccctcccccaggccaaaaaacactccagagagactcacataccgagggacctcccaggctgagacaccctcaaaagcagacttgaaccagagaaaccctcccatccttcaagtgggatccgaagccagtctgcctgggcttgaatcctgactctgccacttactagctgtgtaaccttgggcaagttacttaacctctctgtgtctcactttcctcctcgaaatgaggataatggtagctacttcataaagtttttttattttttctttttgagacagagtcttactcagttgctcaggctgtagtgcagtggcattatctcagctcactgcaaactccgcctcccgggttcaagcgattctcctgcctcagccccctgagtagctgggactacaggtgctcgccaccatgcctggctaatttttgtatttttagtagagatggggtttcaccatgttggccaggccggtctcgaactcctaacctcaggtgatccacccaccttgggctcccaaagtgctgggattacaggcgtgagccactgcccccggcccacataaagtattttgtgaggattagattatccacataaaacatcgagaaccatttctgacacataatagtaagcactattattatgattatgagtatgatgatggtgatgatgatcattatctacactccaatttcagcagtttggctcctaaggaaatttctggtttccttctgtggattgtgggtatttgcctggtgattattactgcttctatcatttccatgtattccctagcgcaagatatatgtggtgtctgcagggaggagcgtgggcatgggagtggtgggacagccccccaggctgcaccacactgggtatggctgttggcagtccacagggtgtcaggtggcacatgccaccaccccaggcagacatcctgtgacttacctctgaaaacatccctgtccctgaagtcacctggcaaagagggtcaggcttggaaggtcctcgggggtaggaggagtagaaatttggcttcaggctcgtgtgagctccattctggctccccagccagaactaccctggcgggtggaaacagcttttaccgcgtgtggctgtcgcatgtggttttggaattttccaacgccccctacgattggctgcccctcccctcacaccctgccccaggcccagattggccacgtggggcgcctgtcatcctactcactgcaccccttgggggtggggtggggggttgtcacttggccacctgtgtggtgcagagcttaaaccccccagtccagaagcactgggggagagagctaggtgcagagcttcaggctgaggcgctgctgagagggcctcgccccgcctctgccgccagctgcaccccactcctggaccaccccctgctgagaaggacagggagccaaggccggcagagccaaggctcagtcatgagaagtaagtgaatggggccacctgggggcgggggagcctgg

SEQ ID NO: 2655 - DNA, 2300 bp, Homo sapien
atcagccccttccttatataagattgtatttgaagaggaaataaccaccgccctgctttgaaaggacgattcttccagataaggggctgtgattgcagcaagagggagaaagtttagacaagagggggaacttcccataaggataaccaagggatcttcttgccctggggagaaaaaaaactcaaactatccatgcttagggcaggggagaggtagagaatgcctaggaagcatgtgacactcctaggcctagaggtcaggatactgtcttctaaatctccagtcacttcctccccaccctacatagtagcacaaagtggcacaactggggagtcagctgtgcctgcagtgtctggggatgctctgtgtccatccgcaagcattctacgtgacctccactctgtgcctgcaattggtgggttgtagaagaggtagtcacgaagggcccctgggagacccagagtcaagaggaagagaggcctaaaaaggagaaaagatagagaggggacagctggagaagagccacagacaggcaggagccagcaaagagagacagagagatgggggataactgaggagttctggggaggaggggagcagaacggcatctcccctgcactcccacgcccggcatgttgctggctcctcctgtcagctggagggtgctgggggggcgggggggaagggagctgcaaagcactttacctctcactccaaacctgcccaaggtgcagagcccccaaacagaccaacatcctgttctgtgcagagatgcatacatggatgcgtgggcccacatttaccaaaagaacacgggggataatcagagcctcagaggcataggcacatacccttagactcagtgcagaaggtccccaaaacttcccctcctctttctcactactcatccactgtcaatgaccctaggagttgaaaagtccttctccacttctacctttatctctcaatctgcagccatggggagactctgggagctacctaagaacagaggtgctgatggtagcagagtgtgaagctccagggttgggcaggagtggaggatggcgagacgagacggcagaagagggaagggacagctgcttgccctctccatgccaggtgccacgtgcaccaggtgggggggagtgggcgagtcacgaggctgtggcatggctgactcctgctctgctgtttaccagctgggaacgagagcaggaggaggtgccagggagcctcttgctgcagcctggcccctggccagttgcttgttgggtaaccaggagagtcaggcccagctaatcaaactctgggcccaggccatgcaggagaaaagcagcaccaggatccccagaagcctcgtcctcttggcccccttcagagccttcactgcaggcctcagtgtgggccactaggtctgggagcctctccttctcccaatgagtccagtgcagcatctctcctctcctcttccccaccatggcttctctgcctccaggcactcctccaggcctgccccttgccccaacagatgaggagcacgtagaagcatcagggggtcagggagtcctggcaagagcagcaagggttaggggcaggggccgagcaggcagaggcctcagggaactgaacagtcactgggaggagtctgactgcatcctagagaagagacacagtcccccaaacctgccctctccatctcccctatgcctgtcacctgtcttaggtagaaatcacaggattctaaagtcacaaagacttgggtccaaatcatagctcacccatttattgttcttgtgtgagtccttgggcaaaatcattaatatctctgagaatccctccactcactgatcaatctggaataataatgtttccctgtggtgggtgctgtgaatatttacacaaagtaaaagcatggatttacataaagtgtcctgcaaagggcccagcacacagtaagtgattaataaatgctagttcccttcctttctcctgtcctgtttctcctcaaggctccatgcactggtccactggtctctcctcatgtcccctcctggtgccaggacactctgccagccactccttttccctgcctgctggagggccaggtgctcccgccttccaccctccgccctcctccctcccctgggccctgctccctgccctcctgggcagccagggcagccaggacggcaccaagggagctgccccatggacagggccccacagagacagcaccgagcctcacggggtaagaggcccatggccctgcctgcaggtggaagagactgctggaggttcag

SEQ ID NO: 2656 - DNA, 2300 bp, Homo sapien
acggctgcggcccagggctgaaaatgagtgctgccagatattctcacttatctggggatggcaaccaactcaaatatctttgcttagacccagaggctgaatcaaccaaaaaaacttccagctgggcgtggtgcctcatgcctgtaatcccagcactttgggacgctgaggcaggcagatcagccaaggccaggagtttgagaccagcctggccaacatgatgaaaccccgtctctactaaaaatataaaaactagccgggcgtagtagcaagcgcctgtaatcccagctacttgggaggctgaggcaggagaattgcttgagcctgggaggcagaggttgcagtgagccgagatggtgccactgcactcctgggcaataagagtgagactctgacaaaataacaacaacaaaaaaaaatggttcccccagtccttgaggaagtttaattcaaacctttgcaggaggtgaggggaaatatttatattctagtcttcttctagggcaaccaaatacagagggtgaaccaaatcttttaaatttccgcattaaatcagtttcatcttttggaacctgccaaaatgtcataatcatcacaactattattatcgtcatcatcactgttatgattccacctttgcacagttctgatttttttttttttaagacaaggtctcactcggcctcccaaaatgctgagattacagccttgagccactgcgcgaggactgatctttagaacatgcttttattttagtcaatttaaaactgagacttttaattgaaaattggcagtttaaattcaatagaagacacaccaccaccaaatcccactgccttgcagatgttggctgagtgtcccttcccactcaacaaagcctcactgccgcgcccacctcactcccagcactgcctgctgacatgagccactccctgggcacggggttcccaaaacatgagagtatccctgccaagctgtttcctcccaaattattttctgccctccctgtcaagccctcccccacctccaactcctatccccagccagagaccagcaggtgaaactctcctgtgctaacccttgtccgggatataagaagaggtgttggccgggtgcggtggctcacgcctgtaatcccagcactttgggaggtcacctgaggtcaggagttcaagaccagcctggctaacatggcaaaaccccatctctactaaaaaaaatatacaaaatttagctgggtgtggtggtgtgtgtctgtaatcccagctactcaggaggctgaggcaggagaatcacttgaacccaggaggcggaggttgcagtgagccgagatcacgccattgcacaccagcctgggcgacaagattgaaactccgtctcaccaaaaaaaaaaaaaaaaaaaaaaaagaggtgtctaaggctgtgagttggttttctttttttttatttttttatttttatttttttgagacggagtctcgctcagtcgcccaggctggagtgcggtggctagatctcagctcactgcaagctccacctcccaggttcacgccattctcctgcctcagccccctgcgtagctgggactaccggcacccgccaccacgcccggctaattttttgtattttttttagtagagacggggtttcaccgtgttagccaggatggtctcgatctcctaacctcgtaatccgccgcctcggcctcccaaagtgctgggattacaggcgtgagccaccgcacccggcctgtgagttggttttctgagtcacaaaatcataccagagttttcagagtccggtatacactgcagagcacataccaagaacactccaccagcaccctccaatcaagggacaggcttcccttatccttctggaaatattcttggattctccctcagaacccccaggcagctctccaaggctctatataccccatactatttgtttatgtacttgtttactccttttgcaactcaagccagtcctgctgccttttcatgcccaagcagcatctgtccctccccaagcactgggtggggctcctagaccagctaaaggcgccgagcatctgtgggtgttgcagcacaccagcccagcctcgcctagctctctgaaagaaagcctgcaacagaagggagagaagcggccccaagtgcagctgaaagcactccttgggagtcagccaagaccctccatccaagcagggctggatccttgcacttggccatgataaggagatgcttccaggtggcagcaagacttggccaccacagaggccttcttgaggccccccg

SEQ ID NO: 2657 - DNA, 2300 bp, Homo sapien
attaaattttaaaatagatacaaaaggataaatgcactatttcttgagagcaatggctttcaatctttattttgaagtgacctatattttgattcaatccagttcccccaacttgctcacaattgtgtaagtgaaaaaaaactgtgtctaaacaagtgcactattacttacccagagtatatggttctgttaactaagtgttctgtttctttttaaagcctggttaatggccgggcgctgtggctcacgcctataatcccagcactttgggaggccaaggcaggcggatccctgagttcgggagttcaagaccagcctgaccaacacggagaaaccccgtctctactaaaaatacagaattagtcaggcgtggtggtgggcgcctgtaatcccagctactcaggaggctgaggcaggagaatcgcttgaacccgggaggcggaggttgcggtgagctgagatcacgccattgcactacagcctgggcaataagagtgaaactctgtcaaaaaaaaaaaaaaaaaaaaagaagcctggttacaacccacaatctgatttcatgaaccctaatggttctcactgccagttttgggggcttagagtcacaatcacttgagtgttgggctgaactgaccctgttgctgattcagactcaactcatgtctgccagggaaacctcctttctgttacattttttattttctgtaaattgcatttaaaccacagttcttccaagaaggatttccgtctttaccgtaccattttattcagtatattgttagcgtttatatactatattcctgattgccatgtgtgggtacttcattttgatttcatgtctgtttactctgtccccagttggactgttaattccacaagggcaaagatcctatcttctgtttcattgagacgctcccattcctttcaattttgcaccctgtggacatttgaatcaatcatctattgacatgtgattctagcagggtacaggtgcttggctctgccatggcatttctctcacccttgtttctcatttgccatccacctcattttctatagacccaaagcttatgaaagaagaacaaatgtcacaggcccagctcttcaccagaagctttgatgatggcctgggctttgaatacgtgatgttctacaatgacattgagaaaaggatggtttgcttatttcaaggaggcccttacctggaaggaccacctgggtaagaatgatagcctgaaagtgtggatctaaaagatttttatcttacactgcccccatgtgtcctgtacatggactacaataaagattttcaaatggtcacatagatgtatatttattgacatggaaagatgtttataatacattattaaaggacatcttatctatattattaatattgattaaatatttttatatatgagcattataatattatagggcatagggcaatagagtataatttgagagcatatcattaatgtgttaacagtggcttgtcactgactaggtgggtagtattatgggtcctaaatttttttcttttttttcatatttgcattacctacatttctaaacaatgaatatgtatagtttgttttgttttgtgagacaaggccttgctcctttgcccaggctgaagtgcagtggcataatcatagctcactgcagcctcgaactcctgggctcaagcaatcctctcacctcagtctcccgagtagccagaactacaggcacatgacaccacacttgactaataataaaaacataatataaattttctaaattacattttagctttttgcttgcttgcgatctggttactattaagttctggttttattacaaatacttaagactatattattatgctgtgaacaaaacaaagttggggacatagatagtatttggcattcagtacactgaacatgggctaagtggacctttcataagtaaatagtgtgaagatgcttggataatttttctctttcaagaggctctctatcttcagaacttctgaaaacatttctcctccactcctgttgtaactagattcattcatggaggtgccattgcaaccatgattgatgctactgttggtatgtgtgcaatgatggctgggggaatcgtcatgactgccaatctcaacatcaattataaaaggtaaattcacagtaattctctatttatccttaggtgttgttaagtcaggttcccagttgcagatcttgacaccataatttgtgttcaagtgattattaaggaagtgctcccagaggagactagcaagggagtgggagaag

SEQ ID NO: 2658 - DNA, 2300 bp, Homo sapien
ttccattttctttggcctactgaaggacatccatctctgctagatgtttcgtatcagcatataaacatgccacaactgcatttctctcttcccagtctctctctctctctctcttttgttttgggtttttttgttttgttgtttttttgttttttttgtttttggttttgagaatgagtctcactgagtcactcaggctggaatgcagtggcgtgacctcggctcactgcaacctcctcctcccgggttcaagtgattctcccacctcaacctctcaagtagctgggattacaggtgcatgccaccacacccagcttatttttatatttttaatagagacagggtttcacaatgttggccgggctggtctcgaactcctaaattcaagtgatctgccccaccttggcctcccaaagtgcggggattacaggcatgagccactgtgcccagcctatcttgaacccactccctcaaaacagctcttgccaaaggtaccagtgaccttcatgttgctgagtccgctaacctctcagcttttggcacagctgttgactcctttctgtttgaacataacttctaggacaccacattctccacttcactggtgcctccttttcagtttcttgggctggctcttccccatcctcaaacccttcatgttggggtgccctcaagtctcagtccttagtactcctctcttctccacactccattggtaatctcatgcagtctctcagctttagagaccatccagaagttgacaacttcttaattaaatggttgaaatttagtgcctgggttcaaattctggttccacaatttaaagctgtgcaactttgagcaaggcactttacctttctgtgcctcagtttcctcatggtagatactttagtatttgctgaaggaatgaataaaacaaaaataaaactaatcaagaaaaattatagagttcttaagtttctttgcagaatctctgatatatctcgagggaagaattattctgttttataaatgaagaggaaaaatgtgtagtttgtattacttattctcttccaactgttagcacatcacacaactgactgtccttatcccagcacaatctggcttctaccctcacagctctactgaaatgtcttcattgaagccactagtgacggaagtgccaaattcagtgtgcattcttcagcacttactgtactagacctccctgtctcattctcattgaaacattttcttttggctttcataaacctttcagaccaatcttccctcctccttctacttgctccttaaatgtcaatgttttccagggttccattcctacattttgctcatttcttcatccaaccctcattcgctcttgactaaaatttgaccctctcagaatcaagaggagtttgagatcctctttgctacccacacttgttttcaaaccattacttcccctcatcttaaaaagccctctgggctgggcacagtggctcaacactttgggaggccaaagtggcagatcacttgaggccaggagtttgagacaagcctgggtgacagagcaagattctgtctcaaaaaaaaacaaaaacaaaaaacctctgtttctttgagtttataccatctaactttgtcaccctcctcttcttctcctccttgttgctgtcatctgtcaacctctccctcagtgttgagtatttcagcagctggtccgctatctacccaactccattcagcatcctcagcaactcgagcatctacacagtggctcctcagtttatgtgcttcctcatcacctatgaacttttcttatcccccagccccagccacacactgccatgaacatctcgagccttatcttcagacagtacacagcctccaaatgcatacatttaaacatcctgttttctgatgacagcatttttcctttcagcagcttacttgttcaaaggcccctcagaaacaattgttatttcattaagaccttctgagttcattgaatcctttactttctcatggtccaatagccctcatctatctgaacttttgtagcccacctaacctaggaaaaccccagccctggatgaatccaaccatctgccatctttactttgaactggctttcacatagttaagcattgctagagaaaatcaccccatctagcagataagtttggtgattgtgatttttgtagtttcatctcctgtctccattcttatcctcctcaaagcccttcttccactcaactgtcagaatgattcaaaatgcaaatctcatcatgttattccaatgctattttcagtgctat

SEQ ID NO: 2659 - DNA, 2300 bp, Homo sapien
agtaagccatgcaagagtgtggatgacttaactaaatgcactgccgctacttgaaaaatttagagttaaaatttaatgaagtttaaactcagtgtaactgacctctaattgccctaagtctaaggtcttttaagaagctgataggtgccgagtgcagtggctcatgctggtaatcccagcactttgggaggcaggcagatcacttgaggtcaggagttcaagaccagcctggccaacagggtgaaaccccgtctctaccaaaaatataaaaattagccagatgtggtggcacgcgcctgtaatcccacctactcgggaggttgaggcagggagaatcgcttgaaccctggaggcagaggttgcagtgagccaagatcatgccactgcacttccagcctgggcaacagagtgagactccatctcaaaaaaacaaaaggaagctgttaggtgagctattggtacattaatcatatagacaatcttagcagggttgaagtctataggtattgattgatttgactacactgtaaattgtaaatagatgcaattttaagttacctgaataaacttttctattcattaacagtagtcatctcaattttagagatttacgttatgctcgtgcctccatctgcacgcacaacatgggaagacaacagacaccaaagatactttggattcttgctgctaagtaagtattcaagcactacgtgcacgttgttacaattaataaggcaatctgaccccatccctgccaccaggaaactgcaatactattaatatattaaaaaggaagacaactgagataaagggaatgtgggaggttggggggggtgcttaggagatatcagaatacaacctcttagaattacagaatctcaacaaccatcctttatgcctgatcttcggttcagtagctctaggattccaaggggcccctcctaactgcattgccttctctccccaattccctttctctcagaatgttacaccttcccccagttaatagtgtaggcttaaaatgtatctaggtgttcttacctactgacaaactgctggagttgttcatgggaaaggaatcaaggcaaaatatctaatgcattcaggtcattcgagttttctttttaatttattgcttttttgagatggggcatcagtatgttgcccaggctgaagtgcaatagcagtatctctgcgagactctgtctcaaaaaaaacccattagagtcttcaccttaggatggactagggctatggcatactggtaagcatttaaaaataaaggggtatgatggcccggatttgcattatctgagtaatgggaatactccaacccagtccgatttcaaggtcccagtgaggttactgaattcgaagctcagaaggtatgcgcctagtattcccaccatacgaatacaagcgaggtaagtaacctcaaaagcatcgataacagtaaaatagttacaatacctgttacgcctttagtatccattaccttcgtttaatttaactgtcagtttacataacaaaagagtcttttaaggcgtaagcgcgctcctggggagggtatggggctgttggcagggaaagcagcttttcgatcgtataaatgctctttgtgcccagactgccctctataaatcagcactatcaaccctgtccagagacttgcccatgacctccaagaaaacactttattcatactactcctagcgtgcgctcctacccgccccagggacttcagtcttccgggggagggataactacttggggacacggagcactgcgtacgccctgggtcatgtgggaaggatgaccgcaaagcctccagtcggcgcgcgggttccggggctgaggggctgaggggcccaaggcgataaccgggatccgctccggccgcgctcctcttgcctttgagaagccccggaagtggcccggctgttggccgcagcgggaggtcttcggaaagaaaaggccggaaccagaagatagactcaacagcgatgccctacccggaccccgccggcctcacaccccggccagccagccgccagtagtgcgcaccgcctcctccccaagccccgccctgcgtccaccccaggggttaactcgcacgcgcgctcttgtggcggaggtagagtgcgccgtccagggctagagcaagcgcggccccgcggcccggagccatgctgaggagctgcgccgcgcgcctccgcacgctgggggctctgtgcctgccgccagtaggccggcgcctgccgggaagcgagccgcgacccgagctggtgagtctgggcacc

SEQ ID NO: 2660 - DNA, 2300 bp, Homo sapien
ccaaggccctgcagatctaattactgccctcaccggcagttcagtcgagaaacctctcctgcagactggcagccagaccaggtgtgactcacttcctcttggaaaatgccctctgagatggcacagttctccttttccttcagggagtgttctgtccaaaccatccaccgagagtatctgcaaccggccacacccacatggtctcacagctgagtcacaggcctcagaccactgggagaatcctggagccctttgtgctaaccacgccctgcagaagctcccgcagagacggaactgggtgggggcagaaaacggggtgggcttaatgcatcccagaatctggcttagggctcccctgtgctggcctggcttggagcgctctgcattccaccccagccaacaaggcagagctcctggtttcacttaggcagagctggactgaggctggacaggcagcagtgtccacggctaggggcagcgccattccttcggccaaagcacaggtggtgaaccaagtaccaaaggcacgtctgtctgtttcactgcaccgggccaaattaatctatgattggaagatccttcatcaagcctgctcttcctccatctctttctggttccacttattaagacagcaagggaaccctttcagtagagaaaccacgtcacacagggccctctcccacaaaccccagccaaactgctgtagaaagaaaacaagtggacctccctccctcagcaggaagaccctttccgtcgagcagacaacaggaagccccgaccagaaacgcctgtttggccgacggactaagggttacggaagggacgccccagctgcctactcgtcctacccgcgcctacttgggcggtacagccgggagcaggctacgaacatgcagacccggcctgcgagcggaacccaccaagaaacacgccagccagggcaggggcgtgtaggagggattcggtaacccgagagacgagtgggaaagtaggaaaggtgggagtaaagcaacgcaaacataaagggaggagggaagaggttcaggcgcaccaataccacggtcccctcctaaagaacaagtgccccctcctctggtccgcgtgggtctgggggcggccgcgcccgggccggggaggggcgctgctggcctcgtttgggtgtggcccggagcactgagcagcggattccccaccagccgctccccgcccagccccgcggtgctccggacgccccgcgaagccgggtgcagggttttccccgggcagcaggtccgggcctggggactacccaggaggggcgcgtgggccgggcggagctcaccttggccgaggcgcggcggacgctgggcgagctgggcgagctggacgcggggcggagaggcgagcgcggcgggctgtgcgccttccttagtacgtgcggcgggtgggtagagggaggcggcgcgggagcgggaggagcctggcgggcgctcggcagggcgctcccccagccctgtctcctccccctcttcctgcccccgactcccccgaccccgggcgcgcggcccacgccctgccctcgctcccggacccgcctcgcagaggcctcgcccgccccagacagagcgttcttgtaaacttctcttcagtagaaacggtcctgctctcgaatatttcagggcatccccaccctgagcctgcccttcctctcgggtttggttttagaaagtgtacaaatcaaagaacccggccgtcctgcgggtggggcacgctggcgcagaaccagaggtaaccggctctgcggccacctacgggtctaggaattacttgctggatgaccctgcagggagtggcacgtggagtcctatcgacctcagaggcactatcagattagccctaggaggtccgtctgggggtctcggcggcctgcgccagtggaggggcggcacctccccagaagccgggcttcccgccccaccggcccgcgaggtgccgcagggagggtgcggtttggcttgtcagcacccaggggcgtcacaaaccctttgttgaacaggggatttacccctttgtgtggcgtcacttgatcaatagttcagtttcagtgtggctaatagtgttaaaaactggccgggcgcggtggctcacgcctgtaatcccaacactttgggaggccgaggcgggcggatcacctcaggtcaggagttcaacaccagcttagccaacatggtgaaaccttgtctctactgatacaaaaattagccgggagtggtgatgcgcgcctgtaatcccaggagactgaggcatgagaatcgcttgaa

SEQ ID NO: 2661 - DNA, 2300 bp, Homo sapien
agctctattataatcttatggaaccactgctgaatacatgatccatcgttggctcaaacactgttatgcagtgaatgactgtacttaattttataatcagtatgatcacaattatgcaaatatttgttacatatgcataaaaagactagaaatatgaaaatgtttatctttggctcatgtatttataaatcattttttatacattgatatattttccaagccttctaagaatggaatctttgtacagattaaaaagttacaataagtgttattgttgtttttaaatttctacccaatgttgcttcctgcagaaattattctgtgaccactccaagaggacttggaagcccctcctcagtgttctcctagtatccaatagtatcctctaccattcactaagcacactggattttaattgtttgcttatctaacgcccaatacttggaactcttcagagaaagagactgattctctaatccctgaattcccaggcctaccacatacactaaagcactcctaaggtctgtggaccagatgaagaaatcagatgagtaggggtacgcaaacccaggcattcccattctaaacccagtcgcattgcaatccctgcaacaaaagggatccgagatttcctccactggtgactgtgacctggggactgggaagtactgtatacaggaagatcttgaagagctgtccccttgaatagtcagcaccagggttgcacggaaagtaatagctgaaatccaagttgggttttcctggcaacagccaatattagtcagaggtggcacttggaggattccccaggtctgctcattcctttaggatcattcattcctcccaaggcctcccttgggaacaaaggaaaaccccagagtttgggattgggctcttttccaccaacagctgctagtagtttgtatttaaccctgagtcacaattaaaataaaagagggcgggcgggggaggggcgaggagttggtaagcatcccctaggaaacacttaggttttctctaaatttattccagaaaattcttctaaaggacttttcaaggaccacagcatactgccttggaaacttagtttttaacctttttcttttctttttttcttttttcttttttttttttttttttgagacagagtctcactctgtcacccaggctggagtgcagtggtgcgatctcggctcactgcaacctctgtctcccaggttcaagcgattctcatgcctcagtctcctgggattacaggcgcgcatcaccactcccggctaatttttgtatcagtagagacaaggtttcaccatgttggctaagctggtgttgaactcctgacctgaggtgatccgcccgcctcggcctcccaaagtgttgggattacaggcgtgagccaccgcgcccggccagtttttaacactattagccacactgaaactgaactattgatcaagtgacgccacacaaaggggtaaatcccctgttcaacaaagggtttgtgacgcccctgggtgctgacaagccaaaccgcaccctccctgcggcacctcgcgggccggtggggcgggaagcccggcttctggggaggtgccgcccctccactggcgcaggccgccgagacccccagacggacctcctagggctaatctgatagtgcctctgaggtcgataggactccacgtgccactccctgcagggtcatccagcaagtaattcctagacccgtaggtggccgcagagccggttacctctggttctgcgccagcgtgccccacccgcaggacggccgggttctttgatttgtacactttctaaaaccaaacccgagaggaagggcaggctcagggtggggatgccctgaaatattcgagagcaggaccgtttctactgaagagaagtttacaagaacgctctgtctggggcgggcgaggcctctgcgaggcgggtccgggagcgagggcagggcgtgggccgcgcgcccggggtcgggggagtcgggggcaggaagagggggaggagacagggctgggggagcgccctgccgagcgcccgccaggctcctcccgctcccgcgccgcctccctctacccacccgccgcacgtactaaggaaggcgcacagcccgccgcgctcgcctctccgccccgcgtccagctcgcccagctcgcccagcgtccgccgcgcctcggccaaggtgagctccgcccggcccacgcgcccctcctgggtagtccccaggcccggacctgctgcccggggaaaaccctgcacccggcttcgcggggcgtccggagcac

SEQ ID NO: 2662 - DNA, 2300 bp, Homo sapien
caccccgttgcactccagccgcctaggcaacaagagtgaaacaacgtctcaaaaaagaaaaaaaagaaaagaactgtggtgtgtaaggcctcatgattgagttatggagtaatttagacaaatgattccttaatatgttgggatcataaatttttctgagaatcagatgaaagatgtggactcttcgccagaaaaatttctcttatgcaaaaaatttacatgtaactttaaggtattaaggaaccccagcagccgttcatgtaacaccccccaccaccaaaggtttgaagtctattacctggcacttgataagaactgtgagtcaaaaaggcatttagactcagtggctccaatgctttcaagcagggaaaatggtagagtgatagtacccttagcagagaagacagaaacaggtttggggaaaactagttattcctgaattattgagtctgaagtgcaggtgggactctcaagtggattcataaacaagtaactgaaaatgtgggtctggagtagctgagaactgagatggagatttgtctcacgtgctcagggcacctgtgagagcaggtgcagggaagcagttcacacaatgcctatagcccattatctttcatttgcgtctactctgcagtttttggagacctttctaagccctcactttacttgacagtcctaacaatcttatgaaacaggaaaggcctatctcaagacctattacaaataaggaagtggaagctcaaaggagtgacaagtctggtcaaaagtattgcaatgaagtaacagacacaagactggaacccaagtcttctgattcttaatacaactcctaatttcattgcaaactgcacacagataaatgccttactagcacggatcaatttttaagtgcagtagtttggttttcggattttgtctttgtggctgtcctcagtttacagaaaagtttgagagagaggggtggcaattgtcccttgacaataatccccagtaatcccgtggcaattgatttggcaatactcaccactgtttactgttaaatatcttccctgtggagcaatagagagccccaactcctaggaacttgtctacaattctgacccgcactctgtcctaactaacactcttggttttgttttttgtttgtttgtttttgagatggagtcttgctctgtcgcccaggctagagtgcagtggcgcgatctcggctcactgcaagctctgcctccggggttcacgccattctcctgcctcagcctcccgagtagctggaactacaggcgcccgccaccacgtccggctaattttttgtatttttagtagagacggggttttgccgcgttagccaggatggtcccgatctcctgacctcgtgatccacccgcctcggcctcccaaagtgctgggattacaggagtgagccgctgcgcccggcctgtttttgtttgttttttgagacattgttccgctcttgttgcccaggcggctggagtgcaacggcgcgatctcagctcgctgcaaactccacctcccgggttcaatcgatatttctgcctcagcctcccaagtagttggtattacaggcgtgtgccaccacgccaggctaattttgtatttttagtagagacaggggtttcaccatgttagtcaggctgatctcaaactcctgacctcatgtgatctacccgcctcggcctcccaaagtgctgggattacaggcctgagccaccgcgcccggcccactgctgtttccaaaagagaccttttttgcctatctaacctaaatgcccagaatgagctcatacatgggaaagacccacggacatggacagacttcccgaagactactgtgcaaaacttataattctaaaaagtcaaaaatcttcaggaatcacaggacggggtggagggggccggggggaaagaggagggaaaagagggaaaggagggagagtgagactgcttaaatcgctggagaggacggtgggtttatttgagtcttaaagctcagttctgtggttagcgccggccgcggtcccaggcccagcccgggaggcggggaggggcggggcaggcgcggaagctgtctgagtaaggcttgggcaaggctgggccgggaagggcgtgggttgaggagaggctccagacccgcacgccgcgcgcacagagctctcagcgccgctcccagccacagcctcccgcgcctcgctcagctccaacatggtaagcctcacttttcttcttcttcttcttacatgaaaagaaaaagaaaagaaaaaaaacccacatacttcccagca

SEQ ID NO: 2663 - DNA, 2300 bp, Homo sapien
tcatgattcagcctgtataggaacagttcattgctctagtagtggcccaagtcattgtcagacaactctgctccttagaaagttcttaagagctggagtctgctttttagaaagttttaagcattgattccagctgtattaccgggcattacacaaataagaaactcaaggtaatgaaaacactatgacttcagagacatactttctttttttttttttttttgagacagagtcttgctctgtcacccaggctggagtgcagtggcatgatctcggctcactgcaacctctgcctcccgggttcaagcaattctcctgcctcagcctcccgagtagctgggattacaggtatgtgacaccatgcccagctaatttttgtatttttagtagagatggggtttcaccgtgttagccaggctgatctagaactcctgacctaaggtgatccacccgcctcagcctcgcaaagtgctgggattacaggcgtgagccaccacgcctggcccagagacatactttcttgaaacctttcatttctgaatcctgactctgccattacctagtaaaggtacatatctgtaggcaaattgcttaacagccttaacttccttatctgttaaaagaggataataactacctaaaagggctgtgaggattaagatagcccatgtaaagctcctgacatgtcataagttttcaataaacattaattcttttctcttccacacccataaaaatccttcaagtatttgaagacagttattatgtctcccataagtgtttctttccaatccagccttgaatatacccagttcttcatgagactggcccatgagctccagagcaggaagatataacttactcaactctaaacactccagttcctggcatagtgttgagaaatagctggtactctggggatattaactaatcagaactaagatgaccttcacatgccaattccaattcccagaagtcttctccctttgggaggatgctgagaaattgtttgtaggtgtaaagtatcagtatgaatgtttttccccaaaatttagttcccttgtatgttcctcgataatcaggaaattcagaataaggtttttgctcaatagcaatgcatcccttagcttcagctttctcatataattacccccattcccaccccatctttaacttggtctgtgtcttttatatttgtttgcattgatctgtctatttcttccatcctttgacaaggagtgttttaaaacatactctattttttaaaaatatctaagaaaaccattgaatctaattcttattttattaaatattctctactaagaaggacccagatctaggagacaattaaaatgtttgccagttcagcatctcagactcacttctgttctcagcttgatgatttcaacatctccctttcccctttacagggagaacacagtaatatagattattggtttcaagctccttgtatagtaaaaatgtctttagaaagcaaatatcaatcacgtttttaaaatagcacaacataggtaagcaaggctttgcacaccaagcaagaatttttttttttttctaactctgcctctgggcaaggagagcaaagcattgaaacatctgaatcaactggtatctccacttttgtcacatggctaaatgggggcctttatttttaaacacatgattgacacccatctctcaggtttgggtcaaatacgggccatcttgtgggcagacagaggaatcagatgacttatgaggtccctgccagcactatgatttgtcagacagaaatgtaattatgtccttaggttaaaaaatgggggagggaagccaacactaccttgaagagccttcaaaactataatctgcaaaagtcagtaaatgaatcaagaaaccccctcccctttcttttgatgcatctgaagctaagatttaattgaaactgcctaaagaaggaaataaaattaagacaactgacaacagagcaggggagactggatttggtggtgatgtcaggtcattagacccagagggtgtctccttcttaactgtgcaattaggacctcaataaaaggttccagctcctgctgtcagctcacagcccgctgccccacgttctacctgctctcgcttgtgaactaggtaagtccatctgcttgagcatacttgggatttcagttgctgttttgcttatatgtgagattgcaagaggatttcaaaggaaacacactttaagtctatgtcaacccctattaataataataaactgggagcgccaaccacccaaatgcattcct

SEQ ID NO: 2664 - DNA, 2300 bp, Homo sapien
atctttctgatgatggaccaagagcaggaagggaggccaattctcttaggtttatgcaggtttttaaatattttcccttatactgaactgactttaaataaaagtgggtaggagaaccatcactgaatttaagatctagcttcattcagagaggagaaagggtttttctgttataataaatgcaatttggggtattttttcaaggctgttcaaaagcatggtgatggggggaattgccattctaactataattttagaatggttaatgctacttttccctttattttcatggaacctaaaaatttccagttccctttagggtttattcactataggaaagtaatggagtcatgtaaatgcatcccatcacctgaactgaggtttcccaatagatcacacacaggaggatacaaacaaaagcagacataaggcagtccttgcccaggttattccttgaagaacactcatacaaaaggctagtgccctctgtgagagagtgagcttccatgatcacatgattgcagtgtggtcagtgcttatgatggtcctatctcagaatccaaagagtaagagagctgcataaaaccctaaaaagaaggggaaaaatgagaagtcttcacccttcaccaaggaattgccacatcaagtttgttaactgagcccaagaaatagtgacagttctgacagtcctaggaaaaccactaaattgtagacttcagtgttgaagtccttaagaggcagaaattagcattgcttataattgtcttcccattccctgtcacttctaccttcctctgtaccccacatctaggatggcagcaagtgagggggcaaatagagttcaactccattatcatttagaccaatctgcacataaagaaatagccatcaagatttagattccaaattttcactcatgccattgaaggacgttcagttgcctcaaaattcagaaaaccaacacttgcctctgttggacaaaggaggagacaaaagtgcagagaagccattgaatcatttaatagtcttcataaattatgaaccaaagtttcatatagtctgaaatgtaaggaaggaagtcactgacaaccatggataaaatccaattccttacaataaaacagcactgaaatttgcaaatgatcaaccagattgagaaagccctgatggatataatgggctagaatgaccaattacctcaatgtacttccaggagaagcagactcaagtgtttaggtgtcataatcattagtaacttaggctgagcaggatgattatatctacaataatacattacaccagctctttttccccaggggcatcaatatgctaatgagaaaactaatgaacaaacttcatttaggtttaatgtctctaagaatgaaatttcacagatttcaagttttcttatgaacggtttaataaaaatatatttccaaggtacccttccaaactttactgaggaggcagtccccaatctgtaggaaaaccatcataagacccgggagacaaatgtaaaaatttttcccacctgcatttttagagaagaaactaaccaattctttacagctctctcattgccctagaattgaagcaactgcttctggcagggcttatgagcagctcaccatggactgtcacatcccatggagaaattaattggttttcatcactttatttcaaagtttctgcttaatcccaaactagagattgtatcttttataaagcaaatggcttagagtttactcctttgtaatgaagtaataatcaattaagattgtgaacatttaatacctttgttttattatttaatttacttttaacaatttaagaaaattggagattctgccaaatattctaccctcccatgttaggtggggctggtaccctgactgtcaggaggcaaggtctgtgaacctcgtgccaaatagctacgtgagcaaatagtgagataaacaagccatttgtggagacagaggtggagctgggcttggttaggaatgaatcaggccatcccacagagtgggtgtctccttcccaagttgctttccagggcacaattaaaacccctataaaaggcccagctcccagttacccagtacacttgcctgtggtgtcagcaagcactgtcgacttcttcctctggtgaagtgggtaagtcccattctgtgggatcgtggtcttctttatgattctccatttttatagctatttcagatgttgggatatggggggaggttccatgtgccagaaggtatcagtattttgcagggataaataaactatcactaactctatcc

SEQ ID NO: 2665 - DNA, 2300 bp, Homo sapien
tgtaaaacacctgcaatgcattttttgttttttaagaaattgtctctttttatagcaagggaaccaagtttgcaccatctcccactatagcaatgagatttggtccccgactgtgagtcagggcaaggaaggggtacagctaagaaggggctctctcacttcttaaactttctcccagatccagaggggtcactttccctctggaaatgctgtctcgtggtcattatcctaacggcaggagaaatcttgtttcttcttttaggttcacccgtacttgtcaaaatggctcaactcctgaatagcatactcagtgtgattgacgtattccacaaatatgccaaagggaatggggactgtgccttactatgcaaggaagagttgaaacaactgctcttggctgagtttggagacatcctccaggtaagatacacagacacacagccccatgagatcaagtgtgaatgactctgacacctgcaccagggttggatgctttgttttatttgggcttgctctgccctgtaagaaaaggaatttcaggcagctccttagtagttctctcccagcatacacacacacacacacacacacacacacacacacacacacacacctccttgtatctgaatttgaacaggagagagtataacttcaaggtaacagggaataatttctcagaagaaaacctaagattcatactttgatttctatatttagtgctatccacacatcttttaatgtattcatttagtgctatccacacatcttttcatgtattcattcattcaaccaataaagagtcactgagcacctgctctatgcccctaggcacaagggatacaaacatgaataaaatcagctccccctccctctaggatctcacagtgcagtgaaaaacaaaaggggctaaacaactaggatatagcctgtgatggaatgggataactttgaaatgaatcaaattaattactaatggagatgattttaaataaatgtatctactccctatggtcatgctcccattgatccagcaaggttctgagaaccagctgatcaaagactagcgccaagtccacaccacttcagattaatggtttttcaacctaggaaggtccgtgcagcaccgaatggattggggcatgaacactgatacacatcttagtatgcacaagacagcatctgattttgctctttgttttatctcctaacagagaccaaatgacccagagactgtggaaaccatcttgaacctcttagatcaagaccgagatggacatattgattttcatgagtacctcttgttggtgttccagttggtccaagcctgctatcataagctagacaataagtcacatggaggcaggacctcacagcaagaaagggggcaggaaggagcacaagactgtaagttcccaggaaacacaggcagacaacacagacagaggcacgaggaagaaaggcagaactcccaccacagtcagcctgagagacaagacggagattcccaccatggtcagcctgagagacaagacagagattcccaccatggtcagtctgagaaacaagacagagattcccaccacagtcagcctgagagacaagacagagattctcaccacaatcagtctgagagacaagacaaggatttcagctttgatcagtcagagagacaaagtcaagactccagctctggtaaaaaagtgagtcacaaatctaccagtggccaggctaaatggcagggacatatctttgccttaaatcggtgtgaaaaaccaattcaggattctcattatggtcagtctgaaagacatacacaacaatctgaaacacttggacaagcctctcactttaaccagacaaatcaacagaaatcaggctcttattgtggacagtctgagaggctaggtcaggaattaggctgtggtcagacagacagacaaggccagagttcccactacggtcagacggacagacaagaccagagttatcattatggtcagacagacagacaaggccagagttcccactacagtcagacggacagacaaggccagagttcccactacagtcagccagacagacaaggtcagagttcccactatggtcaaatggacagaaaaggccagtgttatcattatgatcagacaaacagacaaggccagggttcccactacagtcaaccaaacagacaaggtcagagttcccactatggtcagccagacacacaagatcagagttctcactatggtcagacagacagacaagaccaaagttctcactatggtcagacagagagacaa

SEQ ID NO: 2666 - DNA, 2300 bp, Homo sapien
agggatgataacaagactacaaaaggcagagaccctgggaaatgccaatagaagcactagatcttagacccagcagtcccccttcagaagttacatttcttcagtgtaccatagttctactagttatctagacttaaagacttggaatctcacctaatgttcccactttccctgcccctcttctaatctgtccccagacctcatccctttatccctgctattatccatctaccttcctatagttttgaactactgcgtccaggtcgaagtccttgtcacttctcacccatgccatataatagactcctaactggtctcactgcccagtactcctctgtccaatttatcttgtacaccacagtttagggtgaccaactcggtccagattgcccagaattatcccactgaaagtctcatgtcctgggaaactccttagtgccagacaaactgagacatctgaccaactacaacagagccattagattcttcctctaaataatgctttgattatgtcacttttcctagccaaaaccctacttctgctttctcattaaaataaaccctaaagtaggccccaaatctgcctcagagaatgtctcagaaagcatatcggtctggagtgaggaaacaagtaaaccaggcctggctttagtcatagcccgtgaaacccttggcaaatacagtcaatctagctgaacctcagtttcctcatctgtaaaattaagaggctagatttccctttcagttccaaaattttctaagtctactcttttaaatccctctgctcttttaaatccctctgctcaacacagacttaccagctcactcgaatccaaactctcaccttagtacctttgattcttcccttctccccactcagaagttctttgctttcttctctgcccacctgaatcctttcaggaacaacatgaagctcacctcctaagggacgtccaggcccagccatgaggactccacatgcgcctaggtttctaatactcagcacttagcatgtcctatccctggagttcaaaatatttttctatgtgaagcttctttattccaactaaactaaaatctttctgcactgttgtgattcccttgtagaatcctgaacacatagtaagtaatagttagtgttattaataataatggattggctgatggatacataggaaaaagtccaaacagggatctagatgtgagacaaacgtagaaatacaggtgagtctacagctttttgcaccttacatacaattcttcagtgcttccataatccaataattcctttaccccaaaaatattcactaagaatttcccatgctcaagacactgtgctggcatccaagggcacggagatgggaagtgaacagaagctggggtctctagcagcatttctctctcacagatatcataaacttccatgatgtccctcaattcaaactttttagtagtaagtcttagaaggcttaagtggtagaagttgcaccattggagcccctcatccccaaaactgaccatgtatctacttctcccaactagcctgtggagctgttaaatgaaaaaataatagtaattcaaaataagttaataggttaatagccaaatatctaccagcacaagaaaaaggttagtctaaaagaaacctcttccaggaactatattctggccaaataaatagaatctctagttccaactttgacatatgtttgtaagtgaccacatagatagcattcttcagtatgagctgactgttgccctctattagtattggcaagtgacatatattaaggatgaactcagccaacacctctgtcttttgggaccctcacagcacaaatacatacacatacacacacattctcttaattaaatgggactgggacttaaacagcgtcacctactgtagtgacaaacaggttcatgagcaagtgggggaagtaaataaaccaaacagtttgcagagggagaggtcaagctgggctgagctgggctgggaccagagtgattcaggctttgccacagaatgggtgtctcctgggatggcctggtaggataattaaaacccctataaataggatgagtttttaggtccccagtatcctctctgactcctgaatcttctgctccttcctcctcaagcaggtaagacatgcataggggagcattggtagtatctacaaggctctcaagagccctataatgcaccaggctggggaggtctgagacttaattcctgtgggtaacagctttggttaccttctgcttcctttttctggctctatctgagaatatgacaa

SEQ ID NO: 2667 - DNA, 2300 bp, Homo sapien
gtgaagaagtaaagctacagcaatatgcccagtgaataggtcctagggtgagccctcagcactttggatactggagtcaagccctctttcttctgctgtcctccttgaagctccactcagtgtcagagagggaagactatttaagatcacccaccatattagtaggatttctcagaaacagaaccaacagcatgtgtatttatagaaagagatttattacaaggaattggctgatgtgaatatggaagctggagagtctaaaatctgcagtgtaggacagcaggctagaaacttgggagagctgattatacacaatcctaaggcagtctgctggagaattttctcttgctcagggatgctagtctttttgttctattcaggccttgaactgattggatgaggcccaccccattagggagggcaatctgctttacccaaagtttactgatttaaatgttaatcccatctaaaaatatcctctgaaatgtgaaagggaagttcactatgccaaaagaaaaaaattaagcagaaggtaagtcatgcaagcaacggcctttccttttgttcctaggcccatagctactgataaaagattaaatatctccactctatgttcaccctaccttgtgtaaagcaccgatttactgagcatgagacggaaacataattgactattcccttaccttcttctccttttatcttgcaatatgtggatttagtaatgtgaccctaccctccctatttcttctccaccctgctttcaccctttaaatattgaagtcctaaaaaattatcattggggaaagcacagacctgtttctggagtggtccttaaccttggcaaaataaacttctaaggtgatttgagacccgtctcagataatttttggtttacaaaattcacacataaaattaactaccacacccgttttttcccttgattgactctgtgagactgagttttctcctttagtcatctgagtaccaccttcaagatttttgcaatatctgtgtatatataataataatattcttatttatttatttagagacagagtctcgctctgttgcccaggctagagtgcagtggcgcgatctcggctcactgcaacctctgcctccaaggttcaggagattctcctgcctcagcctccttagtagctgggattacaggtgcgtgccactatgcccggctaatttttgtatttttggtagagacggggtttcaccatgttggccaggctggtcttgaactgctgacctcatgtgatccacccacctcggcctcccaaagtgctgggattagaggcatgagccacaatgcccggcctaatatttttgaaccaatgttaactactcacttaagaatttagccttacactaatatttgagataaccggtttgttgggctggttttagtattttctaacacaaataagaataaatactcaaacattcttaaaaagtgcatgtagcacttaagactatcttggtactccatttgggaaaccatgtagccaaggctgttggggcgaaccaaggtggtgggagtccgacgggccagcagggggcgcacttgcaggtcacctgaagtccttatttacgggataaggtggaggctgaggaaagtctttcagaggccggacgctggcactggacggagtagggaaccctagccgttatcccaccaaagggtcccagcgcctagaggggctgcggaaagctcctacaatacgaggagcccttggagcccagagcgggatcctgcgagccgaggccccgttctctgttaggatcacggggactgccccaggcagctgctgggcccggtcgcggacctcggccagaacatcctcccagaacacagaggaatctgacatcagtggcctcccttggtagaggtggggagccgaggggcggcagtgtggaagggccatcggcctaggtctttcgtatcccctccggcctctcggggctgtgcgttcggaaacagcgaaaggaacggcctcaggaatctggcctcagccggagcactggtgaacacaggctcccgtcgcgccaagggaagtaggaaaagctgcttccgggcggaggggctgcacttccggggcccgcgtcccccggcggcttcgccgagaaggggctttgggagcttaagggcgccggcacgcgttcccctggcgcagagctcgctagccggggcgcgggctgcctccttgttctggtgtgatccgaatgtaacggagcggactttgggatccagaaccccggactgaggttgtgcttggcttgaggggcgg

SEQ ID NO: 2668 - DNA, 2300 bp, Homo sapien
aatatatgatatgtgaaattatatgacattcaaagatcagtattgataaataagttttactgaaacatagccatgctcatttgtttacatatcatctatggctgcttttatgctacaatagcagagttgagtagttgcaacaaaaactatctgtcctgcagagataatattttgtaccatctggccctttacaaaaaaaaaagtttgctggcccctatttcaggagaacactagccccaagagcacgttcacctggaatagtcttctctcacaaccctctcctcccttcgtgacaacagctggttcctgcaggaaatcagtcttcactcagcaaattccacccccctttactcccacagtctcagccacacctttaaaaagtcattgttctgatgaagcatgaaaacctggcccaatcagatgtccagaggaaacacggctacagaatggatactgactctgcagccctctgggcaattcttaaaagaaaacacatagcctaacaatagttgaatttggaatcatgtaatttatcacttgccaacagttgctaccacaccttctcaaatcctgatgaccatattgcacaagttttaagtccatgtaacttcacacaccttcagtgaaatttgtgttatatgttcacaatggaagaaatgcagagcgagggcctcagaaaaaagcagaaagccactcattgattctcaatgctaagattccgtttatattcaggtaaaatcatgtcctctgaggcaaagatggcaagagagagggcagaccctagtcctcctgtgaaaagatggaagttggccaatgcagaggactatagtcttgatccttgcttctctttcaaatgaattcaaactgacatttattggagaccgttatgtgacaagcagtatactaggtctccaaatgacataaggataaataatgtccattccttattctcaaggagctcatagcctagaaatgaaataagcccatagacaaatgtgtgtgtctgtgtgtgaatgtgtgtgtttgtgaaaggcaaggatatacaacaaataactaacagtagttatttttggctagtggctttaaaggtattttgattttatcttatttgcttatcaatattttctaatttttatattaaacaataattgtatagtaaaacaatttttaaagattacaatatagtatgattgatacaacaataaatatgaataaggtacacaattacaactccctcttgagtaattcaggaaagattttctatgggaagcctaaattggattttgaagaataattagttcactaggcagacaatgaggaaagacattctaagaaaaaatatgaaataacatatcccatggtatattgaggaagtttgaaatattactagttaattactgttggagtacaaagagaaatatggaggggagaaatggagctggaaaaaagccacagcccagatcatgaggaaccatggataccatgctaacaagcacgcatttcttcctaaggttatatggtgtttgaaatgaaagctatggtgatgaatggccaataaggggtctggtaaattgaggtacttaatgagttaaaggatggcctggagccattatccaattcaaaaggtaataacaataccaaagatgacactttggctggaataccatttaagaacatttagcttagaatgggagagtttgactagatgatctttacagtccttttaatcatcaatttccatgattttttgacatttgggccatgatgtccctgcacacactccattcaacttctattaaaatccacacaatttgttgtcaatatattgtgctagatagtttgatgaatacaaaaacaggcctttctgcagtgtcctgaccctttggcaggtggggctgagagtagcccagatttgggaactgctaatgcaatcttaggtgaacctgtaaggaagtcaggaagaaggtaaacacctgggaggtggagatagaggtggagatgggcttgtttaggagtaaattaggacatctcaaaattagcaactcctccctaagagggaccattattccctctataaaaaggccactctgcccaactcgcagcaccctgaaagctgtttctgtctctaccctacttgttcctctggtgagctaggtaagtgagcagttcaactccgctcaagggtacttagggctataaattatgaaagtccaggatgtgctctaaggcaaagaggcactagatacaaggcttctttttagtatactctggggaactttggtataagtttaaatttactg

SEQ ID NO: 2669 - DNA, 2300 bp, Homo sapien
ctttcagatgtcaaggttcccaagctcaattcctagatgccttttcttctcttaagctttctcaccacgctggactgttctctttcactcctaaaattatttcatgatcttgctgggttagtctttactttgtgctctaaactttctggcatcttgaggtcttcggcattcaggcactgaagcctaattttgacatgtggaagtgaaagcagaattagaaagtaattatcaaagagtcctcaaatggttagaggatgtataggagagtgaagcatggggaaaaatacaagtcagcctttggaggggatggacagtaggacagggagagtagggaagaagcataaggtattctacttctgactggctgtctgcatcctaatctgtttttttctgagtttttcattgaagtaatatatatataatacttgacatatgtatgtatatatgtatatatacagaaaagtgtacaaatcagaagtgtacagattggttaattgtctcaaactgaaccatccatgtaaccaactcccagattaaaaaaacgtaatgttactagcacccccagaagcccccacctctttttccatccaggcactccccactctctcaaagagtaataattatcttgacttctaacatcataaattagttttacctatttttggattttatataaaaggaatcatacagtgcttttatatctggcttctttcacctaacacccatgtttatgcatgtagccacttttcattcattctcattgttctattgtattacattatatgagtgtggtacaaatgatatgttctttctcctagtgatggctatttgagtaatttccagtttttgacttgtaaaaatagtgctgctatgtacattgttttatgtgtcttttggttaacatgtgtatgcatgtctgttcccttctctttctagtgtgctgacagcttttaatcacagttcagtaatgaatttagttataacaatgaatatttatttggttatcagcaagtggcttattgagtatatttccaagtgaatacatggaaagtgtgaggctaaggcagagaagcagtaagtcataatattaaccattggttatttatcagtgttgttaatattaaccattgactgtttattaatgttgttaatattcttgcaaatccagtcatttgaactcctgacaacagagatcatgtcaaaaagttcaagtttctgagtcctggaggccagagaatggagatagtctatattcctaaccagaaatctcttcatcatccgtgtatcacctaaggatgcaatattttttagtggacaggaatagaagctttggcattttactgcctgggaataaaatctggtactattgggaaagattactttattatgctttaattttctcatctctaaaatatacatagtaacagtatctacctcaacattattagaagattaaattagttaatccatgtaaaatcctcagtagaatacttggcatatagtaaataatcaacattatataaaactctatagtggaatgtgctacaaggtgtacagcagcagttttaggttccagaattataaatctaggcctgtagtttttaattctttggagaattgtggccagcttttataaaattaggacacctgaaaaagcaagaaattttagctcagaaattaaaaaaaaaacctttagctgaatctcaaatgaaataagtgtatgtgctccttccagcttgggaaatggtgggcttggtcagtattagtttaatcgtattttttctctcattttcttctatattcatccaagaagcttgggtacttataaaatgcctaatgccaaagaataaagtttaattttggaatgagctaaaattctttttggaaatagctgcagtttacataaataaaataagtacttgaattcagtgcagtgccctgggagatggcaagctcttaagcactttacgctctgtgggatcctgaggtaaatctaggagctttattctcaaggatattactgactcatccccagttgactttgttccaaattgggtattgagtctcagtatcttatagtttactgtttttttctttgtagtaccttggagttgtggaggcatgtttataagcagatctgagttttgccacactggaatttatttattcattgaacaaatatttaatacctactacaattcttagccgtaagtatttgaaatttatgatatgagtttgacccgattcctggtttggttgccactggtgaaattctgatttgtttgtactctgttttgtct

SEQ ID NO: 2670 - DNA, 2300 bp, Homo sapien
cttcctcctctccttgaccccgggtgtgcacgaatggtgtcctgaccctcttgggacgctgagtgcctggagctgtctcgtgcctgctcgtggtgggatccttgtcttcgtccagtgctggtcctggtccgcccatgggcagactcagactgttcatgagtgctcacctggtagatgaaagaccctgaacgtccagaccttccccctgaccagtcacgtgcggactcttggtggctctgctgatggggcccatcctgtccatggcctgacactgactgtgtgtctgactcctctgaatgtccctcactatcactggcctgactaccactggacccccagtgtccactgtctctgactgcagatgaagcttgtctgcgcggaatgcctgagtgtctggagctgtctgctgactgctggtggcgggatccgtgtctttctcctggacttgatcttgcctgttcatgggatgacgcagcctgtccaccagaggaagtctctgcgtgaggagttcctgattgtctggagctgtctgcagagtgcccgtgaccggctctgtcttcgtgatgggacctggggtgtctggagccatgtcttgactgctcctgagcagatccacgatggtttctggaagcagacccagaccacctctcagagtcttctgaatgtccctcactgtcactgtcctggctaacactggatccctggcgcctgcttgtcctggacccctctgattgtccctggcctgcctgtgagtgtctagagatgtcggcatgagaggaagcttcatggtgacgtgaccctgagtgcctggagccgtctcttgattgttcctcattacgtgttgttctgcttgcacttctggatcctgactgcccacgggaggcatcagaccttccctgggatgtggtgtggctgtgatgggaccctgagtgtccagacctatctaccgattgctcgtggtgggacccctgccttcctcttctgcttgaccccgggtgtccacgaatggtgtcctgaccatcttgggatgctgagtgcctggagttgtctcgtgcctgctcatggtgggatccttgtcttactccagtgctgggccctgtccatccatgggaggactcagactgtttatgagtgctcacctggtagaggaaagaccctgaacgtcgagacctttcccctgaccggtcacgtgcggactcttggtggctctgctgatggtgaccagcctgtccatggcctgacactgactgtgtgtctgagtcttctgaatgtccctcactgtcagtggcctgactaccactggaccctcggtgtccactgtctctgactgcagatgaagcttgtccgtgcccagtgcctgagtgtctggagctgtctgctgactggagctggtggcgggatccatgtctttctcctgcacttgatcttgcctgttcatgggatgacgcagcctgtccactagaggaattctgtgtgtgacgagtgcctgattttctggagctgtctgcagagtgcccatgaccagctctgtcttcgtgatgggacctggggtgtctggagccatctcttgactgctcctgagcagatccatgatggtttctggaagcagacccagaccacctctcagagtcttctgagtgtccctgactgtcactgtcctggctaacactggatccctggttcctacttgtcctgggccccgatgattgtccctggcccacctgtgagtgtctagagctgtcagcctgagaggaagcttcatgatgacgtgaccctgagtgcctggtgccgtctcctgattgttcctcatttcgtgtttgtctgcttgcacttctggatcctgactgcccatgggaggcatcagaccttccctgggatgtggtgtggctgtgatgggaacctgagtgtccagacctatttaccgattgctcgtggtgggatccctgccttcctcctctgcttgaccccgggtgtccacgaatggtgtcctgaccctcttgggacgctgaatgcctggagctgtctcgtgcctgctcgtggtgcgatccttgtcttcctccagtgctggtcccggtccgtccatgggcagagtcaggctgttcatgagtgctcacctggtagagggaagaccctgaacgtccagaccgttcccctgaccggccacgtgtggactcttggtggctctgctgtctcagcccagcctttccgtggcctgacactgattgtgtgtctgagttttctgaatgtccctcactgtcactggcctgactaccgctagacccccggtgtccacgatcgct

SEQ ID NO: 2671 - DNA, 2300 bp, Homo sapien
tgggtgccttatcagtatcagttccctcatctctaaaatagaggaataataatgacctcaaagggttgtcctgatgattaaaattaatacacgcaaaatcttagcacattcctagcacataatgggtatacaatatagattactatcattattacatcatggtagagacaaaaatgcaataactactggcataaaaaaattagacccaagaagaaaaaaggagaaaatgaatatctgtgttctacagatgttaaccaatactccacaaaagaaagaatcaatggtctaataaggttaagaacgaggacattaaacacagttttaaaaactcgggcatatttttatctctttgactctgaacaagattggcacacccttgcatcccttatttgatcatgtcccaggcattgctgtagggcccaaggacacaaaggatgactcagacccagtcaatgctagggtgagaagaaacacaggattcaaggcaccagggggcagggggcacacatataaataagtaattaatataaaatatcaccagtgctattgagaggtaaatacagagtatgtgagggaacactgataaatctggagatgtcaggtaaggctttatgcaggaggtggtaattttgaagaatcttaaaagataaagagaagttaaggatgagggtctctcaagtcaaggtagtggaggatagcacgcaaagattttgaacagtagtggaccaatatgggctcgtccaagaaatattgctcattctagagtgacttttccatgagatacaggtaataagagggacaattgaaaagatacagattcatgcctattgtaaaggggcttgtacgtcaggtaaaaaagtctgaaattctgcaggcaagaagaaaccagcacagcgaatgacataagatggtaagccagcttaatagtagagagagaggctagttacgacacttttttttctttaccaatacccaattgaaagatggtcaggtccagaactaaaattatagcactggaggtagagaataggcctacataacaaaatctaagcctgagtataattgatacgatgtgacatgagcatgaggggttaaggaaaaggagaaatgaaaatgactttgtctagcttgagacacccagtgtgtgggggcatcattaccaatatatgggcttctggaggatagtacattttggtaggaggcacaatgtaagttcagttttcaacactatggattgagataaccatgggacatccatatggagatgcaatctgctcaacataacagtgtgtatatcataagacagaccagggataggagtcccctgtatatttatggcaataaaagaaaattcatggtttaagaaggaagagtatgtggaacatgtctctgatgccacgatgtaataaccttgaaaacaaagtaaaattacactaatgagtcttgcctaattaaactcatgctcctagtgatcaccacttctagttcaattgttcacattcttgctctgctttgaaaaattaaaattaaatttgcctatcctctactgaccataatttctagaagacggcattcatctcatggcaagttcttcagtacccaaagatggaatacatagattaaaaaagaacatatatgtagatgcttgtgatgttttcctatcataaattgaatttcaagttcttataaacgtattaatatgtcctactcttctagagacaaggatcaggaagtgtatttatcaatagatatttaccaagcacctgtcaagccaaagtggggttacagaaaagtaggtatgggccctgcacacaaacaacctgtattagccaaagggacccttccataaaatttccaatatgtaaacccaaatttggaacttgctgaaacaagtacagatgagtacgtgaggaagctgggaagtaaacacaggttgctggagaaatagaggtggagatatgggtggatctaggtttggttaggaatgaatcagaccatcccacagagggtggctcctccctgcatggggcctgctataaaagggccattatctcagccttcagtacccagcaggctccttcaggctacattctatttgctcttttggtgaacaaggtaagaaggaatacatttaattttgtctacttactattaaccaaggtggaaatctgaatgtatgtgtactgtaaggcaaaaggttctggaagtttagggtttttctctttctttttagtggcactgtcactaaaaggtttatttctatatagaaggaaaatgagggcataaatttgctttccatg

SEQ ID NO: 2672 - DNA, 2300 bp, Homo sapien
atcttaaaaactgagttcccagccatgatggctcaggaagtcagacatatcttgttatataccctcccttttgcagtgtttagacacaactggccagcattgatgtgaaaatagagaatgtaagactgatagaacagactctttgtggcagtaagataccaaattgtaaacaggagctaagaccatgccagtcaagggttaagtcacacacttctgcacttaaagaataaactatgttctaaatgccataaggtttctatttttcttcagcagctaaacaagcactggccttcaggtaagcaatatgaaaacaatttgtagctcattcactgccagacactgactccatccccctgtttcacaaactatagctacagctttgattagacgagaggctatttcaataactttctcctgataagaagaccaccgaccgtggacggattctggccagtttacaaaggctgcatacgtgagtgcgtttgtgtcctgaaacgaccttataaagccttattataatatatttaaatgttaagtctccaccccaaggtgaacattggtcagatgtaatatgtacatttattcagtatgtgtgcattaggaggaccacgaatattcatggctccttctgtaatccattgaatatgtttagtcaacccattcagcataaagttcctatcccaatccctcctcttttgaagtacctgcctttctggcgtcagccagaggccaggcttcccagcttgtcagaatttgcctgtcaactttgcaactgtaaccctctatgagaaatataactttcctttcaaaatttataaattgtgtaatttttaagttaacacccctctagaaaatgattcaattttccttgtctttcttttcctttgtcttctgaagtcagaaatccagaatctgtttgttcttaggtctcagcccttttattctctcctatgctttcaccaaggatattctattgtagcagacagttatgtgagcttgcaaaattaaccattcatagactttggccccagagtttttgctgacttgagaccatcagcactcaggatatcaattttttttttaaatcctaggtatagagatgtgagttaatcatattccttatttcatggcacattgtaattattgagctatgcagactcttctgtggaagagttggttaactttcatccccattctttattcccagtcctctcctcctccctcaacagataaattattctaatgagtttactgtatatggcttaacttgtacaggtgtttgtaaagtatctattgttacttttatgttcatagagttttacttttatgtaagtgctattttttttagatctcattcttttttttacctttttttttcatttagtatccatgttgcagtatgtaagtctagtccattgcttctaattgtgctgttgttttgcatctactcagtatacctctgcacttccctggtgatgaacactcaaattgcttctaattaattcctcagcactaaaaataatgctgcgacgaacatcctcttacatatgtccattatggatctctgggagacatttttgggggtcataaacacagaagtagaatttctgggtggtaggctatatgtatacttgatattgactagatactgtcagataactctccagaacagctttactttcttaccaggagtacatgagatttcctaaacccacatcccagccaacacctagcaatatctagtttcctaactttttccagctcatttcactgttattttgattttgatttcccttatccatgagtttgaacatctttatgtatatttgtaagccattttgattaccctattctatacattgcctgttcaaatactttgtccatttttctgttaattttcttttttactttaagaagttcattgtatgttctagacgttagtacattgttatttttagacactgcaaataatttcaatgtgtcttctctctgttaactttgttcgtggtgtctttcactgaacagaaatctttaattatgatgtaataaaagtcatcactagttttgtattatgtgtgcctgtaaagttctatctacaatgttctttcctgtgctgagattactaaggtattttcccatattttcttctctttactttgttgttttaagcttcacattcagatatttatttcatttgcagtctatctttgtatgtgactttaggtaaatatccaattttgtttttatctatggcatgagccaggtttgcaactccttctattaatctgcccttttcccat

SEQ ID NO: 2673 - DNA, 2300 bp, Homo sapien
ttctataatttgggagactgaggctgagaagattagataattgtacaagaaatgcagtaagaggcaaaattgagattagaacttaggtctttctgactataattttatccattatgctaagcaagtagaagaggaagagagacctaaatgcaaagaatacaaaagactgaataatggagttctgaactatggaggagtttcagagttctcaactataatgctggagtgacagtgcaaaaatgctttaaaattctgtctcagtgtggagtctggggcctgaaagtctttctgacacagcagccatcttaacaaaaatgcacttccaaaagatgcatatgattgaaaatgaccatagtatccaacagcaaccataactttctgtgtggttgttttggtctaggattccttggctatgtgagcaattgacatatttcaagggcctattcattaacattttatgaacagacactcattcttagtgtttaccaagctctaggtgctgcctagatggtggaatgaataagatatgatgactggcccaaagcaatgcccagataggagtttattgactccatatatgtagaatatatatggttaagtgctaggctttagcatcggctagcatgtgtatctgttctagtgctgctactaactagctgcgatttgtaacaaatgtttacattgctctatgcttttattaccttatctataaaatggggttattttgaggaataaatagataagcatgtaaacctaccatgtatagaagatagtaagcacttagcacttaatggtagctgctatcctcctcatcatcatcattatcacctggtagcaaagtacagcagaattggctctccatgcttaagacttacagctctctgattatttttgttaccctcaagtgtatttgatatactttctgtacataagtgaacattttcccaagggtccaggccctaaacatgccagactaccagtggatcgcagagtgctggaagaaagctcactctaaattcaccctgaacatatctgaaaacattatttttatatatagccaattacacttttctagcctagaaatgagccttcacaaggtcagagaatgtttcctctcttcctaacagcactctgtatgttacttttttatattatttgcgtttgagtgggccttacactcctaaaatggtgcataatttttgcatgatagttatatatgataaatacacagaggtaagttagtataatggtaaacagcaattgcaataaggtagatacaggttcaacttctggtttctctgcctactagctatgaccttggagaagatccttatgcttccagaacctgtctctataaaatgggataataaatacatatctcgtatgaaggttgtgaagattaaatgaggtgataagatctagtatttggtaacataatatggtaactatagttaactatttattgtatatttttaaataactaaaatagtagaattagaatgttcctactacaaagaaatgcttgaggtgctggataccccaattactgtaatttgatcattacacatggtatgcccatatcaaaacatcacatgtacccaacaattatatacaactatgtacccataactaaaagtgcagattttttaaagattgagatggtttgtttaaagtatttagcacatagtaaattctcaataaatgtcactttttattattacaaaaaagacatgaattagatgaacctagtggctcaggttcattttcaattaaataagcatttattgtgcaccttccaagtatcttacactctgctactttctgtgggtactagttaaaagaaatgtataacatgagtcctctaaaacaaagtctgtgcttttcacatgtatatgaccctgaaaaaaaaggtatcttgcaaccatgtcctcgtactggaaggtggggctggtactagcctttctgcaatcatctgtagataacaatgtgaaggaggaaggtaaatatgtagaggtggagttaggtttgatggaaaatgaatcacctcattcactataatcactataagctatataagggtcattatcccaatccatcgtcaccctgcaagctgcatcaggctttatcctacttgttcctttggtgaaccaggtgagagaaaattcatccagctacatttatgaatatttggtgttgtccatagtagaagtctagggatataagctaaggcagagttcatgtatattttgcctttcttttcttttttgtttctttctttcattttcttttctttttgtttg

SEQ ID NO: 2674 - DNA, 2300 bp, Homo sapien
ataatacctaccaaatattcatcttctagatacagcctctggcttgttacttccctaacttaccctcagttcccaaacctttctggaagttctaagccccatcagaaaaagcttcaaacaccaccacagaagaaggtctaatcggctctccctcttgttctccaacttcaccctctcatactggccttcttctaactctgatcaggcagaagcaacctcagccccctcttgctcccaaaggttgaagcccctactctgcttttccctggctggtatgcctaccccaccttcaccccaggactggagccaacctgtccccatgtagacagatctctccaaacacaaagcctgcatcctgccctcctgcagtctggaactccccagtgctctgtgccctgaggggaagtgctggaggctgtgctgttgctacagggctgccctcaatacaccagtctcttcaaccaaggcccttaccatgccttcctatcctgttgttccctttcctgtctgttgcatgctgatctataagtgaggatggtaaagatggctttcccttccagagtcactcaggaagctacacagtatatattatctgcaaagtgccactcaagagcactctttgggacttggcttctgagctcagaaaacttcctcctcaggaatggttcttcatgcattgaggataagtgtgatgttcataaggtgccaaaactcaatgagagaagaataaatggcagcatggtgcaacagagagaacacaggcctggagtctgaggggctctagtccagcaccgtctccgcttcacagagtggctacttctctgaggatttctcagtgttctcatttatgaattgggcttagccataccacctcagaggattgctagggagatcaaataagatgagatggtaatgaaaatggaataaaatcaaatgaaatgaaatggcaataccattatcattaacctcttggggacttacccctgggatggccaggctatagacttcatgagagttgaaactgctgccatcgtattcaacactgtattcctagggccttagccctctgcctgaaatggagcaagctttccataaatatttgctgattagccaccagttgagtttcctgtccttgcaatgaggagttaccacatgatcatggtaagccttttttctcatcagctacaaaatgctacctacccatagcatggggtggggaaggtattaactttttttgttttaattaaaaatgagaccaactttaaagagatgaaactggctttcttgtgtctcatacactaggtgtgaaaggcacttacaaaacaagaattcaaaaaatgttctaagtaataacagttctaagtaacatcaccacaaaaacatgtgtgccctctcagagtggctactttgtaaaagttaacctcaatagatatattcttgaacatttatattaaaaaaggaaacagtggccaggcacggtggctcacacctataatcccagcactttgggaggcagaggcaggtgaatcatgaggtcaggagttcaagatcagcctgttcaacatggtgaaaccctgtctctactaaaaatacaaaaattaactgggcatggtggcaggcacctgtaatcccagctactcaggagtctgaggcagggaattgcttgaacccaggaggcggaggttgcagtgagccaagatcgcaccactgcactccagcctgggcgacagagcaggactccatctcaaaaaaaaaaaaaaaaaaaaaaggaaagagtcccataactttgtaggctcatagagacaaagaatgttcaccaggaccccagcctgtaccaagcactgctgagcccatcacaatggaaagaagcttccctgtcaagaggactcagctacagaaggtaccaaatgtggtaggaggggcctgttaattagaccaaggcagtcacacatcagcaggtaaaacagagacaagaggaggtgtggctgggctgggctggatcttggatgaatcaagccttcccatagggcaggatatcctgtctaaaacaagagccttggttaaaacccctataaaaggttctcatcacactgacctggtactcctcacaccacttaacagccacttgtttcatcccacctgggcattaggtaagtcccctcataagaaacctctttctcattctcagtgtcttggtgatctgagctcataaaactggggcagtcaggtatggactatgcatccttcagagctagctgtgagcactgggcaaaccaacgctaccgttgggaaacatgctc

SEQ ID NO: 2675 - DNA, 2300 bp, Homo sapien
gtcaggagatcaagaccatcctggctaacacagtgaaaccccgtctctactaaaaatacaaaaagttagccgggcgtgcgtggtggcaggtgcctgtagtcccagctacttgggaggctgaggcagaagaatggcgtgtatccaggtggcagagcttgcagtgagcagagatcgatcgcaccactgcactcgagcctgggtgacagagcaagactcagtctcaaaaaaaaaaaaaaagaactcacgctcccaaccacttataaatagattctgtgcccttcatgaaatgttcttatggctaccaaaaataatgcttccaaacaacgaataacatgggaaatgttgatgttaaaatgttaagtgaaaagttagtaaagtaaactcatgtaagtactatgagaaagactatgtaaaatacaaacaaaactcaaataacaacaacaacaacaaaaccactatatatagaaaaaaatgacgggaaggaaaatagcaaaatagtaaccatattttagggatgggattataggtgattttaaaattcttcctattttttggtgtttttaaataatgagtatgctttctttataatctcattccctagtgacaagcaaatactcttaatattttgctgtaagaaaacatcgagtctaagttctgatatcataaaaattagttttggtttcaaaattggcaggtcagtaatttgaaatttagcatatattttctcatggaaataaggatagccatagtgattagttttttcttttttaaacttgcagttctaggaactgtgctaagaacttcatctgtatttctttattcagtggattaggaatgttttcagcccccttttccagtgatggttaagtaacttgccagaggttgcacaggtggagagagcaagggtgggaactgatgctggatgtccctctccagggtctgtgttataactgggctgatgcttctcactgcagcccatttcaaagagcatggagctaaggtactgcctttttctcccagtcttattttctctcactgcagctttcattgtgaatatgccatattttggccaccctttccagctaagtcaattttgataactatcctggggacccaactttccctcagaatattgtttgctgagaaaatgttttggatcccaccatgggcttttaaaacctatatactcctcctcttcacctctccatccaaagattaatcttctcctgaggtccttcccaggttggatgctcttctcttatgaatgaccagaactggtgcctcacttctggaaacctccagatgagtggagagcttttgctccaccctcagtatacacctggtctttgctgcctcacctcgagctggccaagggcaccttctttaacacgagtaaataagccattcctagacttctgcccttttaaaggcattgttagtgctgaatcggtactgtttgtgagcagttttggagcatcaaattcaggcaaggagagaagcccaaccacccacactgtcagcattagatctgcctaaaataacatcactgagatatcaaaccttccttgttctggttatggcatcatctagaaatgaaaaaaaaatcatgttagattatttgcttgggcctacaattttattttggatctctattattattctaaaaagggccatttaatttccatcttgggaattttctccttcagttcctataccaaagagaaaacagaacttctgttcattccagaggtgtagagccgtattggcccagctcagaaaatagaaggcatagcagagctgcctgtgagatagataggtgccatgtgcaattcacagagctccctcaccatcctagaggcctgcagttctcaggggatcttcctgtgggttaatacttgagatgcttatgcagggaggaactgggtccctgggatgcgaggggagggagtcacccatgcctttatgaaagatgcttctagcgtcccgcacatggtctgcacctcctgatgctaggtcaggactgaattgtataaaaggcagaagcttctgacagcacctcagtctacctgtctcctgagtgatctgctgcagtgcctgaaccaggtagagtgcttctcaggaccaggatgaactcttggtgctggtgttttgggcagaaagagcccctgggtggaggttgaggccattcttgaagaaagacaaggataaagaaggattttggaggggaaggttcttctggaaggggagggtggaaggtaggtaaaaggaatgaaggactgatgcctttctgaagttccaag

SEQ ID NO: 2676 - DNA, 2300 bp, Homo sapien
tacgccagacacaagattgtatgaggagagccaggaatgggtttgaagagaagaggatggttgtactcaaaaggttcaggttctgagagggtttccttcaagcatgggtcacagtttgaaaaattgcttgtccccattcatggggaataagattgcctgaagtgctcatcctgggctctaataaatggacactctttacttttctgattattataagctcaggtgtttccatcagttggctagagggagagctgggtgggcagtgagtgagttttggaggcagatatgaaacgtctgagcacattttccctgcatgctgaaatcctggatttgaatctgggtaaagaactgagaaagacacccttctttgcaaagactgtctctatgtggttgggacgtacgtgtgtgtgtgtgtgtgtgtgtgtgtgtgtgtgtgtgcagtgagaggtataagagtacaggggttttggtccctgtgttgggttttccaagcaacatttctttaggaatgggctggttccttcaggagacactcataatgtacctagaaaagataactagaaaagttaattccaaatcagcctttaatataaaagataaacaattgatgcctcctttgataagagttaatagcgataaataaagtaagctggtttatgagatcataggatgcccacagaatgagtaggcacttgcccagattatctccttatactgattcctaccaaacgttcttcattctttttttttttttttaaaagaactttgcccattttcccagaggagatcctgcctctgtcttgttatttcattacttccttctctgttctaatattgactttactttttggaatgtctcacctatactcaccaacaggtgctctaggaactggcaacctgttaatcaggctctaaatccatgttaaatgaaactggtatcttttgtgacttatctttcctcgcctagtcccttgagccactcccagctcactcgcccccaaacctgtctctcatccttaattcctgaattcttagtcttggacttctgttatagttcacattcacagttgtgggcaatttgattaagaagcagttctgaagttgactgccaaagtatcctccaattcttaaaaattagttattctgaaaacactatctatcatgaacactttggacctttggaaagaactttctttctttctttctcttttttttcttctttccctccctcccttcttcctttcccattttcttttgcactgggcagtggccctagggagaacttatcttcaaaggcagattggtggttgggggtgggataagaagcaggagtcccacaggctgactagcctttttgcaattgggccactgtcctgcacacatttttctctttgtcataccatgctgtattatggggatatggcaacctgactacattcacaacttttctggtcttatggttccttaactttgcctaggtttttcttcctgtctccagtgacagagagaaatcacccctggggttcccaaaggtgcatccccgtcatcatcttcactcactgcatcttgaagcatatggatgaaacccagcaggcttatcgcatagcttgtggtctgccctggggagccaaggaccaagagccagagagatgagaatcaagataaaaataggtgaactaccacctaccaagtagatgactacataggaatggatgtgtgggcaagtggagccgtctgtgtgtgtgtgtgtgtgtgtgtgtgtgtgtgtgtgtgtgtgtattgaagacaagggcaggggttccagacctccctgcatttgagccccatgccctctcttagcatacacacagcctcccaggtacaaacagtgccctgtttggaaagtaaacatgccatagcaatcctggcacctctgtgaagtgacttagatgcccacatgcaccacctacaatgctacctgagtgatgaatgtctctgggatgtgagtgtcagctgagcacgtctgttgggaaatgggcccctcccaagagcctgaacctgaatacttcttataaaaaggttctctggctggacgctgctcaatccactgcctagcaggtggcccattccagttggagaacgtagtgagtctttcagtggagccagggtctggtaagtctcctagcagggtctgggggagagggtgggatgagttgagggcacaggggaggagcaaacagaacacaggcagcagatagatgtggaaggggtgtcccgcaaggcacctacgcttctagtgagccaacctcttaaggtactaa

SEQ ID NO: 2677 - DNA, 2300 bp, Homo sapien
ttaattcagtctgaaatgaaataacactagagagtatttgaaatttttatgaagaaacgaagagcatttgtaaagttaactacatggtaaatataaaagacagtataaatgcattttgtgcttttaagtcttttttctccaatttgatctgaaagacaactgcataaagaaatacttatagaactgcattgatggccttctaatgtaaagatatgatttatatgacaataacagtatacagaagggggagggaacaaacctacacaggagcaaagctttgcgtgctatcaaaattaagttggtattgatctgagttataatcactgtaagttaagatgttaataagaactcccaaggaaaccactaagaaaataactcaaaaaatatactaaaatatataacattgaaattaaaagggtatactagaaaatgcctgttcaataaaaaacaaagccatagtgaagaaaaagaggggcaaagaaagttatgaaatatataggaaataaatagtaaatggtagacataaattctaccttaatagtaattacattaattgtgaatagattaaataccccaatcaaaaggctaagactggcaaaatggataaaatagcatgaactaactatatgctatctataagacacacattttaggctcaaagacaaaatagattcaaagtaaaaggtagaaaaacatacaccatgcaatggtaatcaagagatctggagtggctatacaatactggacgaaatagactttaagacgaaattaatggcagagacaaagaggacattttataatgacaaaaggatccatatctattaaagaaataattattatacatatatatgcacctaacaatggagtcccatattacatgtaacaaagactaacaaaattgaagggagaaacagacaactcataaacaatttaacaataatacttgaagctttcatactccactttcattaatggaagaacaactaggaagaaaatcaacaaactgaagactttaacaacactataaaccaattaaatctaacagacatcttgttgaacactccaaccacaatagcagaatacacatttttctcaattgcacatggaacattctgcagggtagaccatttgttgggtcataaaagaagtatcattaaattttaaaacactgaaatcatacaaagtatcatccgtaaccacaggagaatgaaactagaaatcaataacagaaggaaaactggaaaattcagaaatgtcttaagcaaccaatgagttcagaaagaaatcacaaggagaattagaaaatactttgagatgaatgaaaataaaaatacaacataccaaaaattatgggatacagcaaaggaaatgcttacagggaaatacatggctgcaaatgcctacattaaggaagaagaaaaatctcaaatcaattacctaaccttctgccttaaaacactgaaaaaaagaagaaactaaacataaagcaggaggaaggaaataataaagattaagtttgtagctgcattattcacaataaccaaaaattggagctaactcaaatgtccatcacttgatgaatggttaaataaaacgtgctaaattcataaagtgaaatattactcaaccataaagaagaatggagttctgacacatgctacagcatggataaatcttaaacaatatattaagtgaaagaagctaatgcaaaatgccatatattatatgattctatttatatgaagtgtccagaataggcaagtccatacaggcaaaaaattgattactagttgccagaggggcaatgtggaataaggagtgactactaatgagtggtgataaaaacaattgcttcaaggaaggtaggattgcaacccccagcaggcctgaatgaggtgaaggtaaacaggcgtcagaccttcctggttccctcttgtcaggcatcttggtgagtacacaggaaggtgatgaatggatagtctcaagggtgtgcctggctgtcacctcccctggttgtgaaagcagcagcatgcccagcctgtgcatcacacaccctgcacaggataaaagcactcctgccctgggctcctccacagtctcctcaggaacagccttctcctgcctctctgcacctggtaagtattcagcaggggacagggcttgatatgggatgttagaacagaaagctaaggccatagcagaagagatggaaacagagaggtttgaaacaaagacccagatacaggactgtgagagggcagcaatgggggaagggggcaggagggagaccctgcaggaac

SEQ ID NO: 2678 - DNA, 2300 bp, Homo sapien
ggccttcttaattaatgtgcctacctgtttgtctattatttaaataacaaacacacaaaaattcaccatccaagcgaaaatgataactttgatagtaaattatatgcacctgtgtaattcagccttcacccatgtccctgcctgtcccatctaatataaccatgatcctaaatcttgtattcatcattctttgcttcccttttggtatatttcattattttttatttctaaaaattgttattttaattgttttttctattttaagtttcatttcttgagattttgtataccaaaatatcatccatttaattatccaattctatgagctttaactaacatatatagtcaggtaaaccccacaacaactaagacatacaacagttctatcacctcaaaatattccctcatctgcttattaaatcagcctctccctcataccagcccttggcaaccactgacctattttcagttcttataattttgccttttcaagaatgccctataattaaaattatataatatgtagtatgtaaagtctgacttcttttgcatttgagattcatccctgttgttttatatatcagtagttgattccttttttattgctaagtagccttccattgcataaatataccatttttaaaactctattcatcagttgaagatcttgtggggttcttcaaattcagggcagttatgaataaagccactataaatgttgggctacaggtttttctgtgaacatacaactatatttcttttggctaaatatctaagaataggatttctggggcaaattgtaagttgtatgtttaatttttttgatagactgccaactaatgtaattttgcatttctaccagcaatgacttgggcttcttgttgttctacatccctcatattacttgatattgtcatttatttcattttagccattccaatgtgtatagagtggtatctcactttgcttttaaattgcatttctctaatgactgattaggttgagtatcttttcatgtgcttaactgccacccatatatcttctttgttaaaatgactcttcaaatactttgcccatattttctgtgttattacctatttttgagaatttaaaaaacattggccgggcacagtggctctgtaatcccaccactttgggaggccgaggcgggtggatcacaggtcaggagatagagaccatcctggctaacacagtgaaaccccatctctactaaaaatacaaaaaaattagctgggtgtggtggcaggcgcctgtagacccagctgcttgggaggctgagcagggagaatggcgagaacccgggaggcagagcttgcagtgagccaagatcgcgccactgcacttcagtctggacgacagagcaagactccgtctcaaaaaataaaaataaaaaaaaaattcttgaaccaagtccttggtaagatttgtgttttacaatattgtctccaagtctgtgaattttctttgcatttgcctagcagtgccttttgaaaagcagaagtttttaattttgatgaagtcctatatttcttttttgaattgtacctttttggcatatctgaaaaattttgcataacccaaagtcacaaagatttattatgttttattgcagaagtttcatagtttaattttttaaattatgatctattaatttttatatctagcattaggtatgatttcttttacatatggacgtccaattatttcatctctatttgttgaaatgactattatttctccagtcatgactcaagaaagaattatgtcatactaattcccaggaaattgtaaaggacagactgtgctccacagcacgtgagttgaaacaaggaagaagggaggaagaaaagaagcagtggtagcctcccaggtgagaggtatgtggacagtgatcctgcttccaggttcaatgtcattggttggatattatggaagtgccaaagctacaaacctagtcttgggcgtgtgccttgttgacacctcccctggttgtgaaagcagcagcatgcccaggctgtgcatcacacaccgtgcacaagataaaagcactcctgccctgggctcctcatccaccgtctcctcaggaacagccttctcctgcctcctctgcacctggtgagtgtccagcaggggatgggactcaacttgggatgttggaacagaaaactaaggtcatagcaggagagggaaatggagagatctgaaacaaaagcccggagagaggatggcagagagggtaccaatgtgggaactggggccaggagggagaccctgcagga

SEQ ID NO: 2679 - DNA, 2300 bp, Homo sapien
tttatgaaattttttgttatcaaaagacattttaaaatctattagagccaggcgtggtggtatgtgcctgtagtcccagctactcaggaggctgaggtgggaggattgcttgagaccaggagtttgagaccagcctaggtgacataacaatatctcttaaaaaagaaaatatatgagaataatcgtgcttcttctccttgcttgagctacagataagcactttaaaaaaaaacataaaactgctttcattatattgccattacatttttaaagtcagatggaccttagacagagaaactgatgctcacagaggtgaaatgactgatcccaagtcacaaatgaaaatgcaggcaaagccagagctagaggacttttttttaaattcccagtctgctgttggaccctaaacactttgagccttgcacaaaagcttgcactgtctccttgctactgatagaaggaagtcaattaaataaaaaattttctcctaattttcaacttcatctgctgactacaacttggcttttaaatatagtcttcctccttccatttttcagcaatgcaaaccctcaactggagtcatatagatctacttactctgcatttactgactttagttgcacttttaaagtgtggaatcatgcacgcatccctgcttgaaacatgcttctctattttctccatctaccccagcagctctctgtggactgataaactcttgtctgtcagctccaaacctacccttctgggctctacttcgtgatgctggcctgggctttgcaaccgtggttctacttcgcgggcagtcctctattaggttttgtcactagggggcgcaagagacgcagaagtcaggagagaaagaaaggcctgtaagtgtcaccctatagattttttttttttttttttttaatctggcagcagcagttggttcctgttcccagttttctccacacttccagaactatcctcttctcctttcctcagaagcaccggccccactagccagtgtcccacctcagaagcttgggttctcgctctgcaggtctctcctctaaattcctaggtttcaagaagtccatctcctttcccttgttccctatccttagtgtggcaatagctgttccgcgtgatgctagaattctccatatttgccttttcaatcctctaacacctgtttaatccaatgcttattgtttctgtcaaaataaggagtgtttctgttttcctgaatggacacagactgatacaaatctctaataggttaacatggaggaactgatggacaaaaagaatatcctgaaataataatgtacttatttcattttgcgaacttgtaacaattttactggcagaaaaatgtgacttataaagtgaaaataggtctatatagttcaaaagcaattgtacctgacgttttaagaaatcgtagatatttatactatttcttgctagcagaaagtcattgaaatgtcaaatgtttaagtaaaatgtaagagtaaaacatagtttcttaaaattgggaagactttgtgaagggaaagagtgtaagtatccagttcttacagaagaactttgatagacagggagaacaccgacattcaatgaatgcaataggatcccttattttgaaaaaacatttaaaaaaagaatcctctttaaaaagttacagttaatatatgtttttgaaaagagaaagagagtgagaagctggatcacagactgaattaggaagaaaggaaacttatttatttatttccaagaaggaacaggaccatagagtcttgagaaaccagattcttgtctcaagggtcaggaatcctatgccgctttatggagtcccagcctaggaaataatatactttgatgagatttcgttctctagcttcagaagagtaactcagtatctccctgggaaggatggattgaagagacagggagggaaatgtcaggaattaccctgcagatgccccagtatgggaggaaccacttcctgctccacccagaaccatggctcactaaggcccagtcaggcgagtgcctgcctataaaatgtgtgtcaggaccccgcttctcatctgccctgacaccctggggactgcctgctccacacctgggtctgaccagggtgagtggatcttttggaacctagacagagcacaactgaaagggtaagtagctgttgaaaatcacagggggaaaggaaagacaggaaaaaagagggtaataggaggagagatgttggcctaggaagatccagcctgggaattaagagtccctgggaattagagggattagcc

SEQ ID NO: 2680 - DNA, 2300 bp, Homo sapien
aaatagtgactcaggaggttcagtccccaaacgtcatcttctttggtacccatgtttgtctgcagtcatcttcaaaagggccaaaattctacagtccttgaggtcatgggctacttattattcacctctatatccgtatgtttggacatacatgatccaagaatgttgtaggctttcaaagaatgccttttgaattcactgccctggtcacactgttgacttactttatccttcaggtaaaagctccctgagagcaggaatcagatctgataataggattggataactaggagaatagaatccctcagttagaagctgacaatgggaaactatactttctccgcatcctcccctcccccataagtaggcattaggcaatgtgaaggcgcggtctgtttctgttttaatcagaggtgtgaatatttttttcaattctaattttaacatctttattgagacgtaattcacatattgtatagttcacttgtttaaagtgtaaattcaatggttttcagtatattcacagagttggacaatcaccaccacaattttagaacattgtcattactccacaaagaaaacctgtattcattggcagtaacttcccaatttctcccagcccgctaaagcacctggaagccactgatatttctcagaggacaggcataaacataaaaggagatacagggaacagaatctcgtccaggctcccattcctcggatgtcctgagtcagctcttcaggggtccagcctgggagaggctgtaactggctaaagcctcatcccctttcatttccagagatttgcctactctacacatttcatataaataacatcatacaatatgcagtcttttatgactggcttctttcacttagtgtaatgttttcaaggttcacactcaatgtatctgtttaaactaaatgaataaatgactgggtaactctgtctagtgcaaccctgaatcagaactctgaataactagacccctggctgaccctctacttcctggtaggaaaggagttccctctgcataggagccccaagaaatgatgtgtacttcccaagagaggtttcaaataatctcagtgtctgattgaattaaaccctctgagggtaaggactctatacaggcaattaatgacacataagacctgggcaagtacccaacacatggcattagttttctttgaaacacatatttattaagggtctatcaggcatatagtgttgtaccaagttttttcttacttcttatttaatattcaaaacagctcagtgagataggtatatctggtttataatggccattacatatgagaactgatactcatagtgagtatcataatgacactctagcaattgttgataattgttctagctacttctataggttaccaagttatcatatgcaagtttcctgattccggcaatggattcaatacaattgcttcgactaaaggaaacgtttagattttagagggaattgcttattctcaatcattctccttgctctaggagacagaatcaactcagatttaattcagtgaaagcttgtcatgatgagtctgaggaaaagcagaaactcagaggccgagaggaaggactgtgagcctagtcaagggagggatgcctagaaagagccaaggctgtagaagccccctgggatggctggatgcacagcaggacatggaagacaaactgctcaaggtgcagggagtcataatggaacatttccacaaggtcagggaatgctgtggctcagagctgatgtaacctcagaggacaggaataaaaaagatgcaaggaacagaaccatgtccaggcatgggtgccttgggttccctaagttaactctttagggctcccacctgctggaggctctgactggctaaagcctctctagaccacagccccagagaggagtcctagaagctcccgaggcctctttgggtgcagggactaggagacaggagaatgtcaggaatgacccagcacgtgcctggttgtgcaagagccacctcctgctcttcccagagccaagtctgagtcctataaaagacacatccagcttcagcacctcatctgctctgactccccagggacgtgtctgtgcttttgcatgtgaccagggtgagtggcaacctgggataccagaagggtattagcaaggtagagggatggggaggatggaggtaggctggagaaagatagttgtgcgcttgtgttctcccatactgagcaggaataggactcagtttgcctcaaatctctagaagctctgggacttgctggagct

SEQ ID NO: 2681 - DNA, 2300 bp, Homo sapien
caggccccaaacgtcatcttctttggacctatgtttgtctgcagtcatcttcaaaaaggctacaaaaattctacagtccttgaggtcatgggctacttattattcacctctatatccctatatttggacatacatgattcaagaacgttgtaggctttcaaagaatgccttttgaattcactgctctgaccacactgttgacttactttatccttcaggtaaaagcttcctgagagcaggaatcagatctgataataggattgcataactaggagaacagaatccctcagttagaagctgacaatgggaaactatgctttctccgcatcctcccctcccccactaagtaggcattaggcaatgtgaaggcacagtctgtttctgttttaatcagaggtgtgaatatctatttttttcaattctaatttttaacacctttattgagatgtaattaacatatttgtagttcatttgtttaaagtgtaaattcaatggttttcagtatattcacagagttggacaatcaccaccataattttagaacattttcattacttcacaaagaaaacctgtatccattggcagtaacttctcaatatctcccagcccgctaaagcacctggaagccactgatatttctcagaggacaggcataaacataaaaggagatacagggaacagaatctcatccaggctcttgttcctcggatgccctgagtcagctcttcaggggtccagcctgggagaggctgtaactggctaaagcctcatcccctttctatttccagagatttgcctactctacacatttcatataaataacatcatacaatatgcagtcttttgtgactggcttctttcacgtagtgtaatgttttcaaggttcacactcaatgtatctgtttaaactaaatgaataaatgactgggtaactctgtctagtgcaaccctgaatcagaactctgaataactagattcctggctgaccctctacttcctggtaggaaaggagttccctctgcataggagccccaagaaatgatgtctacttcccaagacaggtttcaaataatctaagtgtctggtggagttaagctctctgagggtaagggctctatatgggcaattaatgacacataagaccggggcaagtatccaatacatggcattagtttttctattaaacatatatttattaagggtctatcaggcacaaaatgtcatacttagctctttcttgcttctcactttatattacaaacagctcagtgagataggtatatctcactgataggtttataatgggcattatatgtgagaactgatactcacagtgagtatcatagtaatactctagcaattattgataattgttacagcaactttcagagattacccagttatcatatgcaagttttctgattccagtagcacattcaatacaagtcctctgactgaaggaaatgtttagattttagagggaattgtttattctcaatcattctccttgctttaggtgacagaatcaactcagatttaatccaccgaatctgcttgccatggtgagtcggaggaaaagcagaaacacagaggccaggaggaagggctgagagcctaggcaagggagggatgcctagaaaaagccaaggctgtagaagccctctgggatggctggatccacagcaggacatggaagagaaactgctcagggtggagggagtcataatggaacatttccacaaggtcagggaaagctgtggctcagaactgatgtttcctcagaggacatgcattaaaaaaatgcagggaacagaatcttgtccaggtgtgggtcccttgggtaccctaagttaactctttagggttcccacctggtggaggctctgactggctacagcctctctagactgcagccccagagaggagtcctggaagctcctgaggcctctttggattgcagggactaagaggcaggagaatgtcaggaatgacccagcgtgtgcctggttgtgcaagagccacctcctgctctttccagagccaagcctgggccctataaaagacacatccagcttcagcatctcatctgctctgactccccagggacgtgtctgtgctcctgcgtgtgaccagggtgagtggcaacctgggataccagaggggtatgagcaaggcagagggatggggaggatggaggtaggctggagaaagagttgtgtgcttgtgttctgccatactgagcaggaatgggactcagcctgcctcgaatctgttgaggctctgaggcctaccggagctca

SEQ ID NO: 2682 - DNA, 2300 bp, Homo sapien
tttaaacacattgggaaatagtgactcaggaggttcaggcctcaaacatcatcttctttggtatccagtttgtctgcagtcatcttcaaaaaggccactaaattctacagtctttgaggtcatgggctacttattgttcacctctatatccctatgtttggacatacatgctccaagaatgttgtaggctttcaaagaatgccttttgaattcactgctctaatcacactgtggacttagtttatccttgaggtaaaagctctctgagaacaggactcgggtctgaaaataggactgtgtaaataggtgaatagaatccctcaggtagaagcagacaatgggaaactatgctttctacctaaccaccctccaccaccaagtaaacattaggcaatgtcaaggcacggtctgtttctgttttaatcagaggtgtgaataactatctttttcaattctaatttcaacatcttcattgagccataattcacttattatacagctcatttatttaaagtgttaattcagtgggtttcaatatattcatagagttggacaatcaccaccaaattttagaacattttcattactccacaaagaaaacctatatccatttgttgtaattttctaatttctcccagcctgctaaagtacctggaagccactgatatttcctcagaggatgtgcacaaaagtaaaaggcgatacagggaacagaatcttgtccaggctctggttcctcagatgccctaagtcagctcttcaggcgtccagcctgagagaggctgtaactggctaaagcctcattccctttctagttctacagatttgcctactctacacatttcatataaataggatcataagaaatgcagtcttttgtggttggcttcttccatttagcgtaaggttttcaaagttcatcctccatatatctgtttaaaataagtgaataaatgaatgggtaactctgtctagtgcaaccctgaatcagaactctgagtaagtagacccctttctgaccctctacttcatgataggaaaggaattccctctccacagaagccacaataaatgatgtctacttcctaagggagttttcaaataaactgtcttgtaagggttctatatggacaatgaatgccacataagacctgggtaagtatccaatacatggcattagtttttcttttaaacacatatttattaagggtctatcaagcacatagtgtcacactaagctctttcttacttctcatttaatattaaaaacagctcagtgagataagtatacctggtttataacggccattacatatgagaattgatactcattgtgagtatcatagtgacactctagcaattgttgataattgttgtagcaatttccagagatcactcagttatcatatgcaagttttctgattccagtagcacattcaatacaattcctccgactaagggcaatgttttgattttagagggaattgtttattctcaatcatattctttgctctagaccacagaatcaactcagatttaatccactgaatctgctggccatggtgagttggaggaaaagcagaaacacagaggccaggaggaagggctgagagcctaggcaagggagggatgcctagaaaaagccaaggctgtagaagccccctgggatggctggatccacagcaggacatggaagagaaactgctcagggtggagggagtcataatggaacatttccacaaggtcagggaaagctgtggctcagaactgatgtttcctcagaggacacgaatacaaaagatgcagggaacaggatcttgtccaggcatgggtcccttgggtaacctaagttaactcattagggttcccacctggtggaggctctgactggctaaagcttctctagaccgcagccccagagaggagtcctggaagctcctgaggcctctttggattgcagggactaggaggcaggagaatgtcaggaatgacccagcacgtgcctggttgtgcaaaagccacctcctcctctttccagagccaagcctgggccctataaaagacacatccagcttcagcacctcatctgctctgactccccagggacgtgtctgtgctcctgcgtgtgaccagggtgagtggcaacctgggataccagaggggtatgagcaaggcagagggatggggaggatggaggtaggctggagaaagagttgtgtgcttgtgttctgccatactgaggaggaatgggactcagtctgcctcgaatctgttgaggctgtgaggcctaccggaggtcg

SEQ ID NO: 2683 - DNA, 2300 bp, Homo sapien
agaggtggcttaaaggaagtattttaaataactcccaggtaattcttctaataacatttaatttattcattcatccatctaatcaatagtctatggtcaactgctagactccccaggaaaagaaacaatgggtaagacctgattctgagctcatgctctggtgacttaatatccgtggacatagagccaagattgtctagaattcttactggtgtcaaaggctgtaagcctgatctctaacagtgactgaccatattttatcataaaaaatatggaaggacattttgtctgctgagactggcttcctgtgaacgaggcacatatcagctttggagtcttctctccaacccttggccacgctgctgtgcttgtccctggacttgcaagcacaccttcatgcccatgctgcccacacacacatacacacacattcataaaggcacagcccatcccattctcttccttcatggttactatcatctttgtcaaggagaatgaggaacctagcatgacattccctcaggcattatcaggtgatccagtgtcccaacaatctcattggaaaatagactcatttggtatgcacataaatttcacagaggtcttcagaatatccactgaattgtgaattcctagaggtcacaaaacacacacagtgtttgcctctataaacctaagtgtttggatagaaaatcactgaatacctaggagctgacaaagcagtatcttcttgattaactgctatgtttggatatcaacatttttcactcttgacctgaacactctcaagggtagggaactacatctgagactagaaaagaaaactattggagatggggcatctcttagtatgacagaaatgtaaagaccatatactcctaccttctagaccaagggtatatgaaagaagggactatctttttcaaaagctgtattctaacttatgccatacagtaggttttcagtaaatgttggatggatggatgaaataaattgattaatggatgaatgtatctaatccaaaattgtatcagattccttactctcctgtcattcactaagaagattaaataaatcatttgattcccatcaccttcttgacaagaaataattagacttctcaaaatcctgaatgtacactgtacattcctaagagagccttcgctagcctacctatatttttaaataaaattttcaaagacagggactgaatattgtccatttttctgtctcacacactgccctcgttcttttaaaaaatgacattgtttaagtgtcttccttgtgccttatcatgtgcaaaagcctcacttgatggaaccaacaattcagagaggaaggtgctaataggcctgttttacagttgaggatttagattgtctatatatagtctttgaggtcactgggctcataaacacagagctcttctgattccaattcaaaaaactattggcttattttaaaaactgccttgttacacagtagacattttaatttctaagtgaagaagtttagtcacaatgatcatcaccaccaaatctgaggaaaccatcttgattcacttattaatcctcctagcagggttctgcaggccacacagcaacatggggtcaggaatgagggctgagcagaaggggaggagtgtatcctaggaaggaaatggtctctgactcaatgccacaaagaaacctgcctagctgtggaagcagggcttggaaaactatacttggggatgggaagaagctggaatagcatacttccacaggaaagctatggcaaggatctctggtgttctcagaagtcactctttgagcctttgtccaggcacaagctccttaagaatcccctggcagctccacggggaccagcctggggggggctgtgactggttaaagctcctttagacccccttcccagagggaggtcttgggagctcccagtgcttccttggattgtagggacaaggaggcaggggaatgtgaggaatgacccagcacgtgcctggttgtgcaagagccacttcccgctcttcccagagccaagcctgagcctataaaagacatattcagctccagcacctcatctgctctgacttccccaggacgtgtctgtgctcctgtgtgtgaccagggtgagtggcaacctgggagccagagggcacaggggaatgggaagattaagggaggcttcagagagttatttctttgattctgtgctattatatgcagaaaagagatacagtctgacttgagtttctggaaatcttgccttgggctgtgagaaatgtgtatctgacagtt

SEQ ID NO: 2684 - DNA, 2300 bp, Homo sapien
acaaccatgtggaaaacagtatggagggtcttcaaaaattaaaaatagaactggcatataatccatcaatcacactagtaggtatatatccaaagatattgaagtcagtaatattgaagagatatctgcattcccacatttattgcagcactattcacaataggcaataaaaggaatcaacctaagtgtaaatcaaaggataaatggatgtttaaaaatgctatatatacacaaagaatactattcagtcacaaaaagaaggaaatcctgtcatttgtgagaaggtgaatgaaccgggaagatattatgctaagcaaaataagccaggcatagatagacatactgcatgatctaatttatatgtggaatctagaaatgttgatctcatggaaatagagagcagagtgctggttacgagagattggggtggctggtaggtggggttggggagatatttaaagtattcaggggaagacttcgcaggacctggcttgacatgggagaggggctgtgaattagtgggtctttgcatcctctttgtttaggaaatgtagaagccttaaagcttatgggtcctgggaaatgtggggatctattatgtacaaatacagtagaacaatttacctgagaggccgtaggggccacggtggagcctgcactggtttatctaaggaattgacatttggaccagtgctaggcttaggctcaagacaactttcttcagtgggcgacccaatatagctcagtgggggtagcatgggctctggagctggataggcttgggttgcaatgtcactccattacctactgatgggatgaccttggaaaagtggacctctgggtctcagttttctcttgtgtaaaattggggctaatgaagcctgtctcatagagttatttcaaaatcaaatgaaataacacaggcaaagagcctaggacagtatccaccacatagtaagtgctcagtagataatattcccacctctctttctacatcttctgcattgtggaaaagaaaacaggcagggattcaaggacaatgccatgttcagaaataaaaggcaacatattgtagtaataaagatcatgatctatgaaagcagactcctgcatctgaggcctagcttccttacttacctgctttgtgatgagggtaactcccttaaactttcagggcctcagttgtgtccatttgtaaatgtactgcctcatgaattgttatatataaagtattcaaataaactttagattctattattattgttgttgttgttatcacacagtgctcatctggctggaattttccctgctcagcgttctttggaattgaagcctggtagtgaggtcctgaaaggtaagaatgggggagcctaaggggcatgagaaggctgaggggaggcagtctagactccagcctggggcctaggatcattaagcacccacccagtttccaaatgaacctagaataacctgatgttccatgaaacaaaccattttttggaggtcttgtgtcatattgggccagagaccactgggccaaactgtgctcagcaacctagaccagcagaagttaccttggaagcccacagaacactcatttaggctgagtgaagtgaggtgaatctatagttaaattctcaatttttcatacactgtgccaaaagctacacttagctttagattagattctcaattttagtttgattctctgagctacacttagcttttggcacagtgtatgaaaaattgagaatctaactataacttggataagtcctgaagactcaagtgacctggaaacagcttcattagagacagatcacataggcatcactcataacttataggaaaaggagactgacttgtttcctgaggaagggaacaggaatcatttatctagtgtttgggaaaacccaatgtcaagcacagacatgccctgcctctgactgaggagccaggcatactggggaggaatcttgccaatgcaacaccatcccttctccttgtgatctctggtgcttcatttagatgccattaaattgcctcattgctgccctataaaaggtctccccacctgctagtttttcagatcactgacttcttccagtcttgctcctatcagcaaagagggtaagtctctatacgggataaggacatggtgagaaacagagctttggggaagctggggtgggatgagagctgtgggatgaagggtgagcgaggactagatgcttaggaaatctgctgaaggaggctgaaagcaatgctggtgggaaacttggagcctggggcatgagagg

SEQ ID NO: 2685 - DNA, 2300 bp, Homo sapien
aaagaaggtttatgataatatatgtcgagacaaaaggtataatcccaaactgttgctggcaaactgggatgtttggtcactctattaaggtcacgggcaattatttctagaacagttctaatgaagaagagctagagagagaaactaagaaggtgaaaggcagagaaacagctaagaaaatatgtacacacagagtcactataaaatatatgatgtgtgtgtatgtttatataaacacacacatttagtgtatatattatttggatacctcaatacacatgcacaaacatatttatattttgcaactacttgtgaactagcttcactcttccccttgtgacctagatatcactaatgcattatattggtccaggctctggagaattttagatgctcccccagtatttctaccactgacaggaaagagagggtttttcctcacatgtttattctggctttagtacacctttttctaattcatgaattagttttatgttggaaaagctcaccatattgttgtacacaaacttgaaccagagaggaactcttgccccttcccttcatctactgaaagtagagggaaagaaaacacttttcaagcagagacaatagggggaaacctaggaggagggagctgctgaggtgcaaaagcttctagaggctctcccaccatttcttggacagtgtcctgcacctcaggcctggccttccgccaagtccccctctccccttccatctccccatgtgtgcccttacctccttcccaacaaagggtccttggaaattccgggatttttcactctacgtggagcgatgtagagttctagagttctactccacacaaatcccttccctattcacattcacagtcattcctacttcatagtcaaagacatcaatatacttagcagaacaaaggggtcttaaacactaaaaaaggaaacaatcgacaaaaaccaaacaaccccaaatcccagatttataccccaccccaccccccatcttggaaagcagctatgacttcaaaatacctattcgtttattgacgcatatgtaggcatcacattttttaagggtctatcatgtcacggaccttctaccagactttttccttatattattttactggctggctcaataccctgtgagatatctgtatcactatctgtacttttaaactgaggaagaaacaagaacaacaaactgaaaaggagtcaagttaagtaattttcacaagtatacacagctactaggtggcagaaccagggcagttttctagcctgtctgactgcaagctcttaaatataatggaatgcatcaggggtcagcattttttttttttttaaaactctaagagattaaatgttttaggctttgggaaccatagcatctctatcccagttactcagctctccattttagtgtgaaaagtaccacagacacaatcaataaaataataaatgtggctcattatctaagtcagagaaataaaactttatgaagcctgaaatttgaatttaatataatttttatatgttgtaaaatattttcctcttttgctttcttttctcaacaatttaaacgcattaaaaaccttggaggctatccaaatcagacagcaggcagatttgggctgcagacagaagttagctgacccccagtagcctggaggattatttagacttaagagggaaaatgtgaaagaatctctgaattacagtccaaactcagctgccagaagccaatgagttccatgggcaacaagaaagaacaaaggaattgcaggccagtgtgcaaaaacgagaactaaaaagcggtcaaggctgggatttaccaggaagaatggggcagaaggtcctgtataaactgtccccaccctttgtttctaagcagccctactcctatctagcagcaggtgccctcagcctggggagggaggcaggtgaggagctgctagtcaccacctatcacaggacccacgtgggtatcagggggcaagtcctctcatgcccaggccctgtctcaccacaggaggcagaaacccaggctgggataaaagggctcagggccagagcaccccattcactcacttcctgaggtgccgaaggaccctgtgctgcctgtgactttggtatgtgtcctctgggaacagaagcaggggattccacagagggatgctcagatcaggttaggaggagtggtgggcagggcttccatgggggaggagactggtaacaactgggacagaaagaataactggttggctgtgcctttgggctccaaaaaaaactgctgtaggg

SEQ ID NO: 2686 - DNA, 2300 bp, Homo sapien
tactatttatcatagattttaatactattcctgacttacatactttactttttctcagctggttatttatatttttcatcctttaaaattgtgctttctgacatatagtattcctttcactatgtgatgagatttatcaagttttttcatgcttaaatattttatccaattacttataaagaaataattagatagtctgtatattcttctaataattttggagtatcagtttattgttactgctctatgcaggggttgcagaggaaggaagcaaattaaaaatcagtcatgtgtggtgctggctctgggacacagagtaaaatccactaagtctaagttaatttttactgtgtctcagcattcttcccaccaatctcttgtgatatgagagcctgacaacatagaaatgtattttcagaaaatcactcctttgctagtgcatattgttagcattaaaatggtaccaaattcaataaatttcaaatgctattgaaatctaacaccaaacataaggaaacaatcctcatgatgttacatcatattgctaccttattaacccaatccatgtcagattaattgacagtttgggtgctaccctttgtggtatcagagtcatggacagaatagcttctaatcctcatcatccttggaatgaatgggctgggcttctggatcagaactgccaatgtaagctgagtaatcaatatcttgactactctattattaaatacattctttggaacaacatgagccatagccaggtaattcagtggcagacttctgcagggtgataaggctagtatactgtaatgtaaatgtctcagagtgagaattccaatgatgatggcttaagtcatacacaaagtaaagatgatgctaatagtaatcaattcatttttaaattgcttacctatggagtccacctctgttgtagaaactgttgaggggtacataaatataagaacaaagctgcagaatcaaggatagtttactgtagtcatatttgaaaattaagactcataaagaagttacagttgaatggcactgttttagaaatgcataggtcacggaataaagcctggatgttgaagaaggagcgttatccaaatgaatataaattgttctatcataatgacatatgaatgtgtatgttcactccagcactattcacaatagcaaagacatggaatcaacccaaatacccatcaatggtagactagataaagaaaatgtggtacacatataccatggaatagtatgcagccataaaaaagaataagatcatgtcctttgaagaaacatggatggagctggaggctattatctctccttagaaagcagctataatttaaaaatattaatgcattggcatttgtttagagaaaatgacatgttataagctctccaccagaaacttcctttgcattatttcattgactctcagccatccctggacaattgtttttatattatctctattacagagttgacaaactgagaacaagaacgatgaggtattaatgcttttcataaggtcatgcaggtaataagtggcagaatcaggtttctctctatgtctgactctttaaccagttacctaatggctttaatacagaagcacacgcacacacacacacacacacacacacacactctctctctctctctcacactcacacacacacacacacacaactataagatagttgagggttggaggattctatgaaacttgagttaagccaggttgcccagagccacagaggtaagatttgggagttaacaaaacagagaactcaagctccaagactaaacagattaggtattctccacggagaacaacacaggaaatgatggtagggattttcccactccatttctatttctaagtggccatagtccaagctgggagcagcttttctgagccccatggaggaaggcaagtgaggagctgccagtcaccacccacctcagaacccatgtgggtgtcagaaggcaggtcctctcatgcccaggccctgtctcacagctggaggcagagcccaggccaggataaaagggctctgggcctgagcactccatccactcacctcccgaggtgctgaaggaccctgtgctgcctgtgaccccggtaagtgttctttgagaatagttgctggggcttccacagagtgttgctcagccctaggcaggaggggaggctgggcaggaccttgagggctgagatccatctggatagaagtcaagacctcagaaagattgaaggaggatgtgctcaggaggcagggagagggccaact

SEQ ID NO: 2687 - DNA, 2300 bp, Homo sapien
ttcacccaattataaatctacggaaatgtgaaaaattgattctgacccataggtatttcagatgagtgggggaaaatggaaaatttgattacaatactaagacaattggttatccattcagaaaaatgtttaaaatatataaaatgtacaaaaattcctttcttgattgaataaaaaccttcatttttaaaaagaaaaaattttcaactttttaaagatagggaaaagatttctaaacttacaaatggttgagatttattaaaatcatgaaaattgcaaacaatatagttattgttgcagaaattcaactatgttaaaaataaaacactagttcatcaaatgacaccattaaaatgcaaacaagaacatatttgtttggaaaagatattcacaacacatttaatagcagtacattagtaactagaatatgtaaagaacatttacaaatactaacaaaaggagataaacaaattgaaaaacattttcgagaaaaagcagacaagtcacagaagggaaacctcaattaaccaaaaatacattaaaagatgctgtgatcactacaaagcagaggaacacatattaaactaccgacagataccagtgcacatccatcgaatggcaattattgaagtttaggaacaatgtgcagcaagaatgattcttatacaccataggtgcaaactgaaatcagtatgagcaatttggagagatgggtgtgatccaaaattcaacagttccacttataggtacataacttggtgagactctcccacaaatacacaagtagacacgcacaaaaatttccttagctgcaatattgattcagtgaaaagtgaaaacactctaaatgtctatccaaaagagagaagctaacaaatcatgatgcactcataagatggatactacaccgttgtaaaaatgagtaaactatggctatacagatcaacttgagtaactagcaaaaacaatgtttaaggaagagaacaagtcaaaaatgagtgtcttaagtatgatgccatttctatagagttaaaaccatgtaatccatagtgtatattgtatcagggtaacctgtacagaataaaattggaaggaatatattacaatttggtttgaaccaggttgcatgggctcattaacaccggggaggcaagaagggcagtattagggccaaaacttcaaagctccaagaatgagaagtgagaaccttaaaagcaggtgcccttcaggcagatcaaggcaggagatgatggtagggatttccccaccccacctctatttctaagtggccatattccatactggcagcagctctcctgaatacccacgaaggcagacatgtgcagagctgccagttaccacctgtcacgggacctatgtgggtgtcaggaggcaagtcctctcatgcccaggccctgtctcactgctggaggaagagcccaaaggacaggataaaagggctcagggccagagcactccaaccactcacctcctgtgctgcttgtgacctcagtaagtgttccctgggtactgaagcaggggcttccacaaagggatgcctagatcagggcaggaggggagggcaggcagagcctccagggctggggtggtgctggtatccatatgagtgaaggagggagcctcaagaaaactgagcaaaggcaatggggacagaccagggacatgagaatgaggagtcctgtgatggtgacttggtgttctggagaaatgagatggatctagagttcttgggtctctagtctgaaggcattgcaacattgcctgccatgttcacctgtaactgctttcagaaagggagatttaccttgaaaaatataattgtcctttcctgaaaagatgagatggaaacagtggttcccagccagtgtagaggatatcacagctaaccgactctcttaaactcacatttaatggtatttaacttggtgagacaagtacggtagacaaacaaaatataagtgctgagcattcagtacaggtgtttgtctgctgaaaaatgtcagagcactggactaagtcagaaacctgtatacaattctcacttaattcaatgatatttttcctccaacttcctttgcagttctgaacttctatgtccttacaacaaggtaatctagaaaattcttccaagagagaatgactgtttccccttgagaaacaattttatttccaaacccctttctagattgttttcatgattcaggtgtgtagttgaagcagaatgtctcctctacatactacatgcttgattttgagaatactttcttaatatcttttgg

SEQ ID NO: 2688 - DNA, 2300 bp, Homo sapien
tagatagccttcattagcttaattttaacaaactaatatgcatcatggttaaaaattcaaatagtttgtgtgtatttgattcttctaggaaaatatttatgtatactaacatatatgtttatcttattttgtatatatctccgtatatacattctttttataagaaaaggaatatactaacatattgtttactggattgctttctttgattacatagttgggagaatttttcatagcatcatctacaactggactctgtttttattagctatatactatcctattacatgattgtaaaatgaaatctcattaacagaatatgaaaatacctgtttctcaacatattcattaacaactaatgtgatcaaaatttcatatttgttgccagactgtcatagaaaagccagtgtctcattgatcttctggtttgcattcctttagttatgaataagcatttcttcatagatttgttggccatttccacctctctctctcactctacctctctctccctctccgtactcttcctagaaagaacttaattcttatagattaaggctttggtcccaactacaatgttagagactttgggagatgtgaataagagtagacattttactgagaataaattttagagataactataagcatgaagacctgaagaagacaagtaaaagagaaatacttgaataggctattatagaatgaaaagcacaattcacatacttcccaagagtgctaccctttggccgaggtggttctgtcctggacttcagactttaaagagtccttctctggctctcctccagccatgacccacccccataggatgattcaataggtccagggtacaggcccagagctgctgtctctctcactccagctatccaggaccccagaaatctctgtcaactggccctgagatcacctttatgtgtctatcctcttgaagactcaaacagccaatactgtgctcacttctaggtctcaatgaccaagagaggggcagtttgagagatccatgtatgaaaagaacatggacggtatggactaggatatttacactcatgcacgcccgaggtccctcgtgacacaagatgaagccagggagtaggaagagaaccaggggtgaaccacaggggtcagaagcctctgtttgtgctcttgcctggtgtcctacaaatgtttatggcaggcatgcttcccagaagaacagaatttcctagtcactgtcctcaaagaggccatgctacaggaagaaaaggaaagagtaaacataatgaaatgcttctctcttatcattattttagtcaattcactattcaattgattcagtttcagaatcttttatgtgccaattgctcagccagacactgggaatatcaaagtgaataaaatagggtcctggcccctaaggcatcccagtttctcccctgtttaaaacctttcagtggttcccattgtcctcaggataaagtccaaactctttttcttatggcataaaggtcctcaccaacacagccttacctacctaggtaggtgaatctcccccttctccttactccccactctgctccagccacactgagcttttccaccaaatagcctatactttcacatttctggatctgaaaatgtcctcccagacacacccctatgtccaacttcctatttccaatttccaagtctcagcttaaatatcactccctccaggaagcatatctgacccccaaacctgacccctgtgcttatcctaccatcattattatcacatggtattgttggctattgacttgcctccatattgaattagatctttgagaatgggaactacatcccattgagctacacttcactttttaggacagagcctggtagataggagacaatcaatacagatttgtgttttaggttattgcatgcttatgggttagctagggagctttctttttatctttcaggaaagaaaccaaagagacagactctccagcaggcagggggcgccagtgagtgagctaggcatagagtcttgtggagagaattatggtgtcatagaggcttagaatcttggcattagcagggaagggaacccatctggttcagaaggctttggcttctgatagtcatggactcactaggctgctgaggaagatcaataatacctactggaatcagtcatgagaagtcaagcatggaaattgtgaattgtgtgtgtggccagaccaggtaacacagagaaacattgtcttttgggtcctctctccatggctttttcatgtgttcattagttcattacgtat

SEQ ID NO: 2689 - DNA, 2300 bp, Homo sapien
gcccctgctaacccataagaccggtgtgacttccttgatctgagtctgctgccccagactgactgtcacgggctgggaagaggcagattccccccagatgaagtcagcagcagagcacaagggcatcagcgccaaagtaaggatgcttgattagttcttcagggcagagtgggctgtgcttcctctgccccagaaaatggcacagtccctgttctatgggaaaaagaatgtgaggtccctgggtgggctcagggaacagagaggtcatgaggaggggatagcactgcagaaaccaagggtgccttgtgagtcctccctctgtctttttaggcatgatccaggaacatgacaaaattagtgctttaaatagatttacttggggctaagagaaatgtgcctgtcaggaaaactatggggaatcaggacacttctcaaaattagccccactgagtattgtctttataattccttctttttggattagattgtaaaaaagagagtgtaaatgaatgatgtccatataataagttattagccaaccattaaaaagaaagggaagaaataaatcagtttggtttttacacacacatacagacacacacatataaacattgatcaacactgaaatgtttaatagtcattattttcgggtcgtaaaattcactgttcttcaatgaatacttgtagagcacatattatatgcagtagttttgataggttctaggggtatagtggaaaacataccaggtatacgctgctcttagcttattttccagtgggaaagatagacaataagcaagtgaacaaatgcaaataaattactctagattgttataagtgaaattaagtaccaatcctttagatatggtacacagagaaggatctctgacagaccccaacattgacactgaagctgaaaggcataaaagaaccagagacctggggaggggccggtgggcagaaggagagcaggtgccaagcccccaggtggagagctctgggctcatctcaggaaccgaaggccctcagtgaggtaagaatatacctctcagggagagattgacatgaattggggccccagaagaaggcagaagccaggtacccagggtcttttaaaccacggcagtgagtttgaatgttatttcaagtgtgctggtgcactgttggcacgggggagagatgtgctcaaatccccactctgaaagatttcttaagctatttctagagtatgatttacaacaggaaatggatgatttgattctgatctttataccttcatgcatttaaaaaagtacttaagaaagtagtttggtttgtcattataaaaagcaatacttatttttatattgtgtagattcaatcttgtttccttgcctagagtgggccgtgctttggagttcttatgagcatggcattcctgagaacttctctaactgcagcctcgggcatagaggctgggcagcaagtggcagcagcagaggactcctagaagccttctacttgactctacttggcctaaagtcaaactccctccaccaaagacagagtttatttccacataggatggagttaaaaaatatattctgagagaggaagggcttgtggcccaagagaacaccccagaaataccaccccttcatgggaagtgactctatcttcaaacatataacccagcctggacatccccgaaagacacataactttccatttcatgcccttgaaagtgaatcttttggcctaataatgagaacaaactcattttgaaagtggaaaaattgagattcagagcagaagtttgactaaggtcacaaaacagtaggatgcctcactcagctccctgtgcctaggtcagaaaagcatcacaggaatagttgagctaccagaatcctctggccaggcaggagctgtgtgtccctgggaaatggggccctaaagggtttgctgcttaagatgcctgtggtgagtcaggaaggggttagaggaagttgaccaactagagtggtgaaacctgtccatcaccttcaacctggagggaggccaggctgcagaatgatataaagagtgccctgactcctgctcagctcagcactccaccaaagcctctgcctcagccttactgtgagtctggtaagtgtcggatggtagaaccagggttgggactcgggacctccaacagcatacgatgtggtgggggtgggcagcctgggtgggggtgggcattactctggggctggattcagctggactttcattctagggggactcgagtcagagtactgagagaaaagtgccttggcaca

SEQ ID NO: 2690 - DNA, 2300 bp, Homo sapien
actgctcaatgatatatctgaatacgggaaaatgtttaaaactttacatcacttcctgggagttcagttaagatttacttaacttttcgctggttttctgtatctaagacttgagtttctgatgaatgcaatatcttgggaaaagagttaggagaagtaggtcacaaaagtggagccatcccccaaatttctgtggtatacagcagatgtgagcagccgtactttccaaccacttggtcctggggcttcgatatataccggagggctggccctcctgggcacacctggatcccacagcattggctcctgctgtatccagttctgggatgctctctgtcctagccaaatcctactgtccttccactagaaactgcaccttctctaggtattcatcactgaacaggcaagtccctgggagccctgtggtaggtgctatgactacagagaggaccaagttctccttcctaccctcaacagctcttactgttctcattctgtctgtctcctctgaattctgagggcataagtgaggtattgtaccatccatcatcccttcattagatgcttccttgtctaattgttctttataatcttgggtgagacccagaaccctgtgtatcttcatagtgtccaccacattatgagcaaacaagagagggtgcttaataggggtccattgatgcatggtggatgatggataaatggatggatggatggatgaatagatgagacctgaaaggcgcagaaagaggtatgatggaggaagaagagcacacccgtctgggaagcaatggtaaaagttttggtttttaactttgcattctccagtgtctgtaacatatgttgggataatctagatttttagtttatattattgtcttctctggctttgtttgcgtacttctgctggttctcagtggcttccctggtgcccagaggcatgaaaggggaggcaggtataggaggagattctaatatatcaatctgtggactattttgtaagagaggggtctagtggagaaacttgggagagggtatttgaaatagcagaaaccagaagtttggattccctgtgggtctgcattatttggtcacttcaatcccccagtaatttagagaattgaaagcaggatggcagtggggggaaattgttcaagagaatccccaaacagaaataatgggagctgatattttgatcaaatatttactgtcgggtgtgtgtgttgggtatgcagtgtttgcatagactgtctcctaattacatacttgattagcttgaagaaactttggctttttcttttacctatgggagaatttttaaggccttatctcaactcttttcagcccttagagtgtgctctctgagttagaacttacctccctcaatccttttcctctactgcgcaggtctttttggcaggctctgttgctctgtctgggcctaggagaatgcttttccttgcacatgttctctgggtgagcactgtctccccgtggttctttcctgcatcttcattttctgtgaatgtggtgtgcgtctgtgttgcagaagtccccacctcttttcctggtacgagccttgtaaatgtctgggcatctcagaaggctcctccccgtgccttctcctgcacctgcatcccacacttggctctgcttaagttttgggttgggggcaggataaaaaaatctgcagaaatgcggtggggcgcggtgattcacgcctgtaatcccagcactttgggaggccgaggcaggcggatcacgaggtcaggagatcgagaccatcccggctaacacagtgcaaccccgtctctactaaaaatacaaaaaaattagctgggcgtggtggtgggcgcctgtagtcccagctacttgggaggctgaggcaggagaatggcgtgaacccgggaggcggagatagcagtgagccgagatcgcgccactgcactccagcctgggcaacagagcgagactccgtcaaaaaaaaaaaaaaaaaaaaaaaactgcagaaatgctacattttcaaacaacaaaatcatcagaccaagacattcatgccagaggaattctgttttaattgtttgaaaacaggagctgaggggaagcgtggtaggagaagatgcctgtgcatgccgctcatgtttccagcagggcaatgtagatgcatgtcaggaaagatgattagatagtttagaaccagatccttgtctgagatggaaactgcagctgctaattaagaagagtagagctcgaggaagccgccagctgccagcctggtgctgcctctcctgcaagtgtga

SEQ ID NO: 2691 - DNA, 2300 bp, Homo sapien
actgggtcttgaatgtttatgatctatgacacatggtccctttaaggccagccatatttaggtctctatctgggtcacccctggggtatcctctgagatgatagctgttttataagccgagttttatcacatgacagaatgcttcaaaactaagcaggagtcctttattaataaaataaaagggcaatgatgaaattgggaaaaataggagtaaaattcattgcagtaaacccacatgggtgactgggacatgagggatggagctgcccatctgttcacaggcaatacacacataccagtgccttcaaggcaccaggtatatgaaaagccttggtctatgtccatgcaaatctgtcttgctgcgtagtttccttgtggagagttcatatcagcaagagcacagaggactgggggtatgtggaagtgagggctgcaggtggagatggtgttcttcttggaggtggaatgcagaaccagaatctggaacccagaatattacattcttagtgttgctaggcttgggaagaggaagtgggggaggtctggcctggaggggaaaattaaggggctgattaaagtgaggctgaccctgaaaaatgaacagtattccatccacataagacagaaagctcaggagacgttattagtcatggtccccacccaatgacagtgacttgtccaccatggagatgctgactgcggtgatggagtggaaatgagccccaggccaggcacccacccagctccaccctgagcagctgcatgtggttgagcaggtcctttaacttctttgggccagcctctttaaattgtcagtaaaattgtcatgaggattaaatgaggtgagggatttgaaaaatgctttggaaagtacattaaggtattcctatcatttctcaggccatcctaccccttcctctggtgatggcagtggtgagcccttgcatggcctcttgttgggcagcatcctgaggtcgatctttggggtagagggctagaggtggaccagcttcccagaggccctgcctttctccatcccagggcctaggaggctaaatggaggaccagggctccttcctgccacctagataaggccctgagtaggattgctgtatttagcaaataaaaatagagcctgcccagtgaaatttgaatttcatatgaactacaagtaatttttgagtatgtttcctgcaatatttggaatatacttatacttttaaaatattctgttatctgagattcaaatttaactgaatgtcctgtattttatgtggcaagtctaccacaggggccaattctatcccatgttctgtaaccaccacgaatactcctcagcaccccaactcccaatgggcagatggggacagcaccgccgtgtgctggggcaccattcacatcatcttctacctgtgccccagagaagcctcacagaacacttcgtgaactgtccccctggaataggaaggacacttgcactgtgtattgaggaagggggatgagtggtacctggggctaggcattgaatcatccagatctgaattcaaatcccatctctgctgtttaatctttctcagcctcacttttttcatctgcaaaatggtaacaacgacactttccctagaggggccatgaagatgaaatgaaataataagcatgacggatggtcctggtgctagcctcacagtgagtgctcaagaaatggcagcaatttgcagaaaaagggatgttcacatttttgtcagaattgccccaaaccccatcctctccctcttcctcttttttcttcaatatttcttataactgtctgtctgcaaacagctccttcaatttgtactatatttaaaagatcttgaatccctgagtttgagcaaacacctttggtgggttaaatcagctcaggtgcagagacttggaatgctgaaaatatatggtgggtggctttcatcaaaacaggtcagcaaagcaagtccctgaaggaagtgcaggtgggagaagtgggtgaggaattccctgggaggtggtaatcaggaccacaccaagtgcccagggcaggttgggggccctataaaggctcctggagtggctctgcctgtggacaagggctcagcctcctctcctggggtccagcttgtcgcctctggtaagtgagaactcatctgttctcctgggatttgtggggcgctttccttctcctttaactcctttgagccgctaggccaagatcctcttccatccttgggtaatcagggaagtgacacaagtcttctgacaattgcggaaatggcacactaatcggt

SEQ ID NO: 2692 - DNA, 2300 bp, Homo sapien
gtgctccacaaacatttaggtgtgtgtttgggtaaaggaggggttagatgaggaggaggaaccatctgaacacctgagttttaaggatgatttggattttccaaaggccacacctagtaacagtttgtgttttgagtgcagctctgaatcagagacctcagttttatggcaattgcctatggaaagattgagggaacccctgttcttgtgtccccaggaaagagaagttccttggcagggcagaatctgaccatcgtggagtgaaggcaagcatgtgcaggtgctcaggggcttatcacctactgcctcccccagtgccttcacctcagctgtgtcacgatgtcactctgagagctcccctagagcgaaagcaactcaggatagaagcagacattttagttttggcttttcccttcctttctccgaccctggtgccctgagtaatgataaactgaaccttatttccacctattctaattcatgcccttcttactttagcagagctagaaacacccactgtttagagccactcaaatattaagcatctttatttctacttaaagggatttatcttagcaccgattaaggcttacccacaaggcaaggctctttctgtgtcctcacgctgtcactcctaaaactttccagaactacaagtgacccagctctcagtcaggaagggctcccctttccacctctaatcaattttctgcctgggcttaatttcctccatagacattagggagtcacaaggaattaaaacaaaggagaacacaggatttctgtgtaaaattcttttcttcctagggtttgtttttttgaccttggtgagttatttcacctctggtggcctcagattccccaatcatcccttgaggagtgtgaactaaaggctctctgagatccataatctcagtggctctcaactgtgctctgtctcttaccctggggagttcatgatctgtagaggaaaagtgggcttcctcatcagagagctcctagaatgacaggcatgatgggcatatgttaggctccccactgagatttgttgaataaatgaggaaataaacactgtggtggggacaccgttgctttaagcaggaacagctctgaccctcggaaagcccccaggagatacagacccagaaggaggaggaaaaccttgcagccagcaggatctctaggtattggggctggagctggcagtgggcaaaagtggagaaggattcagcattgaggaccccatggatgggctgcagggaggcaggtagaaaaggcttttgggttttcaggtggggggcagtctagcctgatcagaaaggaggaaaaggccagggccagatgtctgggtggagtgaagggaaaaagtgatcccagaagaaggattagcccctgaaagtccctgaagtaggagaagggtaaaggtgtggttggtgaaggaaagcaggttttcccagattagcaaccagtcagggggaggaaggtgagagtgggagagtcataagtaaattattctgaatgtgtgtagtttaatggaattgggaaaaagatgggggaaatggatggaagggtcttggactctgagacaaggggtctataatcagtccatttcattatttctagcttccaccttcaccaaggcagacaaggagggcccacctcagctcctctgctccccctccctttcccacctattcatgtgtgcaagagtgccctgtcccacagaacacggggaacaaccatctcaatgacaaggacagcaggtggcaaggcctcaacaggactcagatgtccccccagggttaactcatgaaaccctccatgaagcctgctgctcacccctccctcaaggcaagccctgcacctgggtctgaggatgagggtggcagtgaaaattaggccagtgacatcattttcagccagccagtgccaaaaaatatcaggtggtgttcatcaaaaaagctgagccaaccggtgatgaggatggtagtgtgagtcatgtgtgacaggtgaggaatgaaaacagagtgcccgagagcttctatttccttgaggcagggctcattcatcttataaaagccagctggccattgccttcacaccaaacccaagggaccacacagcccattctgctccgtataccaggtaagtctctgattgcaacaaactggcaattctagtgtactttttcattattagaaattagctaaaggcaaatatgtgtaagcaggttaatccagggtttcaatgggagatagagaatagtggaatatctttattttaagttaaattacagtctg

SEQ ID NO: 2693 - DNA, 2300 bp, Homo sapien
gaggaaagaagaggcagaactctaggcaatgtgtgtgagtggtccacatagccatggtagaaaacaagagcaagatccagaagatttggagagtgcctaagaggcacccagtaccatccacacacaagtcccaagaaagtcccaggacagtgcagttggatgactcacagcctcctgccaccagagaagggagccagtgggaaagactaaggtacctggggaagtgggactcgccttcagaagccactcaatgtatcctctctaaaactgaggccagacttaccagcacacccaacactgctcatgagaaaacaaagcttctctgaaagaggcttaacgttcaggcgctgagtgtgtttgactaaacaggaataacagggttggggtaaaacgagaatttcaataagctgatggcagagaagcttttgttggggtgaatgaggcaagagttagagaagggcaggagagagcccgcccagggaagggacacaggaaatcagaaaggaatttcctctagaaccaaggtgcagaatcgaggaagaaaatgagggagaccaggattcatagaggagcttccttcctctggggaggaaaatcccaggtggagcagcagggtctagccgaagcccccagggtctgtggctcctgagaggtggatttgctgaggagagaaacctggacccaacactgaaaaagagctaatgtgatgacagagcccagagtttaggcatggcagtggccctggcccatcccagagggaagtggccggtcaaacaaatgctagcagagagggaaggacatgggtgtggaagggagggtaagcctcttctccttcatgaattatcagctcacacctcttctcagctcacaccaggaggcctggcacaggacagtgaatcatgcccaagaaactgccttgtggcttcctgccttcctccctccctccctatctttcctcttttcttttctcttttcttttcttttcctttccttcccctccccttcctttcttccttcctttctttctttctttccttctctctctctctctttctttctttctttcctttcttctttatctatctctgtttctttctcacttcctttctcccttccatgaacctacagctctattcaggagaacaatgactgtccattgacttaacacccatgataaccaggcactgtgtgacgctgaagtagaacaaggggctttcagaacctggtggaaggagctgggcatcaggttcaagggagtaacacagtcgtggaacattgggaaaggaggagctattcacatgcctgagatgtaaggatgtctggattttccaagggccgcgtctagtaagagagtgtgtattgagggcaactctgagttagtgacttgaggttcatcctgtagtgatcagaggaaatggctggtgtatgaacctagggaatcagcacgctcctcttcctatgtcactcctggagaagaaagataccacaagaggcagggtcttcagggctgagccacaatgtcacacagatccagtcaatcctgcctgtccatctcaatgacatctactatccctgatcaacacggcaccttaaggcgcccttcacagtgaaagcaacttatttccaaagcaggcattttgccttccattgctcctcccaggtccaaatccagtaagagactgaaaatcagatgattcacttattctgcaccatccccatggcctcgcagaaccagaaatgcctattgttatttccatgtccacttcaaccatgaggaagcccaataggactaatctggctaaagattagggcccaggccaagaggcctggctcgttctagtcctaggagcatggtacttcctcctaatttaatccattgccattcaagaagacctttgcccacagcaaccacaccacaaagggtggacagtgagtcaggcccaggtgacatcactgtcagagcttaagtgacaaaaaatgttaagccagagatacttatcacaaaagctggaatgaagttagagcagtcttttaaaaaatccaattttcttaaggcagggctcattttctatataaataccagctaacaagagactcttcaccagatcccagaggctgaacacctcgaccttctctgcacagcaggtgagtctccgcattaggaacaccttaatattctccaatagtttctttattttgattgagatctctttgctatgcaatgaatatatttattttaaatgcaataacgacttttgtttaaggtgaccttatacatattttgactttccactcagatt

SEQ ID NO: 2694 - DNA, 2300 bp, Homo sapien
aatgagaaagtctagaagctagaatgagaacagtgctgactgagggagaggagatatgtcaagtgagtgcatcaggtcaacacctaaacagcatattgaatgaaagctcccccaagacatgtgggtctaggaaagacatgggaggcaggggcccagcctcagagctgaggttcaggtcagccaggtcctgggcctggcggcatggaggaccgagaagcaggaagcaggttgccttggacctgataatcccaccatattgcaaacaaagtgtgcttataatttccttcgtagggtctacagggagcaggtttgaggaaaggcttgtgtccaagtctagaaaagagctcaactgatgcaagaggcatggtgatgacagtggccacagaccaaagtgaggtgactacttaaacaaggagagagagaaatagataagtggatgtattcatccattttcatgctgctgacaaagacataacagggactgggcaatttacaacagaagaggtttaatggacttacagttccacatggctggagaggcctcacaatcatggcagaaggcaaggagaagcacatcacatcttatatggatggcagtaggcaaacagagagcttgtacaggagaactcctccttttccaaaaccatcagataccttgagacgtattcactatcatgagaacagcactggaaagaccttcccccatgattcaattacttcccaccgggtccctcccacaacacgtgggaattcaaactgagagttgggtggggcaacagccaaatcataatggataaaatgacagaaatatctgtctcttgctaagctcttacagcttttctcagcttataccatgaggcctgccacaaggaaggatttcccctataaaaaaatttcctgataattctcaaaacagcctctggcgtctcttcacgaataacatcatccacccatctctccatccttccattcattcagttattctataattgtcaattctctgagcagctactacacaccaggcatcacgtgaagatggaaggtagaacaatggctaagcagaggaacttctggtggtagctggctggtcctgggctcaagttcatgagaggtgacacagctgtgcagccagcagttgctctacaaacatttagatgagtgaaaataatgagggagggaccatccgacacctggatttgaaggatagtttggattttccaaaaaccacacttgcaacaggttgtgtactgcaggtagacctggattagtgacctaagtttcatcttatcttgaggagagtgaactttgatataagggctcagggaatcccagctcctttgttccttcccatgttggctgcagagaagggattccccatgatagccagggtcttcagggcctactgtcacaatgtacagaataaatggatggactaaaagggccaggttgctccagagcttccgaacgtgaccattcttcccagagtttcactgctccgaactctccttcacagactgaggtcagcctgcccctatgttgtttaccctgagttcctccttggagaaaaggctttttagaaccgaaataatcattttagtttttcctttcccctgccaggcacgagtatactgagtgatggattaacagaatattactatttttcacctagccaccatgcccttggcctcccagaataaccagaaatacctattgtttatctctacatccacttcatatattaaacagccctacaagtgtcacctgtgctgaggattagactcttccagaagataggacagtttctggttccagcagccccagaatgtcttccttctctctctttcagcccacaccacccttcctgtaaacactacacctgggagcaaagggtgttcagggggataaagcccaggtgacatccttgtcagacagcaagtgccacaagtttcatcacaaaagttgagtcaacaggtgggtgagggaagaggggtgaatcacatctgacaggtaaggaatgtaggcacagcagcccagatggatcctgtttccttgaggcagggcttgttccatgcataaaaagccagttggctgggaacactacaccagttctaagggaccatacagagtattcctctcttcacaccaggtgagtctctttacttggaactctttagcatccattctaggtatttaatttttattagagtctccttggcattcttggtatttttttccctcattattgaatttgatcatagccatgcagactgttcaactgaattataacctctaggaatatc

SEQ ID NO: 2695 - DNA, 2300 bp, Homo sapien
cctggatgtcctaacttggggaaactgtgactattagctgtccctcttcatgttatggccattcctcatgtagctggtctgtgaggaactctgagtttccagttctccacgtcaacttgtaaagtcagcctgtctgagatgctgggggcactaggtctgctgccactctggtgcctgcactgctgtgataagcagcctgtttgagtggggtgtcctaagaaggggagtctcaggttgtgacccaaactgtgttatctcacacagtgatctcatttggcagcgaattcttcaattttgcatggcagaaattagacatttctctatggatttatgttttagatgtgatgtgaggctcttggggagtagtgggtgatttattgagtaaaggacttttactttggctggtgaagtgcgtggcatgtgtaatagtctataggaagcatttggtgagaacaccatttgtaatcacctggcctcagggtgctgacatgatggctctatttctgtagtgtcctggccagtggtgatcttggctaaaagctcttccttactgacaggagcaacagctgttctgggaacctaacctacttaactgagggatgtgatgctggcttgattcaacactctgcccttcctggagcacagttggtgactgctccagtgattttgagtctttcctcttcctcattctcctttcttcttattcacttataaaaccatgttcttgggaagcttcccgattaatggtccagataaggaagcagtagcaacatcactttaaatgtttaatatacagtacttagaaaggctcactgattgtaggaagcatttaaaaaagttgtgaaaggacaatcactaaatgcattgacaacatatgtgttaagtgaacaatatgtaccaaaatggacagatgacaggtatacattgggtatgagttgataatctagcagtttgtgggactagaaggtttatggaaaagacaaaggaagaacatgcaaacaaattaaaaaacactgagaaacatctaaaacctgtttggaaatagagaggaagaatacatattggattaccctttgtttgtattttccccttgagttaaactttaagtgctcttaccttcctcactctgcacacctacttctaattatttacatatgataatgtctatgcagcttgttctctataggatgttcacagggaaccatatatgcatggttccatacatagattttgagtcaatacttgtaactttagtttccttctctccattactttttataaataaaaaggctgtagtacacatccttgatggcaccaagtagcaaacgtgctgtggagactagatctcactctcaaatctgtcctgggatgcaagtgcctctacgaatgtggtgcagaagctacaaatgtggtgcagaagacagcttcaaagaggaaaggaatataggtaaaaatctgaggttttatctgagaaaaaggtggcaaagaaaatttcagtcttgaacagggtcagcagatagcacaatgtggtcagcctgcaaacccagaggtaagtattattgtcccctgtttataatcccagggaggagaggtgacatgcctgttgtcatggaacttagcaaagaaaaagcttagctcaggcctttgttaagtctctccttccttctagcacattggccaactgtatgaggaaagtagaggtagagttgggttcatgtacaacaatatggcattcagctagagtggatcaggacaggaagttttatgactcaggggaggtaagataggaagggatcattgttcccaatcaagaaagagagcccttgacaaccggttagagaatccctccaattatctctctgacgaaagtcactgaaactgagatctaaggcaggttctctgtgactcatgagcacttaacccagtggggagatcccagaacaggatatttcctagtttgagaatgcctctcatgccagatatggatacatttgcattttactttggacattgctggaccagcccagttttaggcagttccacttcccactgggtggggcagaacgtcctataaagaggttccctgctgcacaactcttaaactcctggtactctagcaccgatctgctttggagaacctggtgagtgtgagtccttgagttcctcagttctttgtgacctgaaatattgaatttaatctgaaaacagcaagtttggttgatacaattctgtaaccatgggtttgattctacttagtagatggaaatttagatttagagtacagtgatatgctattttag

SEQ ID NO: 2696 - DNA, 2300 bp, Homo sapien
attggacaatggacagggttgtctcttgtcagcttttcaaattagaattttaggattcctcactcaataataggtaacattcggagaatattttgaaaagtaaaacaagaaaataaacatcatctgtaattataccagccaaatataatcacatttaatatgttgttttacatatttcctaacttttaacaaatacatgttaatgaaaatgttatcatcctttacataagtttttagtaaaatttaatgttttaaataatattaagtaatctttcaaaacatccttcttaattatcttcagaattctactatatctttatctgatacattgaattatggaaagacaatggagactaagccttccattcagaaataaaagcagaaggcagatatgcatgggggcttacagttaccatttctctgagcataagaagaatattttgccatgattcttgtttctttatttgtttacatatttaattttaaatcttcatttgctagcactatttggtttagtggaatgtatcatagtaaaatatgagataaaatgttgcatcaaatattagaccaaataaattttttgttctttcctgtcatttttatgtactagtaattcatacttaatgatctactagaaaatcaggaagtagaagtattaggaatgagcctaaggctatcagactcttaaagaacataaagctaagctctttagacatgaagatagatgataaagacccatgaggggtgtgtgtgtgtgtgtgtgtgtgtgtgtgtgtgtgtgtgaagtatgcctcgctctatgtctcagggcctggatgtcctaacttggggaaactgtgactattagctgtccctcttcatgttatggccattcctcatgtagctggtctgtgaggaactctgagtttccagttctccacgtcaacttgtaaagtcagcctgtctgagatgctgggggcactaggtctgctgccactctggtgcctgcactgctgtgataagcagcctgtttgagtggggtgtcctaagaaggggagtctcaggttgtgacccaaactgtgttatctcacacagtgatctcatttggcagcgaattcttcaattttgcatggcagaaattagacatttctctatggatttatgttttagatgtgatgtgaggctcttggggagtagtgggtgatttattgagtaaaggacttttactttggctggtgaagtgcgtggcatgtgtaatagtctataggaagcatttggtgagaacaccatttgtaatcacctggcctcagggtgctgacatgatggctctatttctgtagtgtcctggccagtggtgatcttggctaaaagctcttccttactgacaggagcaacagctgttctgggaacctaacctacttaactgagggatgtgatgctggcttgattcaacactctgcccttcctggagcacagttggtgactgctccagtgattttgagtctttcctcttcctcattctcctttcttcttattcacttataaaaccatgttcttgggaagcttcccgattaatggtccagataaggaagcagtagcaacatcactttaaatgtttaatatacagtacttagaaaggctcactgattgtaggaagcatttaaaaaagttgtgaaaggacaatcactaaatgcattgacaacatatgtgttaagtgaacaatatgtaccaaaatggacagatgacaggtatacattgggtatgagttgataatctagcagtttgtgggactagaaggtttatggaaaagacaaaggaagaacatgcaaacaaattaaaaaacactgagaaacatctaaaacctgtttggaaatagagaggaagaatacatattggattaccctttgtttgtattttccccttgagttaaactttaagtgctcttaccttcctcactctgcacacctacttctaattatttacatatgataatgtctatgcagcttgttctctataggatgttcacagggaaccatatatgcatggttccatacatagattttgagtcaatacttgtaactttagtttccttctctccattactttttataaataaaaaggctgtagtacacatccttgatggcaccaagtagcaaacgtgctgtggagactagatctcactctcaaatctgtcctgggatgcaagtgcctctacgaatgtggtgcagaagctacaaatgtggtgcagaagacagcttcaaagaggaaaggaatataggtaaaaatctgaggttttatctgagaaaaaggtggcaaagaaa

SEQ ID NO: 2697 - DNA, 2300 bp, Homo sapien
gagtttcaagttcaccacctcaacttgtaaagtgagcctgtctgagatgcggggggcactagggctgctgccattctagtgcctgcactggtgtgataagcctcctgttggaatgcggtgttctcagaaggggtgtcgcagggtgtgactcagactgtgttatctcacacagtgatctcatctggcagcaaattcttcaattttgcatggcacaaatcagatatttctttaaggatttgtgttttagatgtgatgtgaggctgttggggagtagtaggggacctattgagtaaaggccctttactttgcccagtgaagtgcttgacatgtgtaatagtctataggaaacacttggtgagaacaccatttgtaaacacctggcctcaaggttctgatatgttggctctatttctgtagtgtcctggccagtgatgatcttagccaaaagcccttccttactgacaggagaaatagcagttctgggtacctaacctgcttaactgagggatgtgatgctgggttcattcaacacatgttcttcctggagcatagctggtgactgctctgatgattttgtctttcctcttcctcattcccctttcttcttatctacttacaaaaccacattcttggaaagcttcctgattaatggtccagataaggaagctctagcaatatcactttaaatgcttaatatacaatatttagaaaaccttatgattgtaaaagagcttaaaaaagatgtgaaagaacaatcactaaatgcattgacaacatatgtgttaagtgaacaatatgtaccaaaatggacagatgagaggtgtacattggggtgtgagttgataatccagcagactgtgggactagagggtctacggaaaaaacaaaggaagaacatacaaacaaattttaaaacactgtctttcaaacacctaaaacctgtttggaaatagagagcaagaatacatattggattacacttagcttttattttcctctagatttcagactttaagtgctctgaacttctgcactctgcaaacctacttctaattatttacatatgataacatgagtctatgcagcttgttctctataggatattcacaggacactacagaatgttttgggagattatgtaatatttaaaatattcaaattatactaaaaatgtatgtaaaatgtattgaacataggcaagtttcaatacatagattttgagtgaatgcttgcaactttggttccattctctctacttccttaaggtggtgtccaagagtacatttttataaataaaaagttatagtacacatccctaagggcagcaagtagaaaacgtgctagggagactcgatctcactttggaatctatcctgggagacaaatgcctctacaaatggattagagaagacagttttaaagaggaagataatacaggtaaaatctggggttttatgagagaaagaaagaggtagaagaaaaaatttcaagctcgaacagggtcatcaggtggcacaatgcggtcaatgcctgcaaactcaggggtaagtattattctccctgtttacagttccgtggaggagaagtgacttgcctgtggtcatacaacagagcaaagaaaaggcttgagctagaactcaggcctttgttaggtctccccttcctcctagcacattggcaaattgcatgaggaaagtagaggtacagttgagttcatgtacaacaataaggcattcaggtaaagtgaatgagggcagaagttttatgatttagggaaggtgtaagacaggaaaatatctttgttcccaattaagaaagagatcccttgaccatcagttagagattcccccaagtccctctttgccataagtcactgaaactgagatccaaggcatggcttctgtgagtcaggagagcttaacccagaggagagatttcagaacaggatatttcctattttgagtatcctgctcatgccagtcatggataaatttgcatctggcttaagaaattactggatcagcattgttttgggtagtttcacttcctgctgggtggggtagcaggctctataaagagatcctctgctgcacgactcttaaacccctggtacctgagcactgatctgccttggagaacctggtgagtcggcttccttgagttcctctgttctttgtgccctgaaatgttgagtttaatctgaatatggcaagtttggtggatccaatcctatgaaaattgacttgatgctacttagtggatgaaaatttaagattagagcacaattatatgctatttta

SEQ ID NO: 2698 - DNA, 2300 bp, Homo sapien
gtgtgtgtgtgtgaagtatgcctcgctctatgtctcagggcctggatgtcctaacctggggaaggtgtgactgttagctgctcctcttcatgttatgaccactcttcatgtagctgaactgtgaggaactctgagtttccagttcaccatctcaactcgtaaagtgagcctgtctgagatgctgggggcactagggctgctgccgctctggtgcctgcactgctgtgataaacagcctgtttgagtggggtgttctcagaaggggagtctcagggcatgacccaaactgtattatctcacacagtgatctcatttagcagccaattctccaattttgcatggcagaaaaaagacatttctgtaaggatttgtgttgtagatgtgatgtgaggctctggggaagagtaggggacctattgagtgaaatccctttactgcacccactgtacttgacatgtggacacatttggtgagaacactgtttgtaaacacctggactcaaggtgttgacatgatagttctatttctgtagtgtctggccatggtgatcttggccaaaagcccttccttagagactggagcaattgcagatctggaaacctaacttgcttaactgagaggtgtgatgctgggttgattcagcgctcttgctctatctggagcgtagctggtgagtgctccaaagaatttgagtcactcctcttcctctttttttcttatcttccttgtccttcttcttctccaattataaaaccacattcttggaaaggttcttgattattggcccagataaggaagctccagcagcagtattttaagtgtttaatatatgatgcttagtaagccccattgattgcaggaagagttttaaaaagatgtgaaagacattcacattgacaacatacgtatcgagtgaacaatgtgtactaaaatggacagatgagaggtatacattgggatgtgaattgataatctagcaggttgtggggctagagggctttgggaaaagacaaaggaagaacatacaaacaaataaaataatactgtctttcaaagactaaaacctgtttggaaagagaggtagagaaagcaaacatataggatcacactgagttgatattttcccctagatttcagactttaagtcctctgaccttctctactctgagaagaccccttctcttctctatttacataagatactgtaagtctatgcattttgttctctataggatgttcacagggaaagatataggcatggttcaatacatagatttaaaatgaatgcttgtaactttggttcccttctctccatttccttaatgtggtgactaagtacatttctataaataaaaaggctgtagtacacatccttgatagcagcagtagcaaacatactggggagactggatctcactctggtgtctgtcctgggacacaagtgcctctataagaggtgtgtaagacaacttcaaagggaaaaggaatataggtaaaatctggggttctgtgagagaaagacagaggtgaagtagaaaatttcaggcttgaacagggtcaacagatggcacaatgtggtcactgccttcaaaaccagaggtagatatgatgcttctctgtttaccattccagagaggagagttgacctggcatacaacttagcaaaaaaatctgtggccagaactcaggcctttgttaggtccttctagcacactggcaaattgtacgaggaaagaaggggtggagatgggttcatgtacaacaatatggcattcagctaaagtggatcggggcaggaagttttatgatttagggaatgtgtaagacaggaagcattcattgcccccaatcaagaaagagagcccttgaccaccagttagagaatcccccaagtccctctttgccataagtcactgaaactgagatctaaggcagggcctccatgatgtttcccagtttgagaatccctgtcatgccagttatggataaatttgcattttggttgggacattgctggaccagctcagtttaggcagttccacttcctgctgggtggggtagctggccctataaagaggttctctgctgcccaactcctaaactcctggtactcgagcaccgatctgctttggagaaactggttagtctgcttccttgagttctgttctttttgccctgaaatgttgaatttaatttgaatccagcaagtttggtgtattcaaacctatgatcatgggtttgatggtacttagtggatggaaatacaggattagactatgtgatagagtgttttacacagc

SEQ ID NO: 2699 - DNA, 2300 bp, Homo sapien
aacttggggaagctgtgactagtagctgcccctcttcatgttgtggctgctcttcatgtacctggactgtgaggaactcttagcttcaagttcatcacctcaacttgtaaagtgagcctgtctgagatgctgggggcactagggctgctgctgctctggtgcctgcactgctgtgataaacagcctgtttgagtggggtgttctcagaaggggagtctcagggcatgacccaaactgtattatctcacacagtgatctcatttggcagccaattctccaattttgcatgttagaaatcagacatttctctaaggatctgtgttgtagatgtgatgtgagactctggggaggagtaggtgacctattgagtgaagtctgtttactttacccactgtgcttggcatgtgtaatagtctataggaagcatttggtgagaacactatttgtaaacacctggcgcaaaggtgctgacatgatagttgtatttctgcagcatctggccacagtgatcttggccaaaagctcttccttaaagactggagcaattgcagatctggaaacctaacctgcttaactgagagatgtgatgctgggttgattcagtgttcttgctctatctggagcatagctggtgagtgctccaaagaatttgagtcactcctcttcctctttttccttatcttcctcttccttcttcttctccaattataaaatcacattcttggaaagcttcctgatcattagcccagataagaaagctccagcagcactgttttaaatgtttaatatacaatgtttagtaagccccattgattgcaggaagagttttaaaaagatgtgaaagacattcacattgacaacatacgtatcgagtgaacaatgtgtactaaaatgaacagatgagaggtatacattggggtgtgagttgataatctagcaggttgtggggctagagagcttttggaaaagacaatggaagaacatacaaacaaattaaaaaataccatttttcaaagactaaaacctgtttggaaagagaggtagagaaagcaaacacataggatcacactgagtttatattttcccctagatttcagactttaagtgctctgacctctattctggaaaacttctaattatttacataagatactgtgagtctatgcatcttgttctctatatgatgttcacagggaaacatacaggcatggttcaatacatagatttaaaatgaatgcttgtaactttggttcccttttctccattttcttaatgtggtgaataagagtacagttttacaaatgaaaagcctgtagtacactcccttgatggtagcagtggcaaatgtactggagagactggatctcactctggtatctatcttgggacacaagtgcctctttgagggttgtagaagacaaccctcaaagaggaaaggaatataggtaaaatctgggtttctgcaagagaaagaggtggagcagaaaatttcaggcttgaacaggatcaacagatggcacaatgtggtcagtgcctccaaacccagaggtaaataagatgctcttctgtttacagttccagggaggagagttgacctggctgtggtcatacagcttagcaaaaaaatctggggccagaactcaggcctttgttaggtctctccttccttctagcacattggcaaattgtacaaggaaagtagaggtggagatgggttcatgtacaaacaatatggcattcagctaaagtggatcagggcaggaagttttatgatttagggaatgtgtaagacaggaagcattcattgcccccaatcaagaaagagagcccttgaccaccagttagagaatcccccaagtccctctttgctgtcactgaaactgagatctaaggcagggcctcagtgagtcagggcacttaatccagtggaaagatcccagaacaggatatttcccagtttgagaatccctgtcatgccagttatggatagatttgcattttagttgggacattgctgggccagcccagttttgggtagttccacttcctgctgggtggggtagcaggccctataaagaggttctctgctctacaactcctaaactcctggtacttgagcactgatctgctttggagaacctggtgagtctgcttccttgagttcctctgttctttgtgccctgaagtgttgaatttaacctgaatccagcaagtttggtggatccaaacctgtgatcataggtttgatggtacttagttgatggaactacaggattagattacatgatacagtgttttac

SEQ ID NO: 2700 - DNA, 2300 bp, Homo sapien
agattgcaaaaattttctctcattctgtaggttgcctgttcactctgatgatagtttcttttgctgtgcagaagctctttagtttaattagatcccatttgtcaattttggcttttgttgccattgcttttggtgttttagtcatgaagtctttgcccatgcctatgtcctgaatggtactgcctacaaaatcaatgtgcaaaaatcataagcattcctatacaccaataatagacagaaaaatcttgagtgaactctcattcacaattgctacaaaaagaataaaatacctagaaatacaacttacaagggatgtgaaggacctcttcaagtagaactacaaaccactgctcaaggaaataagagaggacacaaacaaatgttaaaacattccatgttcatggatacaagaattagtatcatgaaaatggtcatactgcccaaagtaattaagagattgaatgctatccccatcaagtggaaaaaactactttaaatttcatatggaactaaaaaaagagcctacatagccaagacaatcctaagcaaaaagaacaaacctgggggcatcacgctacctgacttcaaactatactacaaggctacagtaaccaaaacagcatggtactggtatcaaaactgatatatagaccaatggaacagaacggaggcctcagaaataacacatctataaccatctgatctttgacaaacaaaacttactccttttatgtatctctatgtttgtactcattaaccagtgttttttcattctccatcccctgaacacccttccctgcttctggtatctatcatgctactctctacctttatagatcagcttttgtagctcccacatataagtgaaaacatacaatatttgtctttctctgcttgatttattttacttatcataatgacctccagttgaatccatgttgcttccaatgacaggattctattctttttattacaatggaatactatttctttgcatgtatacacaatattttctttatccatttatttgttaatgcatgcttaggttacacatctttgctattgtgaatagtgctgcaataaccgtgggagtttaggcatccttttcataatctgatttctttttcctttggatagatacacagcagctggattgttggattgaatgatagttctatttttagtttttttggagaaatcttcttactgttttccatggtggctgtactaacctatattccccccaagagcatgtaagactttttctttacatcctcttcagcacctgctattttgttttaaacttttattttaagttcaggggtaaatgtgcaggtttgttatatacttaaacttgtgtcataggggtttagcatacagcaatttcatcacctaggtattaattctggtactcattagttattttttgtgatcctttccttccccataaccatcaccctgtggtaggctccattgtctgcagttcccctctatgtgtccatgtgttctcctcatttaacttgctgttataagtgaaacatgttgtatttggttttctctttctgcattagtttgctaagcataatggcctccagctccatccatgtacctgtaaaggacacagtctcatttcttcttatggctgcatagaatttcatggtgtatatgtaccacttttcctttatctattcttttatcaatgggcacttagtttgattctatgtctttgctattatgaatagtgctgcaatgaacataacacattcatgtgtctttatgatagaatggtttatattcctctaggtatataccaagtaatgggattgctggttttaatggtagttcttcaattttaattccttgagtaattgctaccctgtattccacaatgtttgaactaatttacacttccaccaacagtgtataagcatttattttctctacaacctctctagcaccttttattttttttgacattttaatagccatctgactggtgtgagactctatctcattgcagttttgatttgcatttctccagtgatccgtgacattgaactttttttcacatgcttcttggccatatgtatgtctccttttgaaagtgtctgttcttgtcttttgttcacttttcaaaggggctgtttatttttcatgtaagtttgttcaaattccttatagatgctggatattagacgtttataagatgtgtagcttgcagtattttcagtagagatggggtttcaccatgttatagtgctataaatttccctcttaacactgctttagctgtgtcccag

SEQ ID NO: 2701 - DNA, 2300 bp, Homo sapien
gcccctcttcatgttgtggccattcctcatgtagctggtctgtgagaaactctgaatttcaagttcacttgtaaagtgagcctgtctgagatgctgggggcactagggctgctgccactctggtgcctgcactgctgtgataaacagcctgtttgagtggggtgttctcagaaggggagtctcagggcatgactcaaactgtattatcttacacagtgatctcatttggcagccaattctccaattttgcatgttagaaatcagacatttctctaaggatttgtgttttagatgtgatgtgaggctgttggggagtagtaagtgacctattgaataaaggccctttactttgtcccctgatgtgcttagcatgcgtaatagtctgtaggggtaatttggtgagaacaccatttgtaaatacctggccttaaggtgctgacgtgatgtctttatttctgtactgtcctggccagtagtgatcttgccccaaagcccttccttattgacgggagcaatggcagctctgggaacctaacctgcttaactgagggatgtgatgctgggttgattcagcactcctacccttcctggagcatagctggtgactgctccaatgattttgagtctttcctcttcctcttcctcattttcctttcttcttctccaactataaaccacattcttggaaagctttctgactactggtctaaggaagctctagcaacatcaacttaaatatttaatataccatgtttagtaagcctcactaattgctggaagagtttacaaaagatatgaaagaggagtcactatatgcattgacaatatatatgttgagtgaacaatatgtaccaaaatgaatagatgagaggtgtacattggggtgtgacttgataatctagcaggtcatgagactagggggcttatggaaaagacagagaaagaacatgcaaacaaattaaaaaacactgagaaacacctaaaacctgtttagaaacagaggggaagaatacatattagattatacttaatttgtattttcccccagatttcagactttaggtgcgctgaccatctccactctgcaaacctacttctaattattcacatatgataatgtgagtctatgcagattgtgctctatagggtggtttcagggaatcatataggcatggttcaatacatagattttgaatgaatgcttgtaattttgtttcatgtctctccgtttccttaatgtggtagcaaagaatacatttttataaataaaaaggcgctagtatacatccttaatggcagcaagtagcaaatgtgctggggagactggctgtcactctggaatctgtcccaggtgacaattgcctgtacaaattgggtggagaagacagcttcaaagaggaaaggaaaatcgtaaaatccagggttctatgagagagaaagatagaagtggaggagaaagtttctggcttgaacagggtcagcagatggcacaatgcggtcagctcccatctccagaggtaagtatgattctcccctgcttataatcacagggaggagaggtgacctgcctgtggtcacacaacttagcaacaaaaaaaaaaaaaaaaaaaaaaaaaaaaaatctgggaccagaacccaggcctttgttaggtctctccttccttttagcgcattggcaaattgtacaaggaaagtagaggtggagatgggttcatgtacaacaatatggcattcagtaaagtggatcaggacaggaagttttatgatttagggaaggtgtaagacaggaaaggatcattgcccccagtcaaaaaagagagcccttgaccaccagttagagaatcccccaagtccctctttgccataggtcactgaaactgagatctaaggcagggcctctgtgagtcaggagcacttaacccagtggggagatcccagaacaggatatttcctagtttgataatcactgtcaggccagttgtggataaatttgcatttggcttaagaaattactggataagtgtagcttttggcagttacactttctgctgggaggggtagcaggccctataaagaggttttctgctgcacgactcctaaactcctggtacctaagcaccgatctgccttggagaacctggtgagtcggcttcctggagttcctctgttctttgtgccctgaaatgttgaatttaatctgaatacagcaagtttggttgatccaatcctatgaatgttgatttgatgctacttagtggatggaaatttaggattagagcacaatgatatgctattttagc

SEQ ID NO: 2702 - DNA, 2300 bp, Homo sapien
aagtagaagcagcagtgggaagagccttgtgtgtatctccagtctccagaatttacatgtgatggtgtgagtctacgcatcttgttctctgctgtgaggaaccacataggcatggttcaaagcagaactgaaggaaatagagacacaaaaaacccttcaaaaaattaatgaatccaggagctggttttttgaaaggatcaacaaaattgatagaccgctagcaagactaataaagaagaaaagagagaagaatcaaatagacgcaataaaaaatgataaaggggatatcaccaccgatcccacagaaatacaaactaccatcagagaatactacaaacacctctatgcaaataaactagaaaatctagaagaaatggataaattcctcgacacatacaccctcccaagactaaaccaggaagaagttgaatctctgaatagaccaataacaggctctgaaattgtggcaataatcaatagcttaccaaccaaaaagagtccaggaccagatggattcacagccgaattctaccagaggtacaaggaggaactggtaccattccttctgaaactattccaatcaatagaaaagagggaatcctccctaactcattttatgaggccagcatcatcctgataccaaagccgggcagagacacaaccaaaaaggagaattttagaccaatatccttggtgaacattgatgcaaaaatcctcaataaaatactggcaaaccgaatccagcagcacatgaaaaggcttatccaccacgatcaagtgggcttaatccctgggatgcaaggctggttcaatataagcaaatcaataaatgtaatccagcatataaacagaaccaaagacaaaaaccatatgattatctcaatagatgcagaaaagacctttgacaaaattcaacaaccttcatgctaaaaactctcaataaattaggtattgatgggacatatctcaaaataataagagctatctctgacaaacccacagccaatatcatagtgaatgggcaaaaactggaagcattccctttgaaaactggcacaagacagggatgccctctctcaccactcctattcaacagagtgttggaagttctggctagggcaattaggcaggagaaggaaataaagggtattcagttaggaaaagaggaagtcaaattgtcccggtttgcagatgacatgattgtatatctagaaaaccccattgtctcaggcatggttcaataaataggttttaggtgactccttgtggtttttgttcacttctctcctttctttaatttggcgattaagagtacattttttaattccttaaaaggtctgtagtacacatctttgagggcagcaaggaggaaaaacaccgaggggacttgattccactgtggaatctgtcctagcagagaaatgcctctatggattgggtggaaaagacagctctaaaaacacaaagaatataggtcaaacccaggattatataggaaaaaaaaaagagaggaaaaaatttcaggcttgaagaagagtctacaaatagcacaatgtggacagtctccaacccagagccaggtattattctctcctgtgaacacagaaagactcaaacccagggaggagaagtgacctacctgtgatcacaggacttgccaatgatagaactatgttcagtttctcattacttctagcaaattggcaaattatactaagggagtagaggtagagttgagttcatgtacaacaatatagaaatcagctaaagtggatcagagcaggaagttttacaattcagggaaaggttaagatagaaagggatcctttcccccaatcaagaaagacagccttggaccaccagttagagaatcccccaattttctctctgccataagtcactgaaactgagagctaaggcagggcctctgtgagtcatgagcacttaatccagcgggagacctcagaacaggatatttccttttttgagattccctgtcataccagttatggataaatttgcattttggatgggacattactggaccagcccattttaggcagttccgtttccccctgggtggggcagcaggccctgtgaagaggttctcagcctcatgactcctaaactcctggtacttgagcaccgatctgctttggagaacctggtgagtctgcttacttgaatttctctgttctttgggccctcaaaagttgaatttaatctgaagacagaaagtatggttgatccaaacctctgatgacagttttgacactacttagtggatggaaccttaggat

SEQ ID NO: 2703 - DNA, 2300 bp, Homo sapien
ccagtccttgcacacatccttcccccactcaagagtcctgcccccaatgcacctcattgcacctttcctttggctgcccccacagagaccccagagatactgtgggaaagggcttctgtgtcctctttctcccaggctacccttcctcaggagatggaaaccttgctagtcactcaatacctgcaaaactggagtttccggtacaaaaaaagagttagacacatcacattagtaactggaatgaggcacccaaaaaacggaaaactggggcaaacccttttgttttccaaaagtttgactgtgcttgggatcaaaggtacaagattactttttatgccaccttaatcctctgaagcaggaagttgaagaagagacagctactgggattatccctaaaaggagagaagagttccattagggcttgggctagccttcatctgggccggaagaagattgtatggttggactgacagtgaccacttttttcaaggtggggttttaaagaattaggatagttaagtgcataaatagacaggcggacaaacataatataattctagaattaactttggaactcttacaagtcttcaatattagagatgaagaaataaagtcatggagatactgaggaacttcactcagacagcacagctggttaatgtcagtaaagctagcatccacatgttcacatcctatctcacgttctttctacaaccccaagagggcttacttcacttaaattgaagtcaaatcccagctattcagaaaccacaaagaacagtcttcaaatgaggacacagacctgagaatttgagtgaaggccttgggacagaacatggctaacacttccagaacccccaggcttgtgatattcgattactccctggctgctctttcagagcctgtggtttggacaataagaaagagtgaagttgtcctacagacagagggaaataaatatggaggttgtcctacagagagagggaaataaatagagggaaatgatggaggctctaaagggaagtcaaacagaaaaaaaaatctcagataagaaaaggaatcatgggatcagaagcacatattgaatggaaatctgctctaaaatacctcctgatggtctttcagcctctgcttgaagtctgtccacaatagagtgctctgtacaagggaggcaaccagatttattattaatgaacttacttagaaactatttccttggttggactgaaatgtgcttcccagtgacttctgttactttaggagaattttgctctgaactacagagcggttccctccttgtcactggaggtgtcagagcagaggctagaagtcctgagtcagtgatgctccagggagttccttccatggggttggaggtggcaagactcaagtctctcactggcttcaagaatcatttatgccttggttcttccccacctaggccactcttccacctgctcatggactcctcgggaaattttacagattctttcacaccataaaggatggggcaggaaagattcactcagtaattcagaggcattcacattttttactttgttatagtttaatttttagcagatgggctcagaaattcatctatgagaaggccctatgaaagagtctatttgaaatgttatagggacatacatttctcttatatgttgacaaatgtttggcataacccatatgtaagccaactatgaacaaaagctttgatcagacctatttcttcctctttggtcactcttccaagaactccaatttcatgatgttgctttagtagaatttaaagagcaggctaatactgtgtaattaatagcatttagttttgtaccatctcaggatattaattacaaacaacaaaagctcactctgactgattaaacagaaaaagggtttattaaaatattattgggtagattatagaactcttggaaaagccgcagaaccaggcttgaggctaagcatataggggaaatgtccaaaaaccacaccacaaaactagcctggtgaggaagttctactgccacagcgactgctccaccattgctacatcatgccaggaacacatctttgcctcctcagccagccgcaaaagggagccaccacccctgccagcaaaatgtcttctgcaaggagaccctcttccaattgttcctttccagagcatagctctgactggtagagcctccgtcacagtgcgcaccctgactgcaaaacagactgtgagatttactttctgggttctaccttggggagaaggaatacaagtctgtaaaatagtccatacatagtga

SEQ ID NO: 2704 - DNA, 2300 bp, Homo sapien
ctgagaacttcttgagcaagaaataggagagggaagaaaggagaaagagaaagataacaatggctagtagaaatcactacattttttacattgctgtcacaaatgactgccatctccatatctagattggtagctttggtccagagctgaacataggtgaggctgggtctcctgagatgggggtgagagctgcttctcaacagctttgaggagagagagctgatgaacaatattatggaagaaagaggaaattcttatgaaaggagtgagctgcacaaagactatgactctatcgccaattattccagtgatagggggttaaatcccaacccattctcctcttttatttaggttcatttgaggtttaattgaatatggcattatttatccttgtgaataaaccccatatgaggtttctccatcttcaactcatgatcttctattcaataaacacttgttaaactgaaatgaactgaaggcctcaggtctccccagtggcccaagggccaaagccatatttccaataaccacccaagagggttgactctaactaaactcttctcagacttaaacccatattcttttagcacaaatctgttcccctgtttcctcagctctcattaaaagtaatactaacaccccaaaacctggtgaaacattgtcccaaagagttaaacaaacgagtgactaatacaaattcttgagtttacatgatagtagattttaaaaaaagaacaacttgctgaaatgctgaaactctctccatttgtaagataacaaaattggctgaagtcattggagccaatctggcagactggagtctgcacagaaaaagcgtgctgatgtcacagccaaatttccactgcatgtttcatactgaccctccccgaaactgcacatgtgacccatgaggtagcatgaagagataacttcccatgcccgaggactttttccagccctcccttttccttccaccagtcacctactaataccagaatctaatccctaacctttcccaataaaatgactgccttaaagccagcacagggagacagattcaagctaaactcttgtctctttgatggtctagttgcagtaaaaagcttttcttttctcaaaaacctggtgtcatcgtattgccttctagtacactaggaagaagcccttttgctctggagtcatcttcaattcttaattttctgcacagtcagtaaataagtcccatgaatctacctgtctaatgaggtctttctcatgggcacccagacccatgactgccttccttcagatgtggagattttcataatttctttaaaacagtctcattcgacttttacttcaccaccccatctcccaatccatcctaatatttaaataccttaggcataatcatgtcacaattttaatcaaaagtcactagagattcattcgtgatgactgccacgatgaacctcctaaacctgagttcaggcaccctgtgtctaagcctacccacctttcgcactccagcctcccatcgccactcctaacacacccccattccaaccacaaagaccctggtcaggcctttaaaaaaggcaaggaaggaattctgagaggcaaatctttgtgccctaaggcaggatctggggctaacccaattgtgtggggtggtaagaagaggtttcagaatctcacattagaaaaataaagaaaagaagaatgtcaaaatggcagtgatcaattcagggttgctctcctagaagggtggggaaggagcaggttcagaggaattaaactttgagggtggaagaggagctggagaccatgtgtcaacagtgggccagcttttctgctcccagcaacaatgagcctcccatcctcagagcccaggactcttcactgcagcctcattttaccagcctgaatgttgaggggtctagggaggggtgggacagccaaggggggtgattcatcatggctctattctggtgttcagggcttgttgtgctgggagctatggagtcacacaacaattgcccctcgatgatgctgcaatgacctcataagtggaggtcatttcccctgcccccacccccagcttcctcagatctgggcagaggaaccaaagggaaaagccaccttcccaggcacagccataacatccacctcactcaactgcttgtcaagttcaccaccaacacagaggggtaagttgcatttggacaggtggaagtggccactctttggcctcttctaccctgggagtgacctgaagtaccccacgcactgagcagggttgggaaagtcatgtttgaatg

SEQ ID NO: 2705 - DNA, 2300 bp, Homo sapien
gacacagctggcaagtagcaaagggagcacccaatctgtcacctaatctcaagtctatcccattcaatgactgcccctcaggctaaggtcagtgttttgccacacaacaccacaggacaacagagccaaagagcctttgtgggatcacatggtccatctctttagtttgctctgctgcaaggaaagtcagtattgattacccttctcagactgtctcaaatgcctgctgtctctggggatgaatcaaagtagcttcccacgtcacattagttacagcactgtctatggtgtgcagtccagagctgggtgctggggactcatgcctccagtgggcaggacagaaacaccccagcaaaacacacatgaaatcctgggagataaacttttgcaaaggagtaacgggttctaaagttttgaggatttttagagtagcaggaccagaagtcaaacagtaggatttagaaggtcctactccttggataaagcactgagatcttcagtttgactctcttagggcacctcaagactctgggacctattcctcaagcacagccctgtggtcacctggtatgcatcctgtgccagaggttttggaaacaatgtctgccatccactctgactgggtgaccccactgatgagcctgccacactgttgcatcagagaaggggccagtcacacaccaggctgcccatctcaagaatgccaaaaccttcatgaatgggccatcctgtgcctgcaatcacagggaggtggggccgacagccacgggtcacgtaactgaggccaaacacaagaagctggcctggatcaatgagtcagggagagctctatatataacctcaggagatcagtgctcctcacattgccagcatcttctctcctcactcacccttcctggtgctttgggtaagtgtggttctactgactctctcattttcccagctggtcttgcccaggcctgactagattagatggaccagggcctctttcccctttgggagctataggacctctgccttcccaaaagcactcacatttagagggcggtcaggaaaggagcaggggatgagctgctgccatgcagatggtgtttctggtcttctggccagaatgtaaactccacaaagacaagactatctcctgcctctctggcacccgcataggggcaggcatggtgccgggcacagaaggactctgcagaggctgtccaaggcagcctgtgcacaggctgagcagaccttgtgaacctgtcaggaggagaggctgagccactctcaagagagtagggagaatgatccaaaaaagttgcagatgggagggatttcaggtgccacagaaatccaattgctgttttacagagttagaagttctgagagggaaatacaacttcctactagtcaaagtcccttctaccaaacttggacttgagaaaatcatggaagagatggctaatagcttctggtcggggatgttggtccaaaggaccaccagggtccttcccctgtttccaggcagggccacagcagagcctgtcttttctagtgactagcccttggttcatggcctagctcagtgggacagaccaagagtttgaactaagagcttctgcagaggatggagtgcaacagccctcaatagaatgaagtccgacaaacctctctctgttgtgctgggaatgggtaaaatctcctatcctaggtagaggtttgtggtagttttctatttgcactcagagaatcagtgttgagattggaagaggcctgaaagatgaagtgttcaaaccctttcatttaacaggaaatgagaaagaggcgggcgtgtgggtgatctgccctcaaatcacacaacagtggtcagaggcagagctgggagaaagaatgggcactgctaactgggctgtttaaagcataatgaaggctttctgcaggggaatgaggaactcaacttttccaaaagcagcaatcataagaaaccccgctgagggctctccgggcacctgaaggagccctgggaggatggcgatgttgcctatggatgcagctgcctccgtaagtatcctcttgcagctggtccagcgatgctctcttctccccttccaggctctccttccttctcagacaagatgtcttatcagaaaaagcagcccacccctcagcccccagtggactgcgtgaagacctctggcggcggtggcggtggcggcggcagcggcggtggtggctgcggcttcttcggcggcggcggctcagggggcggtagcagcggttctggctgcggctactccggcggcggtggctac

SEQ ID NO: 2706 - DNA, 2300 bp, Homo sapien
ttcccagggagggagtgccctctagggccagggggagtgaaggcctgaggaggcaccagctggagaagaagggcaggtcctggaggccaagtctggaagggaaggagctgctggccaatcaggggcgagccgactgcaccctgacctgctgggctggaacagcacagaacccacaggtatctgtgagtttgagtgtgtgtgtgtgtgtgtgtgtgtatttctttagaagtcttcattcagcaatgggacggaagtctatagggttaaaatgtgtacatggtagggaaagctcccctgatctcgttttttggaactctttctccaaataagaaaattttcttcattctaaattcttctaaatgagtttggtttcaccactgctggatctttcttggcaaggctgtgggttctgaggttacctctacccaatttcttccttttctgtagagccctaaattcttatctattatgtctcacttgtctcctggtctaatgtttctttcagtatacaggatgcacagcaatgtgagccaaggtggtaaatccttggctctagcttatcctaccagcttagtgtttgcagttcatggtgtggattggagacattatcagttctgtctctggcaaggtcagggactgggctgaagccttgatattttggatgtatgatatgaccagcttggggcaggatttgccatactgacgtttcatggttgtggaagcacagtgattaagtgaccagggtgcaaaccagaattgatagtggcttccagtagctttgcaggaggccagctcctaacaggccttcaatcttgggaaagtgaatccttacctctcatttaactaacgagggaggctgaacatttttccttatatttattaggtgcctgcctcatttgtaattagctcattttgtcttcactgcagttttcctgaatgaatggaatcctgggtgttatctgctaagtggttgcttgtcctgacccaggaggcttccacatgttctactcttaagacatggttttaaaaattttccatttggggactgctgattgcagtttaaaaaccctggagggcaatgatctatcccatttggtttcaaactccactttatattttctcagtaggaaaattggggggaaagttgatgttttgggtggtagctcatacagctaaagtttcagtctgactgagtatgagtaagcaattcacttctacctgaaagagcaggaaagattcctggagctggaaaagactatagtgatcctatagttcaacctcttgggcccacattgagaacgtccatcagaaactcaaacaggttgtgaagtttcaggcagaggctctggagtcagacagacctgggtatgaatctggctctgaccctattatctgggaaacttaggacaagtgactcaaactctctgaggcccagtgttctgatgataagtgcgggtctcataggtcattgtgagactacttagtgaatatccatggagtcctcagcaaaaaccttggaacacagaatgcagtcagtaagtggtagctgttattatgattctcactaaagaagaggttagtcgaacaactgtcagggatctttgcagagtagatgactgaattgaatgactttacatacctgggactctcaaatggtgcagggggcgaagccaagcctgcttctgcttgtagttcactccatctgagcctcaatgttcttacctataaaaattgaatcaaatatgaaattgcaccactagatatgaaaataaatacacagtgttttttcataacagctaccttgaggattttagaaattgttattttctaccctgaaaggcctaagatcaggcactgcgcttctatgaggaaccaggagttgcccagggcaacaggaggtgggtggggagtcggtggctagacatagccattagtgccctcacatttattgggaacctgatgtgtttaaggggccccgagaagcctgagccaggtgctggccctcaggaagccacaggatggtaggggaggcagacagtggtgccacatagtaggtgggtgctccacttgcagagttagcatggttgtgttaactgttagcctctcttccagggctgccgtccacactctcccggtcagagtcctgggaccacatggggacgctgccatggcttcttgccttcttcattctgggtctccaggcttggggtaagttttatttacttgcatcagaagtgcttttgatgagcaagagaagaccgttctcaagtttaataatagaaacccatccgagtgctttc

SEQ ID NO: 2707 - DNA, 2300 bp, Homo sapien
tctctctttctttctttcttttttctttctttctttcctttctttctttctttctctctctctccctctctctctctccctccctccctccctcccttccttccttctttatctgacaaatgcttattgagtttctaacatgtgtcagcattatgccagacactaagctaaaccctgagactacagaataaagtaaattcccacttctgtgaaattcacagctggagggaggcttaagacagaggacaaaaaaatgtaaatataaataatgatagtattaaaggcaggtaaagagatagacttgggaactgctcttgaggagattataattacaattcattcaggtgctagaatggagaagagagactctgagcctctaccagtcccaactagtcacggagccctttccaaagatgccaggctgaagtggagcctctgggcgcaggtggggagcgaggctgggcacttgggaagggtcttgagatggtgggaggtggggcagagagcactgggagcctgctctggcagcgtggagtgagatggggctgggggccagataatttaggacttaggaggtcctctcgggattctgagttcacagaatcagagagggacaacccacactgctctcttcctccctcccgatgccctcgtcccggacagccctcagtctgttagtcctcaagaatctgttggtctctggatggggcagagaatctgttggtcccctttggcagccaccacccaatctcttcttgggcttcccctccccaagccgctccaaaaaggggaaccgagtctcctcaagtccttggtgccccggatgcaagcccagaaaccttctcattttgagaactgttctacttatttaggatgggcggccagcaaaaggcatggagaaacagcatgttgccaggctggggaaactaccagggtccctacagtgctggtcccaggctgcagttcttggtctccttcatctctgtctctggctctgccccacattcaccctcaccccaggacagagctcagcagcccctgctcatcacacagctccagcctgggtctgggtgcatgactgggatgaatgccaggtagacctggcgcatgctcaatgggccccatccagagagcgctcctggggagcccagtctgagagtgggactgcagctcactgagagcaactgttctggattcagggcacttcctaagtgtctagggaggctgccccaccctccgggacatgagaggctctgcaggtccccgtggagactgcatcctactgcgttcttggaaagtgtcatgcagagtttcctctgtgaagactcaagggctgtaagtccaggttgcagaatgtggaatgagattaggtgacaactggaacatggcgaggagctggagattcttggtttgtgggaggctttctgtggtaggtggcagcttgatgccgacggtggggagtggcaggcgggaggatgatgggcagacatgtaagctattggggcagaattaggcatcgtgagctgtttcctgagattgtacctcccagtttctctctgtccatcctgaccctgctcatgaccctggtaaaaggtggtgttggtgagtgacttcaatccacagtcttcaggctcctggagcagaacttcacaggcaggaagtttctagatgttgcagacacaaccctcaggccctgcaggctttcccaggttggggctgaggacgagctctcgggagtgttgggcaatcttgccctttcccagggaggagctacctgggcttattcacagggcgggtccccaggtgctctcagcctgagtctggtcccacttgcatttctccaggtgctgtgaaaggagctggctcagagccttgccctctgtcttcccttctccccatcttttgttagggatcctgggctctcttctctctgggaagctagagcccgagtgctccattcccagggagggagtgccctctagggctagggagagtgaaggctggaggagaaggcgccagttggtgaagaagggcagggcctggaggccaagtctggaagggaaggagctgctggccaatcaggggcaagctgactgcaccctgacctgctgggctgggacagcacaggacccacagatatctgtgagttgagtatgtgtttcttcttcagaagccctcttccagcaaagggactggaatccaccagaaagagtgttaaggattggatttcctctgccctagaactaggaacccctcctactcctatatctccctcatctggcatattcccagctgggaag

SEQ ID NO: 2708 - DNA, 2300 bp, Homo sapien
tgctggctgctggctgctggctgggtttcctctattagcttaaacaatggaaggtggacttggataggaaatctacctcatgtattcctgagctgtgtctgcaccgttcattcattcgtaggcgactcatgtattcaagcactcatttatttattagatgcttgctgtgtgcttagcactgtgccaagccctgtccttagctaccaagagtttaaaacgtaatttggaagacaggatataagattatgtctcccctttgtattgcgactcactcatcaagttctcccagcatctagcattcatatctggcactcagtaggtgctcaacaaatatttgttgcataaatgaatgaaaagattattagtaataataccttttatttactgagctcttcccaactttccatgtattgtcgcaatcctcaaggtaagtcctgatattatcctattttattgataagaaaagtaaggcacagagaagttaagtaaactgcctaaggtcacacagacagtctgaagtcttaaccactactccaggtgcatctcagcagtgtgaggcaggccatgcttagggccaatgcttagcacacacagagattgcctcaggctttcagaggacaaagcagtcaggaggggctggggcaataaaggaaggcttcatggagacagaacaaaataaccagtgcaggtagaagaagagaaccatctttcctgatagagagagggggcagcaagcaagagggagtcccagggtggatcatccatactggcttccaggggtgacgggaaaggatgccagcaaggacttcagcaaggatcaatcagcaaatccgagggtgtctctcttgccaagccccgggctgtgtgcataggagaaggagaacatgaatgagaacctacctttgaggatctacagccaattgttggacagaggcaaaatatgtatataattttactccaggaaagcaagtgttgagagccagaagtggtatgagaatcatagtcaggaagacagaaactgtttccaaatgggaagcacagagcagtctccttggaagagagtgcattagaactgagccgtgggggcgggcaggatatcactgtggagtaggggaagggcactcctggggtggcaaggtgggaggtgggccctgtgttcccacagtgggcagggaggtagtgaaagggaagctggccggacaggcagggccattccaagagggctttgtgcgcagggctaagccaagctttctccataggcaatggggagcaactggaggttcgtagcaggagaaggacacatcttgcccaccaggaggctaagtaaaaacagttgtctcccaagttataagttcctggaacccttgctgggagcaggatttagaaaaatgatgctgagagatgctagaaacatattcgccctgaggctctctcactcagactgcaagaggaaggtatcatcagaattgcccttaaccaggaaccagaatagctgggtccccttcctgccaagtcagcaaccagctatgtgaccttgctcaggtccatctccgggtgtcagtttcttcatctacaatgcaagagggttgcccacctctgagaacccttctaaccccaaatctcaccctatgaatctaagaacaccaacccctcgccatcctaagtatcacagagccaggcaagcatgggtgagagctcagaccatccttgttggactaaaaggaaggggcagactgcccatggggggcagccgagagggtcaggcccccataggtcctcagcctgcttcaacctcaaaggggatggggggctgagtggtgccagaggagcagcaggctcgctcggggagagtagggccttaggatagaagggaaatgaactaaacaaccagcttcctcccaaaccagtttcaggccagggctgggaatttcacaaaaaagcagaaggcgctctgtgaacatttcctgccccgccccagcccccttcctggcagcattaccacactgctcacctgtgaagcaatcttccggagacagggccaaagggccaagtgccccagtcaggagctgcctataaatgccgagcctgcacagctctggcaaacactctgtgtggctcctcggctttggtaagtgagctgccagcttccccaggcagaagcctgcctgccgattccttctttccttccctgacccaacttccttccaaatcctcctcctagaagccctccttggttggccctgcctactttaaagcttctttcacattttcttaggtcatgttcccctggggcctcctgc

SEQ ID NO: 2709 - DNA, 2300 bp, Homo sapien
gagtctcactctgttgcccaggctggagtgcagtggcgcgatctcggttcactgcaagctccgccttgtgggttcacgccattctcctgcctcagcctcctgagtatctgggactacaggtgcctgccaccatgcctggctaattttttgtatttttagtagagatggggtttcaccatcttagccaggatggtctcgatctcctgacctcgtgatccgcatttagcaacctcttgcctggatggctgggatcctgggctagtcccttctccaggcagatgtgaaaaaaaaaaaacatctcaggatcccaaacttactaagccagagggaaaagtcaagctgggaaatgggtcatgcaagcctgcccccacccaggttggtttctaaataagatagctacaaagataaaaagccatacaccaatctcacaacttgcccacaaggaaattccttgtgagcctcaagatctttaccctaaaacagttctattgaatttcaccctggcagtgtaattgacagcttatcttcacaggtgtgggacaaagggcagaacataaagtcatccctctgctcacccaagacaaatccatatctgattgcttcctctcccctatttttgttatcttatgtaaaaatgcagattcactgagccagatgaaggcataagtgactatttcctctactccgctcccacatgaaaattgtgtattcagtgaaagattgatcaaagactcaaaaggatgcaatcacttgtctcttatctactgacacatttaaaaaatatttcttcctcttcccccaatatccactgtttctccttcaaatattgaagccctcaaaatcatctttggagaaagacgtagacctacctctgggcacgcatccttaactttggccaaataaacctcctaaaatgattgagattcaccttggtcattgtcattgatttacacaagcctgatcatcctgctctggtggtgtcctcctgggcctagtgaaacaaatactgtcaatggcttaacaatgttgcactgagattgtgtcagtcaaggtgacacatggatcggagagacagacttttgcctccagatccagagaggtcggtgggcacatgaaatgaactagctttgctaagggggatatctgtgttgtggggtagatggcagcacaggttctggcatggccttgattgctcagcaatcttattgacctctaggcataaaccaagggcagagtgcttttggatgtcccttagctttggtgcgacatggggaatgtacagatgagacttaatccattttgggcaggtttctgaatcttgaaggaccacctctccatgaatcctgggcatctgttgtcccttgctgcctctctgtgagtaataaagttgctttactaaaactcgtgtgaatgttctgtcttactgaactcatgaacatggtaaagtaacctaggcatggtgaactttcttcacacacaatgattaccctactccagctttctaggtctttgtaacagccaagttagaaagttgggaaagcaaaggggaggcatagtagcattgctctctccttttttgaaaaccttggaatctattttgaaaactgatcctctgctccagtgatgaactttgcatcccagaacgacttaggaggaggtctccctacctatctccttagctgcataaagatctttaagttgatattccatttgccaaaactgaagagctggtaacctcatctgttaaaacaagacactcaggctgtaaagtttgttctcctagtcttttattagggagcagtggagtagagctaaacctgaaacctgggccctggctcagggctaaaaaaggttcagggcacccctgtgcgggtgggtggagtgggggtgattttgtttcaggctgagcaggagggcaaaattcagtctgggtacaatctgggctgctcctgtggcagcctaagccacaggtttgaagcttctattgagcaacagagtactttacataaattgcctcaagatgaatcagagatttcttcacccaagggctaagatgaagcctgaactgattataaaaccttccttggctcagtgcccttcaccactgctggctttttgctgtagctccacattcctgtgcattgaggggtaagtgcattttccttggatgggttcttaggtggtccacagggtagtgactgcaggtgaccactttgaaatcacaaggtgttggaaaccacaaccctccacttgcctgagcacctctggggtgatattgcattttggacccaagtagatca

SEQ ID NO: 2710 - DNA, 2300 bp, Homo sapien
ggatttagccctcggcaacaacacatgtccccacaaaacattttcttcatccattcatgtgttgagggacacttgggttgcttccaccttttggctcttgtaaataatgctgctatgaacatgaatgtacaaacatctgtttgaatccctgcattcaattcttttgcatatatacccaggagcagaatgatggatcatatggtaattctgtgtttatttatttgaggaacaaacttgccgttttccataacagctgcactattttacattcccactaacagtgcattaggcttccaattctctatgccctcaccaacacttgttttctgggttttaaaagaagtagtagtcatccttgtaggtgtcaggtggtatctcattgtcgttttgcttcatgttttcctaaagattagtaattttcatatgcttattgaccatttgtatatcttcttcggagaagtgtctatttgagtcttttccccaatttttgattggtttgtttgttttttgttgttgagttgtagggattcttttatattctggatattaatcccttatcagatatttgttttacaaatattttctttgtaacaacagaaacacaccacagtcttcaaggttggaagccagttaatctgagtagcattttgttagtggtggggagaggatttgttcctcctgaaatcctggggaattggccacctcctcttctcctcttaggcatgaagcgcgtctggcttctccaaagaactcttcccctccactacctcagagttagcttcctctcttcagccagtgatcctggggtcccagacacaataattaaccaagagagggtgaaaggctccctgctgtgtttatgcaatggctcaggcccttgtgaagtgccgagggaccccaagcagcctccatctcccagggcatggtccatccccagcttcacagaacaggaaagctgtggaggagtgtgggcagcagggtaggaatggatatagcccttggcaacaacacatttccccacaaagcacccacccaaaagaacaacaacgatagttttagtttttagtaatgagaacaatagttctcatgactaaaagccatcagccaggacacgtgttctcaacccttttgcggtctttggaccctttgaaactctgacagaagccatggaggaatgttctcactgagtgcatgcactcaaaatgatgcattcaacttcaattcagtttcagggatgtatggcctgaccaccaatgcaggggattagcaatcgcaatagtggagagggcatgggagtgggaatctggctggatcaagcaagtggatgccagcagcccagaaaaagagcccccctacctgctttttccttctgggcactattgcccagcaaatgccttcctctttccgcttctcctacctccccacccaaaattttcattctgcacagtgattgccacattcacctggttgagaaaccagagactgtagcaactctggcagggagaagctgtctctgatggcctgaagctgtgggcagctggccaagcctaaccgctataaaaaggagctgcctctcagccctgcatgtctcttgtcagctgtctttcagaagacctggtaagtgggactgtctgggttggccccgcactttgggcttctcttggggagggtcagggaagtggagcagccttcctgagagaggagagagaaagctcagggaggtctggagcaaagatactcctggaggtggggagtgaggcagggataaggaaggagagtatcctccagcaccttccagtgggtaagggcacattgtctcctaggctggacttttcttgagcagagggtggggtggtaaggaaagtctacgggccccgtgtgtgtgcacatgtctctgtgtgaatggacccttccccttcccacacgtgtatccctatcatcccacccttcccaccagagccatagccatctgctggtttggttatttggagagtgcaggccaggacaaggccatcgcttggggcatgaatcctctgcgtactgccctggccagatgcaaattccctgccatgggattccccagaaggttctgtttttcaggtggggcaagtccgtgggcatcatgttgaccgagctggagaaagccttgaactctatcatcgacgtctaccacaagtactccctgataaaggggaatttccatgccgtctacagggatgacctgaagaaattgctagagaccgagtgtcctcagtatatcagggtgaggaggggctgggtgtggcgggggctctctgcct

SEQ ID NO: 2711 - DNA, 2300 bp, Homo sapien
acagggacaaaaggcattacaggcaggaataggaagtggatgctgtcacatcacatcatgagtcactcaatcatttgatacgctgaattactatgtctctctgtggggcttagtttcctcatctgtacaatgggcattataatagtacatacgtcattggattagtgtgagaattaaatgatcaatgcaaataaagcagcacttagaatagttcccggacatgggaaaagctcagtgagtgtgaactagtattttgtcatgatttgctctgatcagtgattgtggctgctgttattgtgtgtgctgggcactgtgctgggtccccaatggctcacatccagagagagctggatttattttggagggtgaaagactccctgctatgtttatgcaatggctcatgcccttgtgcaatgcagagggaccccaagcagcctccatctcccagggcacggtggatccccagcttcacagaacaggagagctgtggaggagtgtgggcagcagggtaggaatggatttagccctcggcaacaacacatgtccccacaaaacattttcttcatccattcatgtgttgagggacacttgggttgcttccaccttttggctcttgtaaataatgctgctatgaacatgaatgtacaaacatctgtttgaatccctgcattcaattcttttgcatatatacccaggagcagaatgatggatcatatggtaattctgtgtttatttatttgaggaacaaacttgccgttttccataacagctgcactattttacattcccactaacagtgcattaggcttccaattctctatgccctcaccaacacttgttttctgggttttaaaagaagtagtagtcatccttgtaggtgtcaggtggtatctcattgtcgttttgcttcatgttttcctaaagattagtaattttcatatgcttattgaccatttgtatatcttcttcggagaagtgtctatttgagtcttttccccaatttttgattggtttgtttgttttttgttgttgagttgtagggattcttttatattctggatattaatcccttatcagatatttgttttacaaatattttctttgtaacaacagaaacacaccacagtcttcaaggttggaagccagttaatctgagtagcattttgttagtggtggggagaggatttgttcctcctgaaatcctggggaattggccacctcctcttctcctcttaggcatgaagcgcgtctggcttctccaaagaactcttcccctccactacctcagagttagcttcctctcttcagccagtgatcctggggtcccagacacaataattaaccaagagagggtgaaaggctccctgctgtgtttatgcaatggctcaggcccttgtgaagtgccgagggaccccaagcagcctccatctcccagggcatggtccatccccagcttcacagaacaggaaagctgtggaggagtgtgggcagcagggtaggaatggatatagcccttggcaacaacacatttccccacaaagcacccacccaaaagaacaacaacgatagttttagtttttagtaatgagaacaatagttctcatgactaaaagccatcagccaggacacgtgttctcaacccttttgcggtctttggaccctttgaaactctgacagaagccatggaggaatgttctcactgagtgcatgcactcaaaatgatgcattcaacttcaattcagtttcagggatgtatggcctgaccaccaatgcaggggattagcaatcgcaatagtggagagggcatgggagtgggaatctggctggatcaagcaagtggatgccagcagcccagaaaaagagcccccctacctgctttttccttctgggcactattgcccagcaaatgccttcctctttccgcttctcctacctccccacccaaaattttcattctgcacagtgattgccacattcacctggttgagaaaccagagactgtagcaactctggcagggagaagctgtctctgatggcctgaagctgtgggcagctggccaagcctaaccgctataaaaaggagctgcctctcagccctgcatgtctcttgtcagctgtctttcagaagacctggtaagtgggactgtctgggttggccccgcactttgggcttctcttggggagggtcagggaagtggagcagccttcctgagagaggagagagaaagctcagggaggtctggagcaaagatactcctggaggtggggagtgaggcagggataaggaaggagagtatcct

SEQ ID NO: 2712 - DNA, 2300 bp, Homo sapien
ccaaacaattagaaaatgggccaaagaccttaacagacatctcatcaaagaagatacagaaggtgacaaataagcatatcagctgatgctccacatcatatgtcctcaaggaaatgcaaattaaaacaacaatgagataccagtacacacttatgagaatgcccaaaatctggaacactgacagcaccaaatgctaaagaaggatgtggagcaacaggaactctcattcattgatggcaggaacacaaaatagtacagccacttgggaagacagtttggtgctttcttaaaaaactaaacatactcttaccataggatccagaaatcacactcttcgggatttacccaaaagaactgaaagcttatgtccacacaaaaacctgcatacacatgtatatgaacacattgcacagtggtgaagtccgggcttttaatgcagccatcctaaataacacgcattgtacccactaagaaatgtctcctccttcacccaccacctgacctcctgctcttcactgtctccagtgtctatgattctactctctctctacctccatctgtatgcatgatgtacctcccacttacacatgagggtgcacagtgtttgactttctttttctgagtaatttcacttaagataatagcctccagttccatccatgttgctgcaaaagtcatcatttcattctttttatggttgagtagtattcgtctgtgtgtgtgtgtatgtgtgcgtttgtgtgtgtgtttgtgtgtgtgtgcgtgtgtgtgtgtgtgtgtatcttttgccgctaaaagtaatattgccgtcatatgggaaactgggagagggagaaacaggtccccctggttacataagaactgacagagaaggaagttgaagaaagatgatgggtggagaaaataggtcccacctagggagacatcacatcagctctatggagccccagagtgcttaaagggctggcactaaatgaaccaggacctcttgcggcctacaaggaacattgtaagggggtagcagaaaaagtccatttcagtgattcatcatctccttttcctcaccatgccccagggactcctgtgccttcccaaccctcttgcccctacctggttcaggctttccacagcaggttagggcacattatagccaagggcacaactcccaactcctacacaggctgttttgcataggaggaggaaaaacactgaagactttctgggaagttagtgccatggggcaggaaagaacttttcccactccctacctccaggctcattccatggggcggggggggcgggggtcactccaccactcaacctagatagtgaggcccctgaccccagtccccccacctaaatccagggcttctgtgaggggctgaccaatggttagcaatgaagtaatcctgcttccctccctggactttgagttcccatagggcagaccctgatgcaacccaagacctatagcacaggggataagagtaaggatttgattcaggcttttctttgttcgtgtgatgatttgttgtgtttactagctgagtaaacttgggaacatctcaacttctcctttcctaaaatagagattgcagcacctgcttcttaagactatgaggggagggttgaggaggatgcaagagcagcaggtgtcttgatgtctagacattaaaacgctcagtaagcggtgggggtcatagaacaggctgtcacaacaaatgtgtggaagtactgggggagggaataaacaagaccatgctgcctttgggagtctgaaactccattctctttgggtccagaggcccagtgctcttttctcccatttcctgacctgttactacacatgtaccgctgccttaccctcaaatcaagattgagccagagaaggccccaggtgaggtctctggggtggggtgggacctggtgacctgggaccctggccagaaatcctgagcacagcctcctgggtgtgtcccacacacctgatatgggacaagcctccaagaaacagatgacagaggtggccccaggcctcccaacccgtgggaagagccaggctgagccttataaaggactgctctttgtccaaacacacacatctcactcatccttctactcgtgacacttcccagttctggtaagtctcacctgcctctttgcattttctagaagtgcccagtgcccagcctgccatgctgcctgtaggaagggaaagggctgtggacaaagtctcagaagcctgggtctaggccagctctgccattagctgggctgtgtgaccttcacttgaccccaaa

SEQ ID NO: 2713 - DNA, 2300 bp, Homo sapien
tgggagaaaatgtttacaaaagacatatcagactttgtatgttatccaaaacatacaaagaactcttaaaactcaacgataagaacacaaaccaaacaattagaaaatgggccaaagaccttaacagatatctcatcaaagaagatacagaaggtgacaaataagcatatcagaagatgctccacatcatatgtcctcaaggaaatgcaaattaaaacaacaatgagataccagtacacacttatgagaatgcccaaaatctggaacactggacaacagcaaatgctgaagaaggatgtggagcaacaggaactctcattcattgatggcaggaacacaaaatagtacagccactttggaagacagtttagtgctttcttaaaaaactaaacatactcttaccataggatccagaaatcacactccttgggatttacccaaaagaagtgaaaacttatgtccacacaaaaacctgcatacacatatatatgaatatatggcacaatggtgaagtctgggcttttaatgaagccatcctaaatagcatgcattgtacccactaagaaatgtctcatccttcacccaccgcctcacctgctgcccttcacagtctccagtgtctatgattctactctctacctccatctgtatgcatgatgtagctcccacttacacatgaggttgcacagtatttgactttctgagtaatttcacttaagataatagcctccagttccatccatgttgccgcaaaaagcgtgatttcattctttttttatagctgagtagcattccactgtgtgtgtgtgtatgtatcttttgctgttaaaagtaatattgccatcacatggggaactgggagagggagaaacaggtccccctggttacataggtactgacgagaaggaagttgaagaaagatgatgggtggagaaaataggtcccacctagggagacatcacatcagctctgtggagccccagagtgcttaaagggctggcactaaatgaacctggaactctcttgcaccctaaaaggaacattgcaagggggtagcagaaaaagtccatttcagtgattcatcatctccctttcctcaccatgccccagggattcccatgccttcccaaccctcttgcccctacctgggtcagcctttccacagcaggttagggcacattatagccaagggcacaactcccaactcctacacaggctgttttgcataggaggaggaaaaacactgaagactttctgggaagttagtgccatggggcaggaaagaacttttcccactccctgcctccaggctcattccatgggggggtcactccaccactcaacctagatagtgaggcccctgaccccagtccccccacctaattccagggcttctgtgaggggctgaccaatggttagcaatgaagtaaccctgcttccctccctggactttgagttcccatagggcagaccctgatgtgacccaagacctatagcacaggggataagagtaaggatttgattcaggcttttctgagtccatataatgatttgttgtgtttactagctgagtaaacttgggaacatctcaacttctcctttcctaaaatagagattgaagcacctcttaggactatgagggttgaggaggatgcaggagcagcaggtatcttgatatctagacattaaaatgctcagtcagcggtgggggtcatagaacaggctgtcataacaaatgtgtggaaggataaggggagggaacaaacaagaccatgctgccttcaggagtctgaaactccatcctctttgggtccagaggcccagtgctcttttctcccattttctgacctgctactacacatgtaccgctgccttaccctcaaatcaaggttgagccagagaagactccaggtgaggtctctggggtggggtgggacctggtgacctgggacactggccagaaatcctgagcacagcctcctgggtgtgtcccacccacctgatgtggggcaagcctccaagaaacagatgacagaggtggccccaggcctcccagcccctgggaagagccaggctgagccttataaaggactgctctttgtccaaacacacacatctcactcatccttctactcgtgacgcttcccagctctggtaagtctcacctgcctctttgcgttttctagaagtgcccagtgcctggcctgccatgctgcctgtaggaagggaaagggctgtggacaaagactcagaagcctgggtctaggccagctctgccattagctgggctgtgtgacctt

SEQ ID NO: 2714 - DNA, 2300 bp, Homo sapien
atattttcttcctgttccacccaaaggaccctgactccatcgtcctaatggagccaggctgggacatcaggggactgaacaacagtgcacaaccaggctccaggcaggcctcttgcacagctctcctagcaggggagggatgcagtggcttcacagccccagtgcactgctctcattgagagacattttgtccggggttattctcacctagtccttagaatggggagagagtcactcagagacttggataatgctcaatgccacataatcagcaaggtgttctttttttttttttgagaaggagtttcattcttgttgcccaggctggagtgcaatggcatgatcttacttactgcaacctccgcttctcaagttcaagcgattctcctgcctcagccttccaaatagctgggattacagggatgtaccaccatgcctggctaattttgtattttcagtagagacagggtttcaccatgttggtcaggctggtctcgaactcctgatgtcaggtgatccacccgcctcggcctcccaaagtgctaggattacaggtgtgagccaccacacctgacccagcaagctgtttttatcaggtgttggtataaaacctagatgattgtttctttggctgggggacagtattgcagggaaggcaggctaggctagcattcctgctgtcatttatttccattcaggagtcaggtccctgaccccctacctcatgccaggcccttccctaggtgtgggcagtgggcagactctgggggtcgagatgctgacagtgtcattgactcagctggggctcaccctgaagtttcggggtggggatgacaccatgcagtggtgcgagggcagggctgggagcggggtctgagctgtctctccacctgggtccacaaaagatgaaggagagcagcatcgatgacttgatgaagagcctggacaagaacagcgaccaggagatcgacttcaaggagtactcggtgttcctgaccatgctgtgcatggcctacaacgacttctttctagaggacaacaagtgaccagggctgccctccaccctcaccctccaccctttgctgctgacctcggctgctcctctcacagaccctctttggccccctgccctcctctccctcccagatggacccttccatgggaggaaataaagtttccatcgcaggtgctgggagtctggttttgaagctgtcttgtctaccttggcctggggagaggggagcacaggaagggtctctccttgagtgggttgagacagcttctgcctctgggggttagggtcctgggctcccactgcattcctctccttctttggtgtggacgtcattggttttgtcatggcttagttttgcctgcctggaaaatggggaagttaggccaggcgggaactctgcaaggatgcagaggaagttaagagggaaagttgctttgagaggaggacactgggaggggttgggagtggctcctgagggcggtgataggcaggcaggcctgacttgtccacagctcaccggaggccaccttggcagcacctgtaggaagggcatgtctggcctccacaccagccccctccctcttcaccatttccccttcaatagcaccactctcatcatctatgggggacagtgctttcttctctccctgcctcctccatcaaaatcttttctcaggggagggtctgaaaaggccttcactcccccgtaaataacgaatggtgcttacagggctgggctcccacgtgcatgcacattaacaccaaaggtgctgtagtgaatggaatttggggcactgaggggaaggagtggaggtgttggtaggaacttgttgctggtgggggatgggcgccgtagatatcctttacaccactggctactccccctatctcctctggggtgaccctgagtatcctctgtgggacaccggcatcctgtgaggcgccctccttgcccacattgacgctgcgctggctcgagggtcacattcacggtctggcagaggaagcaggggtgaccgccgcagtcctcctcctgctccccttgccgagtcacgtgtcacgaagagcaaactgagcaaactgagctgcgcagatgaggggagactcgtcaccaggcgtgcagtgggcactgctgggctcccccatcccgtcctaacccggaacagccccgggcaggaggcgtggaaagtcgagggggtaaaccgcgaatgtgcgttgtgtaagccacggcgcagggtggggcgcgggcgggacttgggcgggcggggtgggcttggccgagctg

SEQ ID NO: 2715 - DNA, 2300 bp, Homo sapien
acaacgaggtggacttccaagagtactgtgtcttcctgtcctgcatcgccatgatgtgtaacgaattctttgaaggcttcccagataagcagcccaggaagaaatgaaaactcctctgatgtggttggggggtctgccagctggggccctccctgtcgccagtgggcacttttttttttccaccctggctccttcagacacgtgcttgatgctgagcaagttcaataaagattcttggaagttttgaggctgatggtttgagagactctgggggcgtgggttggggactgagggatatgttgtggggtggtggtggggagagctgggagttgagctgaagttttatggacagcagaccagtgaagttaggggagggatgcagggtgactaacagtgtgtgtgcacaggcaatagagttcactcggtgtggtcaaagccgagaaggggacccctcaccacccccctgccaaggtttggaaggtcccagctgtgggatctcagccagcccacttacccctcccacctctctccaaccttgcctctggcaggatcttgaaccgaggctggaattgaaggtcatatctgttcctggttggggtctggaatggagtttgggtgtcctgggagtaagtcggagggaaaagaataaggctgagttgcagggaggaagtatttaggcgagagtgggatggggaggagggctggcactcagtgctgacgttgacagtccaggccctgtcctgccacccacttccagatcattggcttcaaaccacagggatggattaatcctttcctgtgcgtggtaggatcagggagggcaatgtggagggagacccgctgtttgcagcagcatgagaatataggcattctcgaatccaccgtctctgccataaaggtccctggatgagatctgttatcagtcaggaatcaagctccttcagagaaggacaggggacctcagaagagatgagtgggggtcagtggctggagtgggagtgaggcaaatggtgggaaggtgaccatagttttggagacaaaattccacatatatgatctgacaaatgaaattgagattattttccccccagaaaatataaggcatgatattgcttccccttaggtaggttcaaggccagtggctccagggtgcagtggtgggttgaggttagacttcaaggccatgtctgggtgactcagggatcttttaggaagaggtgcatggaggtcaggtgcagaggctggagggctttgtcccactgacctcctcttgagggtcctctttcctctcatcacatggggcttttctctcaggtttcagaggagtggggcaggtgactcagatgttcccgcagggtttgaatacagagacttgggaggaatttcagttcaggagaaagtctgctgccttccgctgccctctccatccaccctccctgggagcgccctccctggggcctccacccaggtcacgctctccttcagagatgcctactgcatagcaaccaatccctgctgcctctccaatcttgccagctgggggtggggtggagtggggagcagtggggaggccccccaggctggggtgggactgcagcagtgataggtactacaccctgagcccaggtctgttcttggactggtggtagaagtatgttgttctactgtggtagaacgatgtctgagtgtctcctgggatacaggaaactctccctggcccctacttcctccttgactgcagcctgaacctgaacccccctccccaatccacaacctctaccccagtgctgggccttagcccttcgctggacaccttccctattcctgattctcagtcctccatgccaagagtctccgacgagcctttcctgtgaagagcagtgaggcctagaagaaatcgttcatttaaaagccctttaaaaacctctgggcccatattagctcatgaccttgaccatatccttcgcagaaaatatcttcctccactgatccccatctcaagggctgtcttctctactcctggagtgggtggcaggatgggtgggaggggcccgatgtggagagcttcctaggacacggggagatggtgccctgtgtttgtcccacacttctgaggttttctttccaggacagcctggtttcccttcttcggcttattgttccatcagatttcagattttgagttctgatttttggtcagaagagtaaagtttctgggattggggacgtgtgtgctatgggaactcagtgtgtccccagcccttgtttgtaaacaaggaaggtgagattggcagaagggg

SEQ ID NO: 2716 - DNA, 2300 bp, Homo sapien
gaggctgttctgccctcctcatcctactcccttacctctcccaacccttcccttgcacagactgagtttcgggaatgtgactacaacaaattcatgagtgttctggacaccaacaaggactgcgaggtggactttgtggagtatgtgcgctcacttgcctgcctctgtctctactgccacgagtacttcaaggactgcccctcagagcccccctgctcccagtagcctctgctccagggggtgcgctggctgtcgggggctgggcatgtctcccacaccccctcctaccctctctcctgtacccctttcaatctggacttgcccaggtcttctgcgatcagttaacccattttacctaggaggcccagagatgtgagggctccttcctcaggatgcccagcgaatgaggggtagagccactctggggcccagcctgcctgccgcacccctgtggcctcccttgtggatgggaggaggcgggatctgctctgaggccctcgaggctcagcagagcgtgcaccaatgagaccacgatgggaaagggcctatttaactcctaataaaaaactggcatcagcttggttttgtttggttcttctctgaggacgcgtctcctgagctctttgctcctctctggccttttccactgcgggaaggcagctgagggcaggggcagggtgctccctgagggaagttgcagaccctgcagaaatgcagtggcctccagggtccagcaggagggcgtggggacaaaacaaggacccctgtcctcccttcctctctctctttctttgggatctttgagagaggactgcctgagtttcccctgggactcagtgctcatggttggaggagggtggggccgtgggtgcagtgggggtgtttgttccctgcctcgggctgtgggagcccagagagcagcactaatgggattagggtgtctgaggtgtttctcccagccaggaaggggtgctctgtatggaggggtaagggaataacttgagctagcccctatccctgaagccgcagccccctgagggccttaaccccctacttctaaccctcactgggtttgtagcccaccctgagaggttgacccgaattataactcccctatttcatgccatttcacctctaactctccaccccaacctggattcttcattcctgacactcatcccaactttaaatggcccctcctgataccctctccgaacctgagatctatccgtgagcccccacgcctcactgccactccactccatcactacctcacccaggacctttcccactgacgttcctgaggtggtcccagagcctcctttgggtgtgagcctgttcccctccagatccccccgccccgaccctgagccttacttggcatggcagacagtaccgggcatggggatccccaccccagtttttgtttctgaatctttatttttttaagagacaaggtcctctgtgttgctcaggctggagagcagtggcttgagcatagccaactgcagtctcgaactcctgggctcaaatgatcctcctgtctcagcttcctgactagctgggactacaggctacagccatgctgcccagctaattaaaaaaaaaaattgtttttcctttttatagagacagaagtctctctatgttgcctaggctggtcttgaactcctggcctcaggcgatcctcccatctcccccctagcttttgtgtcaccacatttccagggcaatctcccacctgtcacccaccaccccctgcatctcctttcctaggtccccatgggactactccctgtcccccatgctccaggcacaggctgccccttcctccacctctctaaaactcaggctgagctatgtacactgggtggtgcccatctcatccagtcccctgctagtaaccgctagggcttacccgttacccacgggtgcccacctgggaacaggaggcttggttccacggctgggctggtggagggtgctgtggcacttaccgcatcagcccacagcaggaaggcagtatccgctctcccctgtcccctgctatgggcagggcctggctggggtataaataggtcagacctctgggccgtccccattcttcccctctctacaaccctctctcctcagcgcttcttctttcttggtttggtgagttgtgttggcctgactggcatgcaaggggtgtcagaggccagggctggggaaggagaaggggaggctggtgggggccagatgtgctaaagagatccagatgtgagattctgatgtggaactctgggtggattgtgtgcgtg

SEQ ID NO: 2717 - DNA, 2300 bp, Homo sapien
aaggtgtcactggcgctctggctgcctgcacgggcaggaaggcttctttgccggcctgggagtcaatctccttcctcttttccctctcacgctcttctaggttttgggttctcttcctataaaacagggaggagtttctcaggctctggtgtgagggagagaatagagaagttacatgaaagtatgtctgtttctggtaatatggtggtctgtgcccacttcagcttaaaaacaacaacaaatgctgcatagaattaaatcttttcaaagcattgaagagaccacaaggcagtaagaaatgagtaggccaaaatctaagtcaaagcagaatctgtactggggccccccgtgccctgaggtcattggccaagccaagccgaacctgagctttgatcctgatggtttggggagtgaggaagacagaagtggaagcccagttctcaccccaagaggggacacaaatggatgaccctcccatgatgctgagaccccaaaaggctacacactcaagctaaaagccagaggaaatcccatcctgccacccacaagacttcaaggaaagttgttttggtgctgagcagagcaggggaagaaggaaaacagcccttaaggagctccagccactggccagccttcatgtgactctagcccaaattcattcccatcacctggggtggaagggccagaaatctcaagcttagactctggaagtgcccctgggaggaacacacctccttcctgtgcctcaaagacatcccacctgatgatttcccccctgggaagcaagcagttcacagccaaaagctgggatctggtcaggcaagttcagacttctcgtctgtaaaggggaggcttagccacgtgctctccaagttctacccggaatagagatttgtaggggtgcaacctgagcgaggcagaagtgtgtccccacttggtattctgggggcctctgcagagtgaagagatggggctgtgatgtgatggataagccagactgtctcctccaactgagctggaaggacttggcaggagactgtcccctgttcccaactctgggggagggcagatggggaatgaaaggggagtggtgtctgagcccagactggcctttgatgtgtgcgtggataggtgggcaggtggggcctgtaatgggtctgctgagggatccctgagggcatcctcagtgttgacctacttgtgtcccccataattgcttccttcctttcttgggaggctacaaatagtgacgccctgtctctaagctcctacagctgaaacgccagcaccagtggtgagtgccagctgcttgggtcctgccctgggttgagtgtcagggcagtttggggacccccagtagccagcctgactcctgacccagggtctggcattggaagcagagagatgaccacaggcgggcctgacacggggagggaagtcagatatagtggacgcagaggtttccttacacagtgaggggctgttggggaagtttgggcagggaggtgtgtagagctaaggtctgccttggggtgggagcactgggctcaaggctctggtcttccccttgatcaggcccctcacctgctccttgcctccttgcttcacctctgagtctcctcatttctgaggatcatggccctttcctctcctgggaacctggacaccttgctctaatcctggggtgtttacaatgaattaaatcctggcagtgcttggcactccccactccccttcccctactttcctgccagccacaaccatgccagccatttgctcccagcagggggcccagcagtgggcaaatcttcagggagagtcttggccctggccgccctgtgctgcaggactcttgtcccgtgggggaatcaggagtgagtcactgggctagcatggaaaaaactcttgccttcctggctgccttcgggttttcccaggctggaggcatcatcccagaagggcggtggaaggggacagtggaagtggggggaggtgagcaattccaggaagggcttcccctccaatagaacagagtatccctatacagaacctccctgctcaaaacccccaggggtcgggagggtaacctcaggggaggccagtctcagattggtaaacacccgaactggtcaactctcaagagaccatctggttcaggttcctgactgggccagcgaggtgagatgaaccccaacttacagatcaggccccgcccctgagacccagagagacaaatggctcaccaaggttgcacagctggcgacaggcagagaggatcccacaagtttttcttctgggtg

SEQ ID NO: 2718 - DNA, 2300 bp, Homo sapien
tgggcgagacccttacctcatgcagaaatgagtaagaccggtgagctcaccatgtgggggtgaggctgagagaaaacaagtacacaggtgattcagtcaaaatcagaattctctaagtacacacgaaaagggcaaaaggggcgctttgtacaggacagaacaggtagacactgaatccggttgggccctgggaaggctccctgcagtggcctttgaagggggggttggatttcagcaggatagagggcatgggcatgtgtgggcacgttctgaacagaggggtcagcgcaagccgagggtcttggccacactagttgcatgtgccggtgtgtttaagggacacgcagcagcaggccgagtctggagcgcctcactgccaggctttttaaaaatttttaattttaatttaattttattttatttttactttaagttctggcatacatgtgcagaatgtggtttgttacataggtatacatgtgccatggtggtttgctgcacctatcaacccatcatctaggttttaagccccgcatgcatcaggtattagtcctaatgctctccctccccttgcccccatccttctccccgcaactgcccacaggccctggtatgtggtgttcccttccctgtgtccatatgttctcattgttcaactcccacttatgagtgagaacataccgcctggctttaagggacagccatggggatgcactgcagtttctgagcagggaaggccctgtggaggcccttagttaaaaggaaagaatggctgtgaaaatcgatgcattgcgctcccttgtccctcaccctcagtgtgaagggtttttattccgagttctacttgaagtaggcctcgatgggaagacaagtagcatgaggggttcaagtactgaggggagcaagggacactcggtggctgtgccaaggtgtagaagaggacactgggggccccaaggcctgacttcatgtacactgctcaggctggcccccaagtcacacggtgaccgctaggaagggaccagcctgttctcagtctgatcctcctgccatgtcattatccaaagctcctcctggcagggcctgtttggggtctctgtgccagtgctttccctgccaggctgggctggggcttccacctactgctctgggactgctgctgccctggccctgggggaggagggtgtgccgctgagtcactgcctgggcatctgggcctggaacctcgggtgagtcacttagggctgaggtagaggggctgggggaggggaagaagctactcgacagctggagcagggaggggagctggggccacaggaagggcggtgccctgatgcccagacgggccgggatagacaaagggccaaggaggaaggggccctgggagggggcagccctcccttgggctgggctctgaatggccacagtgtttgcctttctccgggtctggggaggacatgtgtgtggggggcagtgagagagggctgtggctgagggctgtgcttcaggcctggattctggcttgggaagctgtccagctggtgttttcagccttgggtagggatgtacccctacccacccacccagccctcaagctggagaagaggaggccaaagttttcctgttcagcctttaactactcgggacttccttatgctccccacagactgtggcccagcccaactgcggctgtgtgtagagcaaccccatttctcactgcttccccatccttccagacaccttcctacacagagggaccttcccaggtatttctaagcacacttagttacctcattacctcattaagaggtattctggtgctggccattaaaagtcactccacttcatccatgccctgaagtcagtcctgtccttctcctcctgatgtcccccagctgcctcctctggcccccagcttcctaagggtggccccaggttgcttctctctcacacacacgggcgcatgtatgtacacgagcactggaccatgaagtctcagcgtgtgctcacagcctctcacacaggagtgggctgtgactcacaggcatgtcatgagaatgaggcctggcaccagtctccaggccccagagcaggggttgcctcccctcaccccggtccaggatgcccagtccccacgacacctcccacttcccactgtggcctgggtgggctcaggggctgcccttgacctggcctagagccctcccccagctggtggtggagctggcactctctgggagggagggggctgggagggaatgagtgggaatggcaagaggccagggtttggtgggatcagg

SEQ ID NO: 2719 - DNA, 2300 bp, Homo sapien
ctttctccctccttccctcccaccctctttcctgtcttttctttttttttttgacagggtctttttctgttgcctaggctggggagcgttggtgcaattatggctcactgcagccttgatttcttgggctcaagtgatcctcctgatgcagcctcctgagtagctgggactatggacatgagccaccatgcccagctaatttttatatatagatatagtttacaaaattttaattttcatttttatacatagagatgggctctcgctatgttgtccaggctggtctggaattcctagcttcaagcaatcctcctgcttcgacctcccaaagtgctaagattacaggtgtgcacctctgctcctggcctcttctttcgttcttaggaacaggtgtttatctagccagaagctgggcaggttcagaaggtcattctttatcacttcactgagggatgcttttgttctgagagactaattattgtgcatctttatgaccacaacataaacacaaacattccaggaattagctcaatttcttcccagaagtaaagtccctttgagaatccaaatgcaaaccagaggctagttggtgaatggagagcctgaaggtggatgagcttaaaggattgcttgagtaagcctggttgatgatgtgtgtgtctatcatcctgtagggagccagtttcttattttgtttttcgttttttttaatttttatttatttttttattttttattgatcattcttgggtgtttctcgcagagggggatttggcagggtcataggacaatagtggagggaaggtcagcagataaacaagtgaacaaaggtctctggttttcctaggcagaggaccctgcggccttccgcagtgtttgtgtccctcggtacttgagattagggagtggtgatgactcttaacgagcatgctgccttcaagcatctgtttaacaaagcacatcttgcgccgcccttaatccatttaatcctgagctgacacagcacatgtttcagagagcaccgggttggggtgtaaggtcatagatcaacagcatcccaaggcagaagaatttttcttagtacagaacaaaatggagtctcctatgtctacttctttctacacagacacagcaacaatctgatttctctatcttttccccacatttcccccttttctattcgacaaaaccgtcatcgtcatcatggcccgttctcaatgagctgttgggaacacctcccagacggggtggcggccggggagagggactcctcacttcccagaaggggcggccgggcagaggcgccccccacctcccggacgggacggctggccggccgggggctgaccccccacctccctcccagacggggcggcttgacgggcgggggctgccccctcacctcctggacgggacggctgccgggcggagacgctcctcacttcccagacggggcggctgccgggtggaggggctcctcacttctcagacggggcggctgctgggcggaggggctcctcacttctcagatagggtggccgggcagagacgctcctcacctcccagacggggtcgcggccgggcagaggtgctcctcacatcccaaacggggcggtggggcagtggcgctccccacatctcagatgatgggcggccgggcagagacgctcctcacttcctagacgggatggcggccgggaagaggcgctcctcacttcccagactgggcagccaggcagaggggctcctcacgtcccagatgatgagcagccaggcagagacgctcctcacttcccagacagggtggcggccgggcagaggctgcaatctcggcactttgggaggccaaggcaggcggctgggaggtggaggttgtagcgagccgagatcatgccactgcactccagcctgggcaacattgagcactgagtgaatgagactccatctgcaatcccagcaccttgggaggccgaggctggcagatcacttctggttaggagctggagaccagcccggccaacacagcgaaaccccgtctccaccaaaaaaatacgaaaaccagtcaggcgtggcggcgcgcgcctgcaatcgcaggcactgggcaggttgaggcaggagaatcaggcagggaggttgcagtgagcagagatggcggcagtacagtccagcttcggctgggcatcagagggagactgtggaaaggggagagggagagggagggggagggggagggggagagccagtttcttattttgaaatggggggaagcattgaactggatcaagcaagctgtcatcaaa

SEQ ID NO: 2720 - DNA, 2300 bp, Homo sapien
gaggcctgaggtgagagggcccattggaggacacgtggtcctcccattcccacatttctggaaggctcctgtgtacactgtccactcaggccaggatctacctgtggcagggccaatgcaggaacgacctcctgcttgacctttctaggaagcggctgatgggatagaacatctgcccgacccctgaaccaggagacccggggcctggctggtgggggaatggggcaggcgggaggagcaggtggcttgtggggtgggtggggtggcagatcctgtctcctggcctccaggggagggaggcagaggaggataacgatccctgcctgcctgctaccctatccttccttcagaaaaagctccagaaaagcacttgtcagatggttatctccagcactgtccattttaccgaaggtggggagcgggtggattcctgggaggaggggctgggagctgaagccctgaggcactggagctcccgctctgggtctcccagtactcctgggagcaggtggcagagtcatctctggggctcatctgtgtcttggccacttggctgctgccagaggccaagcaggggttgagtcatggtattgaggaaggccaggaggagacagctcagagaaatgactccaaggaggcaggtggtgggagaggtgggctagcttgtggggagagtggcagagggaggtgcaccacccatttccttccctcttcctctccctgaccgtttcccacaagatccctcatttagggaacaaggattgggatggttaagtgtggggagtttctctgaattatcttcccacttccaagtcttggttgggagtggacttggcacagtccttccagaaatgggcacggttttcagaatcacctggaacactggtcatgaacctgagccacctccaacccaagggcagcacagcagacagaccacaggttgaacaatggtcttcctcttcaactgtaaatgttaaagtgtttgtatgaaagtcttgcagcggtatagacagggaaccacgcagttacacacttaaataaaagaatatggaaaagcgtgtggcttcctgccatcctggtactctgctccatcctcccagccaaggaccagagggtttgggcaggcggaggagggaagacaagggcaggatttcccttcagagaagccgcagcctgactcttcctctcaactctccttccttcttgcttcctggcctgttccctcctggtcccacccttccttcagaagaggcttcatgaaagaaaaagcttaaaaggtggtcaaggacgtgcaatacccgttatcagggctggaaggaggtggaatatttatagaacgtgtaccttgagcaaggcactggaccaggcaatgtgggctggagagatgcagagattaaaagcagggggtggtgtatatccaggattgaaaaaactgtcctaaagtctgagtcccgccgcttggttcagaaaatacattggccatgtgtaagaaaaactatgcttgtctcaaggaacaagacaggacccagaaagacaccgtggcctcaccagttagtgggccccagccagtgctagctgagtggtgatgacagacacgtctgtgggagtcagggaggatggcacccagtgcaggggtcaaggcaggcttccttcggaggcgtggcttgggcggggcgagagtgattggcaggctggctggagagggcagggcagccggcatgggagtaggaatggccacaagtggccaacggaaagcaggtggcaggacaggaggctgtggtggggcctgaccgagcagcctttccttccaaatctgactgtggcttgctcaggcccctatggtggctgtgaccctgttttgtccatctcctttcaccaggacccgccgggtgagggtgactggagcacattcctgggcttgggggtgggaagggagtctgatttgcctggggttgatgtgggggggttttgggcatgggccgtgactcacagagtagatccagatccgcctgctcccctcatatcctgttattcagaaggctgtatccgcttagaaagtgtcttttgtcctggggtgagagggtgacgcatgtgccctctggcagtctgctgctgtgtccagagtccgactccagctgggctgtaactgggcttggcccccgccttaggtaacgatgtgtgggtgggggtgttcttgggtcctgctgtgtatttagggatgggaataagggaggagaggctagcagggtgtggcggggtgtgttgggagagctgcacaaaatctgatccaattgatctgg

SEQ ID NO: 2721 - DNA, 2300 bp, Homo sapien
gaccccacccacactggcacttgcaacccccagctcttcccccttgccagtgctaggtagcctctgctcctgctgtctgcccgtgggcagggtggggtgggaagattggaaggtgctgcatccctgagccatggtttcttcactcccctcagagcaactgtggcctggaagagaaaattgccaacctgggcagctgcaatgactctaaactggagttcaggagtttctgggagctgattggagaagcggccaagagtgtgaagctggagaggcctgtccgggggcactgagaactccctctggaattcttggggggtgttggggagagactgtgggcctggagataaaacttgtctcctctaccaccaccctgtaccctagcctgcacctgtcctcatctctgcaaagttcagcttccttccccaggtctctgtgcactctgtcttggatgctctggggagctcatgggtggaggagtctccaccagagggaggctcaggggactggttgggccagggatgaatatttgagggataaaaattgtgtaagagccaaagaattggtagtagggggagaacagagaggagctgggctatgggaaatgatttgaataatggagctgggaatatggctggatatctggtactaaaaaagggtctttaagaacctacttcctaatctcttccccaatccaaaccatagctgtctgtccagtgctctcttcctgcctccagctctgccccaggctcctcctagactctgtccctgggctagggcaggggaggagggagagcagggttgggggagaggctgaggagagtgtgacatgtggggagaggaccagctgggtgcttgggcattgacagaatgatggttgttttgtatcatttgattaataaaaaaaaatgaaaaaagtgaaacatgttgtcttgactggacaccccctccctgagggtccacgggtgagaggagcttgggggtgaaaggcaaagtcattggtagggtggggcacgtggggctggagtggttggctgtggaagtgaatggggactcacttttccctatgggtttgggttgagggtggtaccaggtccaaaagggcaacatggtcctctctgagggacaggctcctctttgccaatgggcgggccctcttataggagaggagggtatgtgtgcacacttggggaaaaggatattagtccaggtgttctgagccctggctggcacaaccagggaaatggggtgggtgggggtggggggcggttagaaacaggctgactggcctgagtttgaatctcagatctgccacttatcattggaattttgggcatgctcttagtatcagtttcctcatctgtaaaatgggggatatgaatattacttccacaggattgccaggaggacaatgccacacatcatgtaaagcacttacagagagcctgacacatggtgagtgcccagtgacccaatatcattcccgctggagtgggcaagtgggcccctctttggtttcagctgctgccctagtgtagggaggtcgagctggccagtttccttgggtatcttagggaaacggtggggtgtggggagtttccagaggagtcttctggtgtacatgagggatcttagggctgggtctcagtagagctgatgggtcagactagagacagaagaccagggagccagacaggtccctggcatctgccttctgatttgagcacagaagtcgggcgttactcctgaaaccccagtggcaaggaggtttctgtggccagttaggctggcctggaatgttaactgaacttgtctgttgggagcccctgaaactgggatcccagtgacccaggtgagaaaggcaggtgatagtccttcccttcctttctctaccctgtcaggttctgctcagcccctgcggggctgggagggtggggttgggggagtgccagttttcaccactccctctgggatgggggtagaggggtgtgaaaaaaggtgtgtatccctttaacaagggcccaaccccagggccaagtcaagaaggagctcagccactatctccccaccgagccagctcagcgggcagggctgggagggagtgggacagattctgggagtgcagcggggaggagtcccggctgggctgagcgcagggagctgcttggcagtgccagagcccaggccccagagccctgctggagaggaggcagactgaggcagcaggtgagcaccctgggcccggcctgggaggtcttcggctgccggagggccccacagtattgggaggccaggagaagggg

SEQ ID NO: 2722 - DNA, 2300 bp, Homo sapien
ggctgaggcaggagaatcacttgaacccaggaggaggagtttgcagtgagccgagatcgcaccattgcactccagcctgggcgataggagcaaaactccatctcaaaaacaaaaaacaaaacaaaacaaaaagaaaaaagaaaagtaggggcagagatgtggggcaggagaggtgactcgggctcagctgcatggtcctgctctgcttcttttttcttggagtttgtccgttggatgacaatgatagtggtgaacaggtatggagggcttactaagtaccaggtgcagtgctaaacattttgcctgtattgtcttagttaattctcacagtcctttgaggaaggcactatttttaactcctgtattaaagatcaggacacagatcttagttaaagtcataaagacaagaataggtggatttcagagctctgattaaccaggatcctctctggctgggtgctcaggaacactagggcctcctccccttaccctctggagcagtggggaagccagaaggaggggcccgatgttctgctcaaggaccgtggggtgagggtgtggtggtgccaccggaggcagaacttgccttgccttcctggcttgaggggcatatggtgtacacggccaccaccagagggagcaggggcgggcatctcggtgaccagcctcccagggctgtcactgcctcactggcaggcatccatgcagggcagctatgagtccagaggaacctttaggctgagggagctccctgaccctccgttagagagccccagactgagacctcagagagactcccagactgggaatccaaagggccattggcagagacattcaagaggggctcctgcactgaagggctcccttaccgtgagaagccctgtgaggaaccccctagcctgagcctcctcctgaggaacccaggctaagtcactctcagaggaacccacaggctgagagaccctcagagggacctgcaggttgaagcccttcagaggaactctcagaatgagacattgttggaaggtcctctccattgagacacacagggccccaggttgagaaggtgacatgaggagggatgtagtggggtgtgctctgatctcagcgtttaggaaaggatcctgggaactttggctctgggccgcaccccatccttgccctgactcatgcctactgctctgcccttcttcctaccccctcccagtgacttcaggttctaggtgtctgggcctgggcaggtgaggagggccactggggttgggctctctgggatgtcattctgggtcctggatggggggctgttgctctgcagctgggttagggaaggcatggggctctgagggagggagagagaaacacgtggcccgaccagtttggagttggtgttagctgccaagcagctcaagtgggccttgcatttgtgcactctgggccgctgaggggagctgaagggaggtcaggcaaacactcactcaatctgcctccctccatcaggctgcccttctctggcttcctcctgatccaagttctctacattcatctctctgcctccaggactggtaaaggctgggctctgggatccaggcaggcttgagtgtcagtatccaagctgggcctgactgggagaagtgtgcgtgtgcgtgtgtgtgtgtgtgtgtgtgcacgtgagagagagagagagacagacagacacacatggagggtacagaggctcctgcttctccttcctggtcacagattcagaccccctctccttccctgccctgcagttcgccagggcccttccacttcctagggtgaccccatgaggtctcgaagtcctctctgtctccccagccttctcgcttctctttctctgtgactctgcatgctgatcggaggccaggggtttcccagccccagccctctgtggctccctcctcgtggcagggtcatggtaggctctggaactctggccagcggagggtggggcccataaagctggctcatagcccaggctgctgcaatagcaggggtggcttaggcccagccccctgcctcccctcccttcccccaggtataagagctgagctcaggtgagctggctcctcctgtcttgtctcagcggctgccaacaggtaaggaaacccaaggcttttcacccaaatatactgcctgctgtccagagggcacacttagggtaagagctgggggatcagatcctggaggttggtgtgtgtgtttcaagcagaggtgggtggttggaggaggtggaaagaattaagctaaggtgagttccaagggattccccctagatg

SEQ ID NO: 2723 - DNA, 2300 bp, Homo sapien
catctcacaaaatctcagtcccagacttctgcctaccttgagcagatggggcaactgctgggtaaccagctctttgaactcgttgacgctgaggctatccttccggccctcctgccttgcaaaggtgaagaaggtggtgaccacggtctcaatggactcctctagctctgtcagtggttctgctgccattaggaccctgaggccaaagctgatgtcctcaaggggctagctgacctttgtcagggctgacctgtggaagagagaaggagcagagagggagagtcagggagccccaagatgcaggaatggttcagaaggtccctgccttggtgttatcacatcagtctcagcctggagggggcatatggggaaagagggagaggacaggggttgagcttggggcagcagaccaggcaacggcatctcagttttggtgggggcaggagattcagctccagaaaccccctcttctgtaggtctcacaatccgggatcctttttaaatgtctgtggcttagggacccctctgtggtgatccctcgatctggagacccctctacttgagaggaggtcttcagttgaaggtccttcttggagtccttcaagtctggtggcccctctgtggcgtgtctgtctcaagaatcccttcttgtctcacccagactcacaggtcataaggttgtttgtctccaaagcttgtttatgttgggccctggtctccggccactcgcatccgcccacacacactctaaccgctcctcccagcagagaagcacagggtctggcaaatgtcccctgtggtcagagctggctccgtctgaacagacccattttctctgccccgctccacccttacctctcctcagcggcagcagggcagagtgctgaacccaggaccccacagatcctccccgctcctgtctcccggtgacaagggtcctggaacggggcgtctctgactccctgctccaggacgggtttagtacaggcactcacaaccccctggggtgcggcgggtggggctggaagaggcattctcttttctgtccaccccgtcacacactcctgcacgcgctgttgctcgatcatccaaagctccttcctgaattcctgtctgagctggctctgggggagggacctgggagcccaggaagaaaaaatgatctccagcctccctccagggtcagccatgagactcacccggcaaggagatggggtagagtgagctggagcctcagggctgaggtttataagcagcggggaaggaggagagagctgcttccaagcccggaggtgtcaaatttccgtggtcgattctgaagaccagagacagcccaatcaggccgcttgccctgagccctcaggtctggacccgggctccctgccagccacacgagcgcccccacttggtcagggagaggagctgcctggacagatctcgttcggcaggggtcccagggtcctagtcctctcaatactgggggctgctgccaccatacccatgtctaatcaggagtgtgtatgctgaggggggaagagggaggcaaccaatcaagggagctcaacactgagaggcccaatctgagacacacacagaggccccttggaatgagatcccacaaaggatgctacagaccaagatccctcagagaaccccaggctgaggccccacacacagagggggatccaggttgagacccccagagaagagtcctggattgaaatccctctgtgggttctcagactcccaagactaagtttctcactgagggtcctctcagtgaggccccatggaggagccacagactaagaccccctcagcagaattccccccttaccgggctcaaccagcacagccagccacaggtactgcaaggcccagcttggggtaagacatccagtgtccctcccaggacctccttcccacctctttcccctgcaccatccactgctgcctggagagaaaggaacggggcaagcaaggctgggaaagagacaagggccgcctgttccagcccaggagacagagggcgcctctgtctgctcctggccccttgccccacagggtgttcgtctgtgaaggggtggagtcggtgggggggtcagcgggggagggactgttgaagacaggtctccacacacagctccagcagccacatttgcaaccttggccatctgtccagaacctgctcccacctcaggcccaggccaaccgtgagtaccctgccccactgggctagtccctggcctgccagcttcagggagaggggtcttcagaagggctccaagaggctggggacc

SEQ ID NO: 2724 - DNA, 2300 bp, Homo sapien
ccctcaccctgactgactcctcccagatcctcagtgctccacagtgctatggtccccagcctcttggagcccttctgaagacccctctccctgaagctggcaggccagggactagcccagtggggcagggtactcacggttggcctgggcctgaggtgggagcaggttctggacagatggccaaggttgcaaatgtggctgctggagctgtgtgtggagacctgtcttcaacagtccctcccccgctgacccccccaccgactccaccccttcacagacgaacaccctgtggggcaaggggccaggagcagacagaggcgccctctgtctcctgggctggaacaggcggcccttgtctctttcccagccttgcttgccccgttcctttctctccaggcagcagtggatggtgcaggggaaagaggtgggaaggaggtcctgggagggacactggatgtcttaccccaagctgggccttgcagtacctgtggctggctgtgctggttgagcccggtaaggggggaattctgctgagggggtcttagtctgtggctcctccatggggcctcactgagaggaccctcagtgagaaacttagtcttgggagtctgagaacccacagagggatttcaatccaggactcttctctgggggtctcaacctggatccccctctgtgtgtggggcctcagcctggggttctctgagggatcttggtctgtagcatcctttgtgggatctcattccaaggggcctctgtgtgtgtctcagattgggcctctcagtgttgagctcccttgattggttgcctccctcttcccccctcagcatacacactcctgattagacatgggtatggtggcagcagcccccagtattgagaggactaggaccctgggacccctgccgaacgagatctgtccaggcagctcctctccctgaccaagtgggggcgctcgtgtggctggcagggagcccgggtccagacctgagggctcagggcaagcggcctgattgggctgtctctggtcttcagaatcgaccacggaaatttgacacctccgggcttggaagcagctctctcctccttccccgctgcttataaacctcagccctgaggctccagctcactctaccccatctccttgccgggtgagtctcatggctgaccctggagggaggctggagatcattttttcttcctgggctcccaggtccctcccccagagccagctcagacaggaattcaggaaggagctttggatgatcgagcaacagcgcgtgcaggagtgtgtgacggggtggacagaaaagagaatgcctcttccagccccacccgccgcaccccagggggttgtgagtgcctgtactaaacccgtcctggagcagggagtcagagacgccccgttccaggacccttgtcaccgggagacaggagcggggaggatctgtggggtcctgggttcagcactctgccctgctgccgctgaggagaggtaagggtggagcggggcagagaaaatgggtctgttcagacggagccagctctgaccacaggggacatttgccagaccctgtgcttctctgctgggaggagcggttagagtgtgtgtgggcggatgcgagtggccggagaccagggcccaacataaacaagctttggagacaaacaaccttatgacctgtgagtctgggtgagacaagaagggattcttgagacagacacgccacagaggggccaccagacttgaaggactccaagaaggaccttcaactgaagacctcctctcaagtagaggggtctccagatcgagggatcaccacagaggggtccctaagccacagacatttaaaaaggatcccggattgtgagacctacagaagagggggtttctggagctgaatctcctgcccccaccaaaactgagatgccgttgcctggtctgctgccccaagctcaacccctgtcctctccctctttccccatatgccccctccaggctgagactgatgtgataacaccaaggcagggaccttctgaaccattcctgcatcttggggctccctgactctccctctctgctccttctctcttccacaggtcagccctgacaaaggtcagctagccccttgaggacatcagctttggcctcagggtcctaatggcagcagaaccactgacagagctagaggagtccattgagaccgtggtcaccaccttcttcacctttgcaaggcaggagggccggaaggatagcctcagcgtcaacgagttcaaagagctggttacccagcagttgc

SEQ ID NO: 2725 - DNA, 2300 bp, Homo sapien
gggagatggggaaacaaagaggtaagaatggggggaaagaggagtcaagaggtctgggccaaaaatgggaggaggagaaaggggaggtcctgtggaggtcgagttgggaaggggcacagcaccctacatctctgcttccccatatcatgggagctttgccctgccacccccagactcccccgggacctgagctcttggcaaggcagggtgggggtggcagagactaaggctggcaggagaggtgggggcagaaacagctgttgtatctgctctcttcttaccccacaggaggcgaggcaggggagggctgggacccttcccaacacctgggagacagagggggccttggcagggacttgagggctccctgtgggagggccaggcggtcaggaagctcatggtgggttccccactggcttcctcctttgctgagctgccagctctctctccgaccttcagttcatttgtctctcatcaccaccttccaaaccctgtctcccccaaatcccaaactgccctcaccctgactgactcctcccagatcctcagtgctccacagtgctatggtccccagcctcttggagcccttctgaagacccctctccctgaagctggcaggccagggactagcccagtggggcagggtactcacggttggcctgggcctgaggtgggagcaggttctggacagatggccaaggttgcaaatgtggctgctggagctgtgtgtggagacctgtcttcaacagtccctcccccgctgacccccccaccgactccaccccttcacagacgaacaccctgtggggcaaggggccaggagcagacagaggcgccctctgtctcctgggctggaacaggcggcccttgtctctttcccagccttgcttgccccgttcctttctctccaggcagcagtggatggtgcaggggaaagaggtgggaaggaggtcctgggagggacactggatgtcttaccccaagctgggccttgcagtacctgtggctggctgtgctggttgagcccggtaaggggggaattctgctgagggggtcttagtctgtggctcctccatggggcctcactgagaggaccctcagtgagaaacttagtcttgggagtctgagaacccacagagggatttcaatccaggactcttctctgggggtctcaacctggatccccctctgtgtgtggggcctcagcctggggttctctgagggatcttggtctgtagcatcctttgtgggatctcattccaaggggcctctgtgtgtgtctcagattgggcctctcagtgttgagctcccttgattggttgcctccctcttcccccctcagcatacacactcctgattagacatgggtatggtggcagcagcccccagtattgagaggactaggaccctgggacccctgccgaacgagatctgtccaggcagctcctctccctgaccaagtgggggcgctcgtgtggctggcagggagcccgggtccagacctgagggctcagggcaagcggcctgattgggctgtctctggtcttcagaatcgaccacggaaatttgacacctccgggcttggaagcagctctctcctccttccccgctgcttataaacctcagccctgaggctccagctcactctaccccatctccttgccgggtgagtctcatggctgaccctggagggaggctggagatcattttttcttcctgggctcccaggtccctcccccagagccagctcagacaggaattcaggaaggagctttggatgatcgagcaacagcgcgtgcaggagtgtgtgacggggtggacagaaaagagaatgcctcttccagccccacccgccgcaccccagggggttgtgagtgcctgtactaaacccgtcctggagcagggagtcagagacgccccgttccaggacccttgtcaccgggagacaggagcggggaggatctgtggggtcctgggttcagcactctgccctgctgccgctgaggagaggtaagggtggagcggggcagagaaaatgggtctgttcagacggagccagctctgaccacaggggacatttgccagaccctgtgcttctctgctgggaggagcggttagagtgtgtgtgggcggatgcgagtggccggagaccagggcccaacataaacaagctttggagacaaacaaccttatgacctgtgagtctgggtgagacaagaagggattcttgagacagacacgccacagaggggccaccagacttgaaggactccaagaaggaccttcaactgaagacctcc

SEQ ID NO: 2726 - DNA, 2300 bp, Homo sapien
gagtgggagaggagacctgcaggcgttgtccctgcaactgctcactcctggttgattcggggatagtgggagcaaggggaatggggctgctgtgtgttgggggagagaaagggctgaaagcatgcggtcctttgagttcaaggggctgggagagagtaggagaagaaaggagaaaggagtggtctgttgagagagaagactgccaagccggggggcctctttcccttggccctgggacagtctggccttccacaaccccagagggggcagctcaggtgtctcggatcagatgtccccatccttccccaggcctagggggctggacaatggcccctgatcgaatgacatcccagttcttcaatggggcccttgtgagtgtcatctgaactccggacctgagaagcagttgtcacagagacatgggggagatggaacccaagctgtggctgatgaggggataaggggtgcttgagggaggggtgctggtagcttgattacctgctccatgccagaggggcagctggaggtcacctggagccctaaagcagcctgggattttacgtggtggcagttctgagaggacttgggggcaggggagatggggaaacaaagaggtaagaatggggggaaagaggagtcaagaggtctgggccaaaaatgggaggaggagaaaggggaggtcctgtggaggtcgagttgggaaggggcacagcaccctacatctctgcttccccatatcatgggagctttgccctgccacccccagactcccccgggacctgagctcttggcaaggcagggtgggggtggcagagactaaggctggcaggagaggtgggggcagaaacagctgttgtatctgctctcttcttaccccacaggaggcgaggcaggggagggctgggacccttcccaacacctgggagacagagggggccttggcagggacttgagggctccctgtgggagggccaggcggtcaggaagctcatggtgggttccccactggcttcctcctttgctgagctgccagctctctctccgaccttcagttcatttgtctctcatcaccaccttccaaaccctgtctcccccaaatcccaaactgccctcaccctgactgactcctcccagatcctcagtgctccacagtgctatggtccccagcctcttggagcccttctgaagacccctctccctgaagctggcaggccagggactagcccagtggggcagggtactcacggttggcctgggcctgaggtgggagcaggttctggacagatggccaaggttgcaaatgtggctgctggagctgtgtgtggagacctgtcttcaacagtccctcccccgctgacccccccaccgactccaccccttcacagacgaacaccctgtggggcaaggggccaggagcagacagaggcgccctctgtctcctgggctggaacaggcggcccttgtctctttcccagccttgcttgccccgttcctttctctccaggcagcagtggatggtgcaggggaaagaggtgggaaggaggtcctgggagggacactggatgtcttaccccaagctgggccttgcagtacctgtggctggctgtgctggttgagcccggtaaggggggaattctgctgagggggtcttagtctgtggctcctccatggggcctcactgagaggaccctcagtgagaaacttagtcttgggagtctgagaacccacagagggatttcaatccaggactcttctctgggggtctcaacctggatccccctctgtgtgtggggcctcagcctggggttctctgagggatcttggtctgtagcatcctttgtgggatctcattccaaggggcctctgtgtgtgtctcagattgggcctctcagtgttgagctcccttgattggttgcctccctcttcccccctcagcatacacactcctgattagacatgggtatggtggcagcagcccccagtattgagaggactaggaccctgggacccctgccgaacgagatctgtccaggcagctcctctccctgaccaagtgggggcgctcgtgtggctggcagggagcccgggtccagacctgagggctcagggcaagcggcctgattgggctgtctctggtcttcagaatcgaccacggaaatttgacacctccgggcttggaagcagctctctcctccttccccgctgcttataaacctcagccctgaggctccagctcactctaccccatctccttgccgggtgagtctcatggctgaccctggagggaggctggagatcat

SEQ ID NO: 2727 - DNA, 2300 bp, Homo sapien
aagagacctaagtgcaggcctgttctctgtgtccctcagtctgtaccccagccagagggaatcagggttggggcatggagagagagcagttggagctgggctggctccagaggcctgtggtagatgtctgcagtggctgcccaggcagggattgaggagggtggggcaggcaggggtggtcacaggactgggccatgcttcctctggctctatttttaccctggaccttgcctgtctagcatagccaagctctgctgttgagggtggtgggctggggtgtccactacagccttccttctgctgcccacccctagcaaggagtcagtctggtaccctcggtcagcctggtagaggggatggcagccccagtgggtggcgtacgccttctgggggagggaggtctcactgactctgagtttcctgtcagcagctgggggccccttttggtccttcaactctgttctctcctgaacatgtcattttggcttctttgggatatgctcccattgcctctgcaaaattatcccttccatctggtgggtggcagaaggggagagaggaatgtctgagccttttccttggagccagagttcccagggagtgggagaggagacctgcaggcgttgtccctgcaactgctcactcctggttgattcggggatagtgggagcaaggggaatggggctgctgtgtgttgggggagagaaagggctgaaagcatgcggtcctttgagttcaaggggctgggagagagtaggagaagaaaggagaaaggagtggtctgttgagagagaagactgccaagccggggggcctctttcccttggccctgggacagtctggccttccacaaccccagagggggcagctcaggtgtctcggatcagatgtccccatccttccccaggcctagggggctggacaatggcccctgatcgaatgacatcccagttcttcaatggggcccttgtgagtgtcatctgaactccggacctgagaagcagttgtcacagagacatgggggagatggaacccaagctgtggctgatgaggggataaggggtgcttgagggaggggtgctggtagcttgattacctgctccatgccagaggggcagctggaggtcacctggagccctaaagcagcctgggattttacgtggtggcagttctgagaggacttgggggcaggggagatggggaaacaaagaggtaagaatggggggaaagaggagtcaagaggtctgggccaaaaatgggaggaggagaaaggggaggtcctgtggaggtcgagttgggaaggggcacagcaccctacatctctgcttccccatatcatgggagctttgccctgccacccccagactcccccgggacctgagctcttggcaaggcagggtgggggtggcagagactaaggctggcaggagaggtgggggcagaaacagctgttgtatctgctctcttcttaccccacaggaggcgaggcaggggagggctgggacccttcccaacacctgggagacagagggggccttggcagggacttgagggctccctgtgggagggccaggcggtcaggaagctcatggtgggttccccactggcttcctcctttgctgagctgccagctctctctccgaccttcagttcatttgtctctcatcaccaccttccaaaccctgtctcccccaaatcccaaactgccctcaccctgactgactcctcccagatcctcagtgctccacagtgctatggtccccagcctcttggagcccttctgaagacccctctccctgaagctggcaggccagggactagcccagtggggcagggtactcacggttggcctgggcctgaggtgggagcaggttctggacagatggccaaggttgcaaatgtggctgctggagctgtgtgtggagacctgtcttcaacagtccctcccccgctgacccccccaccgactccaccccttcacagacgaacaccctgtggggcaaggggccaggagcagacagaggcgccctctgtctcctgggctggaacaggcggcccttgtctctttcccagccttgcttgccccgttcctttctctccaggcagcagtggatggtgcaggggaaagaggtgggaaggaggtcctgggagggacactggatgtcttaccccaagctgggccttgcagtacctgtggctggctgtgctggttgagcccggtaaggggggaattctgctgagggggtcttagtctgtggctcctccatggggcctcactgagaggaccctcagtgagaaac

SEQ ID NO: 2728 - DNA, 2300 bp, Homo sapien
tcctcgattgcgtttccatgtcctccccccacacctgccatccgtgtttattttgttgcagacctacatagggatttctcttttctctctctgatttgttgttgttattttgagacggggtctggctctgttgtccaggctggagtcagtggcgcaatgaatcacggatcactgcagccttgacctactgggctcaggtgatcctctcacctcagcctcccgactcctaggattatgggcataagctatgtttcctgctcaataagggatttttctctctttcttttttttttctttttgcagatggagtctcgctgtgtcacccagactggagtgcagtggtaccatctcggctcactgcaacctccgcctcccaggttcaagcgattctcctgcctcagcctcctgagtagctggaattacaggcgcgtaccaccatgccccgctaatttttgtatttttagtagagatggggtttcaccaggctggtctccaactcctgacctcaagtgatctgcccgcctctgtctcccaaagtgctgggactacagtcgtgagccactgtgcccggcctcaataagggatttttctaatgactatgtgcacaatacagtgtacatatgtttgaggaatgagagaatgacacatctgcaacccttcctctgctccactggcacgtcaagaccctttcattttccttcctggcacttgggcgtgtgcgtgtgtgtatgtgtttgtgtgtgtctgtgtgtaagtaatggcccagcatccttacccatgtgagggtaaggatcgtggttattttgcttaatgctggagcctcagttcctacagtgtttacacatagtaccacttaagtaaatgttcgttgattgaaagaagattctttcggcctagcgcggtggctcatgcctgtaatctcagcactttgggaggccgaggcggggggatcacgaggtcaggagatcgagaccatcctggccaacatggtgaaaccccgtctgtactaaaaatacaaaaaattagccgggcgtggtggcaggcgcctgtagtcccagctgctcgggaggctgaggcaggtgaatcgcttgaacctgggaggcggaggttgcagtgagccgagatcgtgccactgccctccagcctgggtgacagagccagactgtgtctccaaaaaaaaaaaaaaaaaaaaaagattatttcttcctctggttttatagttgagaagctgatgtctcctcgacttccaactggaaccttgaacccccacatttctggaccttgagcattcctcaagtaggaagatgtaatgcaccttgacctctttctaaataagacacttccccaaataaggggagttgagagtgaacagtcttcacgtctccacccacttccagatcccagaggagacagacatcggatggctggtgagagagaagcctttaatgaaagatgagttgcaggcttggaccgctactcttgcgcccttggtgggggtgggggtggggtgggcaagggtggggttatggagagggataagtggggtgaggtggaagcagggggaagaggcaggtctgggagggtggagaggaagggcgctgcccaatgtggctgtctgctcaactgttctcccagaagaaattgttacaggccactgtgagagcagccacaagcaccacatactcctggaagtccacctccccgtctccattctcgtctagctccttcatcaccttgtccacagcatccacatccttctgggcctgtggtgggaggagaggaagagggaggtgtatagggaagggtacagcactgagtcagaggcaagggggtggttgaggagcaggaggcaaagatgagcgagaggaactgcattgaattatgggactcttctaggcctcctcaaaggtcttgagggcttctgttgcctacagcataagctctttcacctggcagaatgaataataatgacaccagttaccgtatgttcagtgcctataataaagcaagcactacactaggagctttacaagcactgtctaatttaattctaatacaaataatgtgaggtatgtttcattatttccattctagagaagaaacaaattggtaatcggtggttaaataaatatgcccaaagtcccacagctagaaagtagcagggctggaatttgaacccagtccaataaaacctcaaaaccggtgcactttctaccgtatcctgaggcttctttactttggggccctggttagccttagcagcctagttttctacatccttcatgccagttgaatgaaac

SEQ ID NO: 2729 - DNA, 2300 bp, Homo sapien
cccaccccacccccacccccaccaagggcgcaagagtagcggtccaagcctgcaactcatctttcattaaaggcttctctctcaccagccatccgatgtctgtctcctctgggatctggaagtgggtggagacgtgaagactgttcactctcaactccccttatttggggaagtgtcttatttagaaagaggtcaaggtgcattacatcttcctacttgaggaatgctcaaggtccagaaatgtgggggttcaaggttccagttggaagtcgaggagacatcagcttctcaactataaaaccagaggaagaaataatcttttttttttttttttttttttggagacacagtctggctctgtcacccaggctggagggcagtggcacgatctcggctcactgcaacctccgcctcccaggttcaagcgattcacctgcctcagcctcccgagcagctgggactacaggcgcctgccaccacgcccggctaattttttgtatttttagtacagacggggtttcaccatgttggccaggatggtctcgatctcctgacctcgtgatccccccgcctcggcctcccaaagtgctgagattacaggcatgagccaccgcgctaggccgaaagaatcttctttcaatcaacgaacatttacttaagtggtactatgtgtaaacactgtaggaactgaggctccagcattaagcaaaataaccacgatccttaccctcacatgggtaaggatgctgggccattacttacacacagacacacacaaacacatacacacacgcacacgcccaagtgccaggaaggaaaatgaaagggtcttgacgtgccagtggagcagaggaagggttgcagatgtgtcattctctcattcctcaaacatatgtacactgtattgtgcacatagtcattagaaaaatcccttattgaggccgggcacagtggctcacgactgtagtcccagcactttgggagacagaggcgggcagatcacttgaggtcaggagttggagaccagcctggtgaaaccccatctctactaaaaatacaaaaattagcggggcatggtggtacgcgcctgtaattccagctactcaggaggctgaggcaggagaatcgcttgaacctgggaggcggaggttgcagtgagccgagatggtaccactgcactccagtctgggtgacacagcgagactccatctgcaaaaagaaaaaaaaaagaaagagagaaaaatcccttattgagcaggaaacatagcttatgcccataatcctaggagtcgggaggctgaggtgagaggatcacctgagcccagtaggtcaaggctgcagtgatccgtgattcattgcgccactgactccagcctggacaacagagccagaccccgtctcaaaataacaacaacaaatcagagagagaaaagagaaatccctatgtaggtctgcaacaaaataaacacggatggcaggtgtggggggaggacatggaaacgcaatcgaggacgcaaaggtgccccaccccaagaaggagtaaacagtatctaggccaagttggggaggggaggaagtgaggaggaaaacatggacgggcggtggtgttggccggtgcaggatgggagaggaatttgctcctaatactggcctcctgggccttggctggagcatttacggcacttcacaactctcagactgggcgagtggccatgaggggaaaaccagtgcaaattccccaggcccaattgtccggaagaagacgaggcaagtccgcgtaaagatttttagacggtgtaccttggctagggaacggaggggcgagggaattcgggacccaaatcccctctaaggcccacattaataactacccccaagaggttgcagcgcaaccactactggaacgtgaagtccccggcacgccccaacaacaggaccattggccacgcccctaggggcggggcactgcatggaaagccccgccttcgccctaaggctccgcctctgacctctgcgcaggcgtagctcaaatctttcccgccctctagtcgtgcgcggatctgacgcctgacgtaattgcgtagacgccattttagccggtcagacaagcactggacgtggcggccattttgttttggacaccgagcaggagctggcggccgctgcagacgaaaggcaggaaagggcaggccgggtgagcagacggatcggccgactagacagccaaccagcaacaacgaactgagctcgcatactaccgcttacgcatctaaccaaccgcccatctagctaacccgagc

SEQ ID NO: 2730 - DNA, 2300 bp, Homo sapien
ctttgggagggcaagggcacaggatggtttgaagccaggagttagagaccagcctgggtaacaaagcgagacccagtctctactaagaaaaaaaaaaaaaaaaattagcggtgcatggtggccagcacctgttgtcctagctactcaggggagctgaggtgggagaatcgctagagcccaggggttggaggctgcaaagagccgtgatcatgccactgcactctggcctgagaccccatctctttaaaacaaacaaataaccccaaacaaacaaacaaacttcaaggcccacaaaatacccgggaatttctcaaaaacggcagaagccaatctagcaatcaaagtatggagtctggcttttttttttttttgagacagagtctggctctgtcgcccaggctggagtgcagaggcgtgatctcagttcactgcaacctctgcctccccgttcaagccattctcctgcctcagcctcctgagtagctgggactacaggcacgtgccaccatgcccggctaatttttttttatttttagtagagacggggtttctccacgttggccagggtggtcttgaactcctgacctcacctgatccacccacctgggcctcccaaagtgctgggattacaggcgtgagccaccgcaccgggccgagtttggcttttactctagagcagtcattttcaaccttgactacatatgacttatccaaggagcttttaaaacatagggccggacagggcgggcgcggtgcttcacgcctgtaatctcagcactttgggaggccaaggcgggaggaatgcttgagccctggagctcgagaccagcctgggcaacatggtaagaccccgtttctataaaaatataaattaattaaaaaaatagaaaatacagacatctgggcctagatcaattaaaccacaatctctggtaatgaggtttggaaatgaaccaattgtggggtcgggggaaagctacctaggtgcttctaatgtgcagctaaagttgagaaccactgatctacagtgaaaatacaggcagggccgggcgcggtggctcacgcctgttttcccagcactttgggaggccgaggcgggcggatcacctgaggttgggagttcgagaccagcttgaccatcatggagaaatgtctctactaaaaatacaaaattagccgggcgtggtggcgcatggctgtaatcccagctactccggaggctgaggcaggagaatcgcttgaacccgggaggcggaagttgtagtgagctgagatcgtgccattgcactccagcctgggcaacaagagcgaaactccgtccccccccaaaaaaaaatatatatatatatgtatgtatatatatacatatatatatgcatgcctagtttcaaaagtggctttcaactccagaatcaagtagggactttaacaagaaactgacgatctgggggagtaggaaaggttttctaaattcacctgggaattagctcgcaaagagccctccacaaaacttaaccctaaagccgccattaatttccaacattcctcaaagtcttgtacttcttaatctccctaccatcctcaaagccctgtcaagacttccacttctgctctacccgccaagtttcctttttatcctatcaaaccccaacctccatcaatcccgccaccaggttccagttcagcccctcccccgccccttcgcaggggctccgcctcctccccggggcctccacgctccaacaccgtagctatgtccacatgccaccaccccctttccgcgtccgccggccccttccgctcctcaagaccgcacctcccccggctccttctcactaccgaaactcaccgaaggaaacagacgccagtgctcctcccggggctgccaccacggctccggcaggcgggccggggaccggccgaacctgagttgacggtggaggggctcgggttagctagatgggcggttggttagatgcgtaagcggtagtatgcgagctcagttcgttgttgctggttggctgtctagtcggccgatccgtctgctcacccggcctgccctttcctgcctttcgtctgcagcggccgccagctcctgctcggtgtccaaaacaaaatggccgccacgtccagtgcttgtctgaccggctaaaatggcgtctacgcaattacgtcaggcgtcagatccgcgcacgactagagggcgggaaagatttgagctacgcctgcgcagaggtcagaggcggagccttagggcgaaggcggggctttccatgcagtgccccgcccctaggggcgtg

SEQ ID NO: 2731 - DNA, 2300 bp, Homo sapien
gttgggtcccagtgatcccaacactgggaggccaaggtgggaaaatcctttgaggccaggagattacggctgcagtggccactgcattccagcctgagtgacagagcgagaccctgtctcaaaaaaaaaaaaaaaagaaatttaagcacttgaaatgtgccctcgtgtgctctttagtcatcagtgataaggcctttttatttatttttggcttgggccttgccacttatagaaatgatgtcactattgtgatttgctcattttacgtattgttctttgtagattctcgggattcgaagatggctgcacagtcagcgccgaaagttgtgctaaaaagcaccaccaagatgtctctaaatgagcggtgaggcagccaacagcaacttcaactccttcctaagaaaacattacttaacttggccctggggtccaatgcacaaagccaattttaagctaaataccaacagaaggctacagacctctgttcttagttgcatctcatgtggtacacaaaacaaattgggcggttgtttcaaaaccccttatcagtagacttttatgttaagctgtctgaagtatttatttggtgggatgtattttaaaagactcctaacactcttccttttcacatttttttacgttgatactggggtcgtgcagcacggtagcatggtaccctggctacagtaggcttgctgcccagtccaaggccagcagtgttgtgtctggcctgtaagaggcaggtagcaagccatgaatatgtccaaaggcccttgaatgtcattcttgggccttgtaagaggcactcgctttgctccatttcactttctttccattctgcttttagtttggttttgttttggattcttctacagttaagtgttcttctcttccattccattatacttccttgacagaaataatgagtctcttcacaggctcataaatgatcaaactgatgtaactttgaaaagtaactacttggagtcagaaaaagtgatgattggagactaagaaaagtaaagatattcaaaggcagtttctatctctgacaactttgttcattaagagtgcctttgtttaggcgcggtggctcatgcctgtaatcccagcactttggcaggctgaggcgggcggatcacgaggtcaggagtttgagatcagcctgcccaacatggtgaaaccctgtctctactaaaaatagaaaaattagctgggcgtggtggcgtgtgcctataatcccagctactcaggaggctgaggtaggagaatcacttgaacccgtgaggcgaaggttgcagtgagccaagatcctgccactgcactccagccagggcaacagaggacagagtgaggctccgtttcaaaaaaaagaatgcctttgatcagtgatttcattaagttgactttcgaccactgaaatttacttaatgtctatttttgcctcttctgaggcatatgtgcttctctccttatctctttggctatgataagctaattatttatgtttgcataatatttatgtttgcatgttagtgacatatattttaaaatgtgatacactcctgtaatttatgagagtatgttcattgctgtgagctttgaaggtgctctaatccttcctcatatttggccttagaatgcacctcggatcccccaaggtttaggctttcttcatttgtctttgaaactatatcttctgtctcttgtcatatctgcttattgcgtgtttttcataccttccacctctctaaaagccgttacctgagccctcgttatcacttttggttgaatgtgctgcacttagctgcatttctaagtttctgattcttgcaagtttgtggaaacagaggagtctttaacccacatcagccttgatctaagtgtaccactttacttaaaagttcgtgggatctggagctcctggtctagcaagccatgaaaatgccaataaatgtttgtaataaagcttttatttaaacatccattttgttcgaccttgaagctttactaatatgctgaagaacaaacagccgacgccagtgaatattcgggcttcgatgcagcaacaacagcagctagccagtgccagaaacagaagactggcccagcagatggagaatagaccctctgtccaggcagcattaaaacttaagcaggtgagagaatgggtcttaatgctccagaagcagctggtgatctctgtgagggagtccactgaggctgtcaggacgtgatggatgattgcaaagtggctcagggcaaaaagctgaaacttctctggaagaaagagaagttca

SEQ ID NO: 2732 - DNA, 2300 bp, Homo sapien
ttaaatgtgactagtgcaattaaggagcttaattttttttaatttaattttaggccaggcctgtaatcccagcactctgggaggccaaggcaggcggatcacttgaggtcaggagtttgagactagcctggccaatgtggcaaaaccccatctctactaaaaaaaaaaaaaagccgggcatggtggcgcatacctgtaatcccagctactcaagaggctaaggagaatctcttgaacccaggaagtggaggttgcggtgagtggagttggcaccactgcattccagcttgggtgacagtgagactctgtctcaagaaaataagtaaaatttgcttttaatttaggctgggtatggtggctcacacttgtaatcccagcactttgggaggcctgggcaggtggatcacctgaggtcaggagttcaagaccagcctggccaacatgacaagaccccgtctccaccaaaaataagccaggcgtgatgacagctcctgtaatcccagctactcgggaggctgaggcaggagaattgtttgaacctgggagacgaaggttgcagtgagccaagatcgtgtcactgcacttcagcctgggcaacagagcgagactgtatctcaaaataaaaataattgaaatagccacatgtagctatagaggctgccttacacagcacacctctagaagggaaactaagtggtatagttgacatccttaacttccctgttaatattaaaggccggtattggtggcacttaaggattggaatgggtaaagaacttcccagcactgtacagttcttttaaagcacaaagcttgggagaattaatatatgcaggataactgaacgcaagagacttgtggaatgcagttctaacctgataattgtgtgttaatcgggagtaacaggacaggccgttacggttggttacacctacttatgctagatgcataatgtttggagccttccccactgatgagaagcaatttatgatcttgtgctagaaagttaataatgcttcacagcatctttttgagaggttgattagaaaacacacacatacacgttggtagtcacttgtgggtgaagcctgaaggggctatacaatttattttctttcagattgactgatggctttatggacagccaggcttactaggagcttggttgtgttcagggctattgctgtccctttttcctttgaaggaatttaattctctgagatgtagtcttaatggttttcttttgagaacagattcttaaaaataccctatctctgtagtgtgtccttgttcttatatatggccctgagttttgtgatcacctgaataattctaacatacgtttggctggctgactgtggagatacatttgagttacatgtttatttttaatttaaggtcatcattgttttaaaggagctgtttgcaagtgcaggcatggaattagggatttttaagaaatgtaaggaaaggagatttgactttcttgtgtttatttacatcttaaggtaaaaagtggaccgtctggaaatagattctcagaggaaaaatggagcacacgggcctttttgagaaatcaatcttgttcttaagtcacaagaactcaagtgaacttgtaatttaagttttgcccagagtgtgatgaacttcctatggtgtttgagtaagcctttgaagacagtggtagtccatgggcaggtatgaatcaagtcatataattgtcaacctgtagttcaaaagcagtacaatccaggattgaactatagaatgttcttacgaaaacttaagtttcaactggcagtgtatgacttctgtagccaaactagtgaggtaatttgtggagatgcccatttcatgggaccacacttgagcttcttggagtttctgctctggatcaaaattctgctgcttgtataacatgttctgaggcaaaggcttgcttctggtttgggatccttttgacacccacaacaggtttatctcccttcacaccagcatctcacttgcttctttttctctgcactttgagttgccaaatcctgttggattgcttttttgatctcaatcccctaacaccttttcttccagaagagcttaaagcagcgcctgggtaagagtaacatccaggcacggttaggccgacccataggggccctggccaggggagcaatcggaggacgaggcctacccataatccagagaggcttgcccagaggaggactacgtgggggacgtgccaccagaaccctacttaggggcgggatgtcactccgaggtcagtgctgtgtaccctgataatt

SEQ ID NO: 2733 - DNA, 2300 bp, Homo sapien
ttgaggccaggagttcgagaacagcctgggcaacatagggagaccctgcctgtaccaaaaaaatttaaaaaattagccaggcatgggggcaggtgactgtagtcccagttacttaggaggctgaggcaggaggatggctcgagcccagaagtttgaggttacagtgagctatgataacatcactgcactccagcctcagcaacagagtgagaccttgtctctaaaaatgaaaggaaaaataagtgaactaaggaaactttaaaatttatttttatggccgggcgcggtggctcatgcctgtaatcctagcactttggaaggccgaggcgggtggatcacgaggtcaggagatcgagaccatcccggctaacgtggtgaaaccccatctctactaaaaatacaaaaaattagccgggcgtggtggtgggcgcctgtagtcccagctactcgggaggctgaagcaggagaatggcatgaacccgggaggcggagcttgcagtgagcgagattgcaccactgcactccagcctgggtgacagagcaagactcggtctcaaaaaaaaattttttttaatttttattttttgagacagggtctcaccctgtcacccaggctgaagtgcatgcagtgccacgatcttggctcactgtagcctcaacttcctaggctcaaggtcctcctacttcagcctcccaagtagcggggaccacagctgtgagccaccatgcctggctaatttttttttttttttttttttttgagatggagtctcgctctgtcgcccaggctggagtgcagtggcgcgatcagggctcactgcaagctctgcctcccgggttcacgccattctcctgcctcagcctcccgagtagctgggactacaggagtccgccactgcgcccggctaattgtttgtatttttagtagagatggggtttcaccgtggtctcgatgtcctgacctcgtgatccacccgcctcggcctcccaaagtgctgggattacaggcgtgagccactgcgcctggccgcctggctaattttttatttcctgtagagacagagtctcactaggtttgttgcccagactgatctcgaactcctgggctcaggtgatcctcccgcctcagcctcccaaagtgctgggattacaggagtgagccaccatgccctgcctgcatgtttatattattcagccttaaaaaggaatgaaattcggatacatgcagttttttacatatttaatgccattaaaaatatactctttagaaatagaccaggcgtggtggctcacgtctgtaatcccagcactttaggaggctgagttgggaggatcacctgagcccaggagttcgagaccagtctgggcaacaaacatagtgagacctcttctctacagaaaatgaaaaattagtcaggcatggtggctaacacctgtggtccctgctacttgggagactgaagcaggaggacctcttgaccccaggaggtgaaggctacagtgagccaagacggtggcactgcactccagcctaggcgacagagagagaccttgtcttaaaaacaaccaaccacaataaactctttagaaatagaaaacgatactatgaatataatgtggctttctcataaagtgtttttgtttttggtttgtttttgtttggtttgggttgctttttttttttttttttttttttttgaggcggagtctctctgttgcccagactggagtgcagtggcgcgatctcggctcactgcaatctccgcctcccgggttcaagcggttctcctgcctcagtctcccaagtagctgggtgcccgccaccatgcccggctatctcataaagttaacatgggaaggctatggacaactgcaggtattcgcgtttattttcacctttaaagaaaacgaaaagtatccactccaaaaactggttcctttctacaacctgaactttggagattttcaagaccagccacaaggcctctactcctacggcctggccctcctccccgcccggttcgcgctagactccatttcccagaaaccccggtgtcttggtggagacagcatttcccgggcgccccctcacggggcggggcagtgcggcgcggctccggttcccggcggccctcgcggcaggtttcgggcttcaggacaattcgtgatggcgggggctggttccgccgctgtatcgggggcagggaccccggtggcggggcccacaggccgcgaccttttcgccgaagggctgctggagttcctgcgacccgctgtgcagcagctcgactctcacgtac

SEQ ID NO: 2734 - DNA, 2300 bp, Homo sapien
acaaaaacaaaaacaaaaacaaaaacaaaaacaaaaacaaaacaaagactagccttgacaacatataaagtaccccatctctacaaaaataaataaataagtaagcccggggccaaaggaggtggctcacacctgtaatcccagcactttaggagacagaggcaggaggatcacctgaggtcaggagtttgagaccagtctggccaacatggtgaaaccccatgtctactaaaaatacaaaaattagctgggcagggccgggcatggtggctcacgtctgtaatcccagcactttgggaggccgaggcgggcagatcactagatcaagagatggtgaccatcctcgctaacaccgcgaaaccccgtctctactaaaaatacaaaaaaaaaaaaattagctgggcgtggtggcgggcgcctgtagtcccagctactcgggaggctgaggcaggagaatcgcttgaaccggggaggcggaggttgcagtgagctgaaatagcgccactgcactgcagcctgggagactccatctcaaaaaaaaaaataaaattagctcggagtggtgtggcctgtgcctttgagtagtcccaactactagggaggccgaaatgggagagtctcttgaggccaggaggttgaggctgcagtgagctatgatggtgcaccactgcactccagcctgggcaacagagtgagaccctgtgtctaaataaaatgaaataatagaagagagggtaagagacaaagagattactgggggaaaagtctaacccgtctttatttggagttcaggaacgagggaaataataggtaaaactaatacttgaagagataatagctgataaatttaataaatggacgacaaacctgaagccattgattcaagaagctcaacaaacctcaagtaagatttttttttttttaaacggagtctccctctatcgcccaggctggggtgcagtggcgccatctcagctcactgcaacctccgcctcccggattcaagagattctcctgcctcagcctcctgagtaactggaattacaggcgcccgccagcacgccggctaatttttgtatttttagtagagacggagtttcaccatgttggccaggctgatctcgaactcctgacctcgggtgatccacccgtctcggcctcccacagtgctgggtggccacaagccaccgcactcggtccgctttttgtttgcttgttttttaaaaattaataatatttattttaatctggatggtggttacgtggccagaatacgtttagacttaagatgtttacgttctgctgtagtaaattaaatatcgaaaaagtacttatggaagggaggtaggtgagggataaaagtctacaagttgggttcagtgtatactgctcgggtgatgagtgcaccaaaatctcacaaatcaccactaaagaatttatgtaaccaagctgggcgctgtggctcacgccggtaatcccagcactttcggaagctgaggcgggtggatcacctgtttccatggacatggaaaaccatgttttccacactaattcaatcaatatactcctctcctatctaaaacctgtttctcctgcttcgagtttgtagacgtgcagtgttcatagttgcctaaactcccttttccccatcaacttcaactgctagtggcaaaaatagctgatattggttgcatttttgaggtaggaaaattggcaagatattttccttcactaaagaaacgtagattacgtatgccgtacagggcaatgaaaaaactccgatagcagaggatggtttcgatccatcgacctctgggttatgggcccagcacgcttccgctgcgccactctgctatctagaactaaaatttctcatgattgttatagaacactacgtagtcgttgtcctgacttctttagtgccacctaatgtctgatcaaaaattcgtcattactatagaaccagttcttattggctagttcctgacacagtaggcgttttttattggttcataagcccggtttgacaaagtaagccaataggcataagcgatggggtaaggcgggagccaatcgcaccgggttttattgggacacgccggcaagacgcctcttcagttgtctgctactcagaggaaggggcggttggtgcggcctccattgttcgtgttttaaggcgccatgaggtaagtgggtcgaagcggtcgaaaggtttcaggtattcgacggaaaactttgtgaacgtgggccgaaagaagtcggagtatcagaaagggccatgtatccgggggctggccaaa

SEQ ID NO: 2735 - DNA, 2300 bp, Homo sapien
ccgccatctccattacaggacaagaacattatgcctgtcacacaaaagctttcataatcttccctccactgccctcttccctgcctctcttcctcagtcatcctacatgcacacaccttacatcctagatcagggctgaaaacacaaactcctactacagccaggcaggtaatgcacctgagtgaagcagggtgcctaggaaccataatgaactagactcatttcaaggagataatggatacttgctctggttaattgctcatggagggatgcaggacaatatattgccagctcttccaatattttaaggaaagtcagaaatccaggttgggcctggtggctcacacatgttatccaggaattttgggaggccaatgcaagaggatcgcttgagcctaggagttcaagaccagcctgggcaacatagggagacctccatctttgaaggaaaaaaaaaaaaaagtcagaaatccaaatattcatgtaccatcttttttttttttttttttttgagacggagtcttgctctgttgcccaggctggagtgcagtggcgcaatctcggctcgttgcaacctctgtctcccggattcaagcaattctctacctcagcctcccaagtagctgggattacaggcggccgccaccatgtctggctaatttttgtatttttagtagagacggggtttcaccatcttggccaggctgatcttgaactcctgacctcatgatccacccaccctgacctcccaaagtgctgggattagaggcttgagccaccttgcccggccccatcttatgatatttaagtgtggggaattaaatacaatatacataaagagaatgcaagccaaagcatgcctgccatctcaagttggcctatcgaccacaatttgctctagataataagaatattcaagtctcctaaaattccatatataggaaatgtacttcaacattctgctctgtctacacagaatacctttctcatccttccatcctcttgaattatttcttttttggagattttctggccccaatccaagcagaatgaatagccctcatctgagtcctttagcaatttatccatgtctcccctgtagtgcttaatgcatgttgcattacggttatttgtcccaaatggagctcctcaaaggcacggactatatatattcatctttatgccctcggcacctagtgggtgcttaatgcaccgaaggttctctggaaatgtttgctgacctgaagtttggtgatcttatgtcctgcttaggcgcagcgttggagaggttggcgctgcaatgccgtcaataacccccgatgaccattagagggcacactgattccacagcagtctgcaccgggggcccagctgtcaagtgctccaaaacccactccccaatttacgcctccagtggtcatctcccacagccttcattttaacaaccctcaacacaaaacagtcattttcttggggcgtccctgaggtgtgaacctcctccctcccagacacccacccactctccccatcttcctacaatttgggcgctaaagatttaattcctctctgacaccagatcattttttcacagctaatctgcacagtctggaaggtggcagggagggaaagagagggagatcatagaaggaatgggtaacaagcactctgggctcaccttcaactttaacggactttccagaaacccgtcaccttccaccccacacccaaacacacacatccacgcactcactcagtttcctgccaggatcccaaaccagcacacctttccctcttcccccgaggagaccaggtaggaggcgagggaaaaggtggggcgcaagtgggccccggttgcttccacacacaccctccgttcagccgtcctttccatcccggcgagggcgcaccttcagagggtcctgtcctccaaagaggtaggcgtggggcggccgagaccggggaagatggtccacggggaagcgcgcgggctgggcggcggggaggaaggagttaaagatcctggattggctcttctgtcactgagtctgggaggggaagcggctgggagggagggttcggagcttggctcgggtcctccacggttccctccggatagccggagacttgggccggccggacgccccttctggcacactccctggggcaggcgctcacgcacgctacaaacacacactcctctttcctccctcgcgcgccctctctcatccttcttcacgaagcgctcactcgcaccctttctctctctctctctctctctctaacacgcacgcacactccca

SEQ ID NO: 2736 - DNA, 2300 bp, Homo sapien
tacagaaagtcaaaatgacttccctaaggtcttacacctactaataaagaaaggaatgagtgagccaacttaaaggaacattcacatatagagttaaaatgttaagccattacaagtgtaaaagtaaataggattgcctgtagtggtaactagtatctgtacagtgtattccagtttaaaatgtgatctcacatccattaggtcacataatgttcccaaagctcacaggcaacctttgtctccattttactggaagtaaaacaagcaggaatgtggatttttttttaaaggctacccaagtgaagcagtgggagtggagaaggaacaaagaaatctgtaactggttgtgatcaatgagttgtaaacactactgcactaggacaagcctgtggatttttttttttttttaaagcaggctttaaacatagcgaaatttggccgggcgcagtggcttacgcctgtaatcccagcactttgggaatccccggacgggcgtatcacgaggtcaagagatcgagaccaccctggctaacacggtgaaacctcgtctctactaaaaatagaaaaaaattagccaggcgtggtggcaggtgcctgtagtcccagctattcgggaggctgaggcaggagaatagcatgatcccaggcggctgagcttgcagtgagctgagatcgcgccactgcactccagcatggtcgacagagcgagactccgtctcaaaaggaaaaacaaaacaaaacaaaacaaaattaaccgggcgtggtggtgggtgtctgtaatcccagctactcaggaggctgaggcaggagaatcgcttgaacccgggaggtggaggttgcagtgagccgagatcacgccattgcactccagcctgggcgaaaacagttgagactccgtctcaggaaaaataaaaaaaaaaaaagcgaaatttgatctgtctttgggcctgtgaaagataatcctaaagtgctcttgaaaaaaaaatgccactgagacacacagatggaaaaccaagaaatacaaatggacttacaaaacaatcaaggccacattgcattcgcaacgcatcacaacactgcattgggtgaaagtgacatgggtcagtcccagatactcaaaacaaaaatgaagttggttctatcatttggaacatttttgctggaggtagtgctggcacgattcgaacgacttgttttgcacaagtgggtcaatgcacatttttttttttttttttttgagacggagtttttgctcttgtcgcccaggctggagtgcagtggcgcgatctcggctcactgcaacctccgcctcccgggtgcaagcgattctcctgcctcagcctcccatgtagctgggactacaggcgcccgccaccacgcctggctaatttttgtatttttagtagagacggggtttcaccacgttggccaggatcgtctcaatctcctgacctcgtgatccgcctgcctcggcctcccaaagtgctgggattacaggcgtcagccatcggactcggcctaaggggcaatgcactttttttgcaaagtctgataattgcacttatgtgagtgcatacacgtgcctgtgtgatgcactcttagctctggaagctggcttcataccacccgacggcatttgctctgtgactgcctacgggttggggtacgttccctcccccgccctgccacttcgtggcaggcttcgtgtctctcaaagccacgcagggacattgcccaggttcctgcacccacccaaattctaggaggaacagggcggaggctgacatcgcgcatgcgcctcagcgcacgccggcgcagcctctctccttcctcatcgcctcgcgctcccaccccaccccgagagcaaaggagggaagcgattgggcacgctagttgtccatcagaccaggctctcttctccctcaacaccattggcagacggagaaaaggccagtccgccgaggtcttcctaccccttggagactcagcgccaccgcggaagcagctattggcggaggccaggggccgcgactgctcacttccggcgcgggcctagacgatttctccccctcccccgccctccgccttcccaccccccgcccttccactatggccgcttctgtgtggtgtggggagacgctggtcctccccgtcctcccatagcgcttattgcctcaccctcaccccctaggggccggatccaaaggcgctgcactccccaagccttggggcatcagccaggaaggtttcctacctcctaattcaggggcaggactcctcttttccccccacggggaaaa

SEQ ID NO: 2737 - DNA, 2300 bp, Homo sapien
actaattaaacaccatctcatcttcctgcagttccctgccttccaacaggggggccaaagccattacaaattgtttgctgggaggagacagcgtctcaattttgtcacttagagacaggattagagttttaggaatatccccactgtgtctttctctctactccttttaaagcaactgggaacaaatctttcattacccccttttccctcagggatattctgaaactcatgggaaaaggagtttgccacccaaaatcgggttctttttttcaggttgtgatttaggacaggtgactcattgtgtgggagtggggactcgttgtgtatcagtgactagatagagccagggaaaggtttgtggcatggtgagctgctaatgataagcagactgagctagcacagtatgttctcaaaactccaggtcctgaaagggtcttggcagtccccacatgttcttgcaccacacttaagaaccactgacttagggacacttacccagcttttccccatagtctgacctgggtagatactgtggttaattctgtccctagtacctcacatgttgcttggcacatgataggcactcagtaaatgtttgaatgaatgagtcaacaaagagagttattttcttggaagctaagtagttaggtggtaaaaagagattgctttcatttggcacttatctttataggcacttggaagagaaaattaggaagttgtccgtagcttagccagttgatagtccaagatagatactagcatgagtgagcaagcaaaaaatcaaagcatctactcccagtgtcaaatcatcaattatttctgaggcactgtagccaagcccaagaagcgtgaattgggagggtgaatagttctagacagagcataggagccagtgtgtttcctccctgcagggagtgggtcctgaagagcagcatcctcattgccatggctgtttacacgtacctccgcctcatcgtggaccaccatgggactgcccagctccaggccctgcgacagaaggaagtagacttctgcatctcactgcttcgggaacgggtgagggaacaggacaaaaataatgtggggaagtgagactcaggctaagatacctctggaggtttatgcagtggagtcagaaataccttgttagagatgaaggtgcatcaagatctggtgttttccatcattcatcaacagatgagggtagaaaggagggggagttagtgtaaaatagccctaattcctagaaatgctacctgttaagctggcatctttgggatttccctggtcagcttcaaggatactgttgtataccacagacataagctgtccttgtgtgcctaccatgacacagtcccccacctactctcctgggtaattcccatggtctagtgggattatgaattgtcctctatcagacctcccatgtggcaattaaaaattttttttactttttatttttgtagatactgggccttgctttgttgcccaggctgatctcaaactcctggcctcaagtgatcctcccacctcagtctcccaaagtgttgggattataggcgtgagccactctgcccagcctaaaattaatgttagataaaaagttaaaattcacttctctagttgcattagctacacgttgctaatgggtttcatttagactacacagatatagacatttctaccacagaatcggacccacagaattagatactgcagaattttgttagacaaaataagtttgaggttagggtttctggggctcaacttgccagtcccatccttttgaaactttaatcttccttgaactggattgaaacagttctgagtggagagggaggtagattaatgtgaaagccagcagggcttcagcacttcccactaacctctcatccttgatatcagtccccagcttccagctctcttcccctgaacagctaggagccaatcctttggttccagaagaaatcatagtttcttcaaccctctttccttccctccctagaacatgttgttcctttgtcctccctccagcaggtaaacaatccatgtttttattctctttcctgtcccccacttcctcttccctatcaagttcatggaatgtctgatgattggtcgggatctcgtaagactacttcagaatgttgctaggataccagaatttgaactgctttggaaagatattatccataatcctcaggccttgagtcctcagttcacaggtaagtagggtcttaggcatcctgtccttgagagctgggagttcaatgtgtatgtcttgcttgaatcaagaaggt

SEQ ID NO: 2738 - DNA, 2300 bp, Homo sapien
gcgatttggtcaacaaaagcgataccaagattggttccagcgccagtacctgtcaactccagatagtcagtctctgcgctgtgacctcattcgctacatctgtggggtagtccacccttctaatgaagtactgagttcagatatcttgccccggtgggccatcattggttggctcctgacaacgtgcacggtgagggcaaaagatactgggtggtgaagggtgcctcttccatggtgttcccatgtttccattcttcttcctgactccagggccacttgacccctaagggcccttctttcactctggtcttccagagtgtctcagccttcacttccctttgtgtctctagaaatttacttacactcattattttccatctgggtttgagattgaacaggttcatctcccccattactgccaacccccaaaagcctgggtttctggagcgtccctgcctttttcatttttgcttccagaaaccatatacagctattcctcttaactgtttctttctcagattcagagcttgcattctttagaccctcaccaccatgcctttttggcatcagctttgtctacttcccttctgtaaatgcagcgaatctgcagtggaggcatttcctttcaaatgttttcctctctgtgcctagggtgggaaactatccattctctggcatctggctgccccctgacctcttccaacagggttcctcctcccccatttgactgggtccttggaatgtgctgattcagatatgacaacaggctattcctggaggggtgggggtctcttcttcaggaatgtgcctggagagcccagaaagggcagccaaggggtgctagtctgactgttgcctcagctcaggggtgatgagtggacttctgagtccaagcattgtcccctatgggaatcagagatatgaactgctggatgtatcaagaacccaggcctgccgagcacggtggctcacgcctgtaatcccagcactttgggaggttgaggtgggcagattgcttgagctcaggagtttgagaccagcctgggcaacatggcaagaccccatctctacaaaaaaatacaaaaattagccaagtgtgttggtgtgcggctgtagtcccaggctgaggtgagaggaccgcttgagcctgggaggtagaggttgcagtgagctgagatcctgccactgcactccagcctgggtgacagagtcagaccctgtctcaacaacaaaaagaaaagaacccaggcctggccaggcatggtggctctcacctataatcccaatactttgggaggctgaggtgggaggatcacttgagcccaggagttcaagaccagcctgggcaacatggcaaaacccatctctaccaaaacaaaacaaaacaaaacataaagccacgcatggtggtgtgctcctgtagtcccagctaccaaggaggctgaggctgggaggatcacccgagcctaagaggtcaaggctggagtaagccgtgatcatgccactgcgctccagcctgggtgacatggcaagaccctcatctctacaaaaaaatagaaaaatgagccaggtgaggtggtgcgtgcctgtagtcccaggctgaggtgagaggctctctcgagcctgggcggtggaggttgcagtgagctgagatcatgccactgcactacagcctgggcaacagagcaagaccctgtctggaaaaaaaaaaaaaaaggttcggggggtacctggcccaatccctgtcctctgtcctcttggttaagaccataagaccacagagtattcactcatacacaacacaaggggggttagcatttcaccgtgtttcactaggaactgaatttcatagatgaaacagccaagtggggcctggaatctgtcttgggactctgaaatggaggggggtgattgatgaaactagccctctgtttctcccctctcttttccagtcaaatgtcgctgcctccaatgccaagctggctttgttttatgactggctgttctttagtccagacaaggatagcattatgaacataggtatgtgaccaagaccaggcggctccacttccccatccccctaagcccccactgccttccttagtgatagcagtcataaatctcagggcaccgtggagtggaggcagtttatctgggagcagctctgttgttcctcatcagttttcccttgacctagaaagagaattgctttgataaggctaagccatcactgtacctcctccccacagtcttcaggatgcatggtcttcaggaggggagggcatgggcaaaggaaaagg

SEQ ID NO: 2739 - DNA, 2300 bp, Homo sapien
aaagaaaagaacccaggcctggccaggcatggtggctctcacctataatcccaatactttgggaggctgaggtgggaggatcacttgagcccaggagttcaagaccagcctgggcaacatggcaaaacccatctctaccaaaacaaaacaaaacaaaacataaagccacgcatggtggtgtgctcctgtagtcccagctaccaaggaggctgaggctgggaggatcacccgagcctaagaggtcaaggctggagtaagccgtgatcatgccactgcgctccagcctgggtgacatggcaagaccctcatctctacaaaaaaatagaaaaatgagccaggtgaggtggtgcgtgcctgtagtcccaggctgaggtgagaggctctctcgagcctgggcggtggaggttgcagtgagctgagatcatgccactgcactacagcctgggcaacagagcaagaccctgtctggaaaaaaaaaaaaaaaggttcggggggtacctggcccaatccctgtcctctgtcctcttggttaagaccataagaccacagagtattcactcatacacaacacaaggggggttagcatttcaccgtgtttcactaggaactgaatttcatagatgaaacagccaagtggggcctggaatctgtcttgggactctgaaatggaggggggtgattgatgaaactagccctctgtttctcccctctcttttccagtcaaatgtcgctgcctccaatgccaagctggctttgttttatgactggctgttctttagtccagacaaggatagcattatgaacataggtatgtgaccaagaccaggcggctccacttccccatccccctaagcccccactgccttccttagtgatagcagtcataaatctcagggcaccgtggagtggaggcagtttatctgggagcagctctgttgttcctcatcagttttcccttgacctagaaagagaattgctttgataaggctaagccatcactgtacctcctccccacagtcttcaggatgcatggtcttcaggaggggagggcatgggcaaaggaaaaggctgtaccatgtcctgcttctcctcacctattacttcccttctcaaagctgaatgctgggaacaagaagggaaatgagggctacaagctgtttcggggcctgtctgctcttgggtctgctcagtggaaatggggggaatagacatagcacttcccagagccattcatgtatattgacatcccattttatggagatagaaacagactgactttagcctggcgtggtggcgcacacctgtaattccagctgctggggaggttgaggcatgagattcgcttgaacctgggaggcagaggcttcagtgagctgagatcgtaccatttgcactccagcctgggtgacagagcaagactctgtttcaaaaaaaaaaaaaaaaaaaaaaaaaagagagagagagactgactgatgtgaggggctctttaatttcacatcctccagaaccagccatcctggtcatgcaccactccatgaagccccacccagccatcactgccacactcctggacttcatgtgccgcgtaagtgttagagctctcttttctccccatgcctggatgagcagaattcagtgtatctcccctaatctcccagtgaacgggtcttctcggtatgccttgactgagagcagaaatggtcatgggtcctatcccccaagttaataaatgcttcccttccatattccactgtctgcacttggatcttcccattttctgtggggtttctcaatcacaaggatggtgactcaaggtagaatctggtttccttggggagcagccaggtccagtaagaatttctcatttgagtggcctggagtggtcaggaagtccagttctctctgcagccatactccccagtgtcccctgatcaaaaccaaagcagcttttcagatctaattcagcggaagcctctggatggagtcctgtgctcatttttcccctccttcttcgcttccagatcattcccaacttctatccaccattggagggccacgtgcggcagggtgtcttttcctccctcaaccacattgtggagaaacgggtcttggcgtaaggaatttggtgggggaaggaggttgttttcccatttttcattaggtccaggtgtatccaaatgttgccatagcactgctggcccttttctctgacaggtgtaaaaagtattggctctacctcagactgctgggcatatgtcttcttggctcttagaggaatttctctcctgccatcgtattac

SEQ ID NO: 2740 - DNA, 2300 bp, Homo sapien
ccagtgtcccctgatcaaaaccaaagcagcttttcagatctaattcagcggaagcctctggatggagtcctgtgctcatttttcccctccttcttcgcttccagatcattcccaacttctatccaccattggagggccacgtgcggcagggtgtcttttcctccctcaaccacattgtggagaaacgggtcttggcgtaaggaatttggtgggggaaggaggttgttttcccatttttcattaggtccaggtgtatccaaatgttgccatagcactgctggcccttttctctgacaggtgtaaaaagtattggctctacctcagactgctgggcatatgtcttcttggctcttagaggaatttctctcctgccatcgtattacaaaggtcttcaaatgccttcatgttccctgttgacccccttcagggatctgagtatggtccagttagactgattgtgcttagacctatctcaactccatgttgagttagaaatgagaagctctggccagacacagtggctcatgcctgtaatcccagcactttgggaggccaaggtgggcagatcacctgaggttaggaatttgagacctgcctggccaacatggcaaaacccgtgtctactaaaaatacaaaaattagccaggtgtgatggtgcacacctgtaatcctagctacttgagaggctgaggcacaagaatcgcttgaatccgggaggtggaggttgcagtgagccgagattgtgccactgcactccagcctaggtgatgagagtgacactctgtctcaaaaaaaaataaaaataagagaagctctgatattgaccttcatcatgttccccatttagacacctagctcccctgtttgacaaccctaagttggataaggagctgcgggcaatgctgagagagaagtttcctgagttctgcagctcaccctccccacctgtggaaggtatgaggcccgcccattccatcacctgtgtcaaaagaggggcaagacaaccaggccttcaggccagagcccctttcaggatgtcccacacagttctccacttccgtgacactgtccatcacagtttttccttcctcagtttatcttttttattcatttttgtgttgtctgtcttgattctcttgctttatctaatcttatttgacttgctcatctttcttgttctcttaactcttttctcctagtaactcctgctcagtagttagaaggctttcatgtaatatttacaatatttatctcactttaacttgcccatctctcttcccagctctaggccctggcctctgatgacagtttgtcatgttgggcctcaaaccttactctcaatacaactgccatctccttaccacacatacacactttgttttgggataagggtctaagtcaagtagtattttccaacttggttttaaattaaagagcacttggaggctgggcatggtggctcatgcctgtaatcccagtactttgggaggctgaggcgggtggatcacttgaggtcaggagttcaagaccagcctggccaacatcatgaaactccgtctctactaaaatacaaaaaaatttgtatttggcgggcacctgtagtcccagctactcagaaggctgagacatgagaattacgtgaacctgggacggggaggttgcagtgagccgagatggcgccactgcactccagcccaggcgacaagagtgagactagcacttcggactgtccctgatcttactctagttaccaatcctaatgagctgagcatagaggagtcatgtccagtgttgctcttattcctggcaacatccctctgcaggtcatggagggttgtgaggacaagaggtttgtcaagaggtttgtcctcccagggtcagtattccatttagatgataaactccttattctctcacttgccctccattctcccttcctagaagcatggggcatgttagaggacccaggaggccattaaatgccttatctttttttactcccaagtcaaaattgaggagccagtttccatggagatggacaaccatatgtcggataaggatgagagttgctatgacaatgcagaggcagccttcagtgacgatgaagaggatctcaacagcaaaggtgaggccatcagcaagggctagttcagggttgtgtcagccctgagaggaccagttcccagaagcagcctctctgcactcttcctgtcacccttattcctgtgagttaaagttttgttcacagggtatctggatgagactccagaatgcagagccctgtacttaacactcaaggc

SEQ ID NO: 2741 - DNA, 2300 bp, Homo sapien
ggccttcaggccagagcccctttcaggatgtcccacacagttctccacttccgtgacactgtccatcacagtttttccttcctcagtttatcttttttattcatttttgtgttgtctgtcttgattctcttgctttatctaatcttatttgacttgctcatctttcttgttctcttaactcttttctcctagtaactcctgctcagtagttagaaggctttcatgtaatatttacaatatttatctcactttaacttgcccatctctcttcccagctctaggccctggcctctgatgacagtttgtcatgttgggcctcaaaccttactctcaatacaactgccatctccttaccacacatacacactttgttttgggataagggtctaagtcaagtagtattttccaacttggttttaaattaaagagcacttggaggctgggcatggtggctcatgcctgtaatcccagtactttgggaggctgaggcgggtggatcacttgaggtcaggagttcaagaccagcctggccaacatcatgaaactccgtctctactaaaatacaaaaaaatttgtatttggcgggcacctgtagtcccagctactcagaaggctgagacatgagaattacgtgaacctgggacggggaggttgcagtgagccgagatggcgccactgcactccagcccaggcgacaagagtgagactagcacttcggactgtccctgatcttactctagttaccaatcctaatgagctgagcatagaggagtcatgtccagtgttgctcttattcctggcaacatccctctgcaggtcatggagggttgtgaggacaagaggtttgtcaagaggtttgtcctcccagggtcagtattccatttagatgataaactccttattctctcacttgccctccattctcccttcctagaagcatggggcatgttagaggacccaggaggccattaaatgccttatctttttttactcccaagtcaaaattgaggagccagtttccatggagatggacaaccatatgtcggataaggatgagagttgctatgacaatgcagaggcagccttcagtgacgatgaagaggatctcaacagcaaaggtgaggccatcagcaagggctagttcagggttgtgtcagccctgagaggaccagttcccagaagcagcctctctgcactcttcctgtcacccttattcctgtgagttaaagttttgttcacagggtatctggatgagactccagaatgcagagccctgtacttaacactcaaggcaggaaggaaaaaagaagtggttcctgcccttgtttgcttgtaagagctagtacatgtgcacagtcagggagatgcttcaggcactcacacagcattgaggaaacaggtgcacacttagggcatgtgaggaaggggataagtcattgaggggactgtctctgttgctggcatctgggcaaactgacttctttcccaaatcactccctttaggaaagaagagggagtttcgcttccaccctatcaaggagacagttgtggaggagccagttgatatcaccccttaccttgaccagttggatgagtccctgagggacaaagtactccagctacagaaggggaggtgggtacagaccttgttctcaacttcaggaggttcagccccaggctctctacctggtgcttaatgggtatagcaggagatgggggttggaggcaaacatgataggagtgtgtggagaggtagctgaagcttcatgagggagttcttctgcactttacgttagggagtatgagctgggagtggggcagcctcattccgtaacaccttgagttcccactctgcagattcttgggagaagaacctctgagaaccaaggcaggattggtggggattttccttttctttgggcctctgcccagagagcagccaattctgccctaaagcctccccatccaagctgggattttacacagagctcctttgttttgtctctgtgcatgtgagtgtgcttgtgcactgttctgggtgtgtgtcctgccctctgctatcatttatgtccctgggatttcctctcatttctgtcctgcagtgatacggaggcccagtgtgaggtcatgcaggaaattgtggaccaggtcctggaggtgaggaggaacccaatcccttagggaggaagcagcctagcctgcttagcttacacgtctcccagggaagacaactcactttttccctcccctagatgagtccctcttatagtggggaggggagcttgctgatcctggaggtg

SEQ ID NO: 2742 - DNA, 2300 bp, Homo sapien
tttctacctgctgaacaccgtgcgtactggggaggttgacacctcctcatgcttccagcccttgctgctgggcccagtaactctaatctgctgaattaggtgtgattggaccttggcctggagcctgtctccaaagggcaagagcgtggtcccatgttaggaacctgttttctctgttaccaagcctgcggagcagcaggaagtttgccttttgggtagggaaggagcaggctggtgtctagcctccagctggtcctccgtatgtgccagcagcccccctcacatggattctcaaatataaccctcttcttgtaggtccctggaggagtctgtaggaaagcctctgtacctaatatttaggtaagcacgcagctataggagatactgttctaccctccatcctccctgacagcacacacatgtgctcctgtcctggggtaatgggactcgctttccagggaggaggacatatgctgtgggcacagacagcccatgccacctgagaaactccatgggagagtctgccctgggtaaagttctgttcctctcctcccatgccccacctccaggaacctatgtcagatgcaggaagacaacagcagcttctctctacttctagaccttctctccgagctatatcagaagcagcccaagattggctaccacctgctctactacctgagggccaggtgggtatggtccccatgtttcaaatggtgtcaggacacatcctggagagcctctcttccacacgctgactccccaaccctggactgtcatcaccagggccttctttgtgggtctgtttggttgagttggtttgtttttaagagacagcatctcactctgtcacctgatgacactgcggctcagtgcatgtcactcactgcagcttcagactcctgggctcaagccatcctcccccctcagcatcctgagtagctgggactacacaggcatgcactaccatgcccagataattttttaaaatttttttgtagagacagggtcttactttgttgcccaggatggtctcaaactcctgggctcaagtgatggtcctgcttcagcctcctgagtagctaggattacatacaggcatgcgccatcacgcccagttattggttttgggtttttttttcccctactctgagtaagccttgtgtactcctaaggcttttttttaatttaaatttttatttatttattttttgagacagggtctcactcagtcacccaggctggagtgcagtggtacaatctcagctcactgcaacttccacctcccgggttcaagcaattctcccacctcagcctcccaagtagctaggactacaggcacccaccaccacgcccagctaagttttgtatttttagtagagacagggtttctctgtgttggtcaggctggtctcgaactcccgacctcaggtgatccacccaccttggcctcccaaagtgctgggattacaggtgtgagccactgtgcccggcctcaataattttttagtatattcacaaagttatacaactatcactactatctgatttagaaagaacatttttatcaccccaaaaagaaatctcatactcattagcaatcactttgccattttctccccttcacccagctcttggcaaccactgatctgctttctgcctctatagattattttggacattttcagataaatggaatcaaactgtatgtgatcttttgtgacttgcttttttctttctcttttttttttttttttttttttttgagacagagtctcgctgtgtcgcccaggctggagtacagtggtgcgatcttggctcactgcaacctccgcttcccaggttcaagcgattctcctgcctcagcctcccgagtagctgggattacaggcacagatcttcacgcccagctaatttttgttttgtttatttgtttgttttgagatggattcttgctctgtcacccaggctggagtacagtggtatgatcgcagctcattgcaacctccgcctcctgggttcaagcaattctcctgccttagcctcccgagtagctgggactacaggtgcacgccaccacatccagttaatttttgtatttttttgtagagatggggtttcactgtgttggccaggctggtctcgaactcctgacctcaggtgatctgcccacctcggcctctcaaagtactaggattatagacgtgagccaccgggcccagccatttgtatattttctttggagaaatatctattcaaaaatgttcctatttttaattgagttatttgtctttttatta

SEQ ID NO: 2743 - DNA, 2300 bp, Homo sapien
cttaagggggccctggcgggtggagggtgtctcgcactctggaaccctcccacactcagactctggctctggtgattcctgcacagcctgaggagctctagcagcaagctggcccagctgactctggagcagatcctggagcacttggacaatctgcggctcaacctgaccaacaccaagcagaactgtatgccttccaccctcggcgtccagtgtagacggtgctgccctggcccagactatgcctggagccaggctgggggcaggggcaggacacccggggccacaacccacactcgggataaaacaacctgtgcgtgctgtttaataagctcccagacatctgattgtttttccttccctgctctcccttttcttcctctagtttttagccagacgccaattctccaggcgctgcagcatgtccaagcgagctgtgacgaagcccacaagatgaagtgaggctcctgccactttgggccttggaaagtagtaggggaaaagcctaagggagaggaagcctgctagggacataaacgtaatggccagcaagaccttagggtccagggttgaagaaaaagaaggcctaggcctgggggcagagaagaggatgggaggtgccgtaggagcagcaggctcccactcaaagagctaccgctccttttccttagattcagtgatctcttctccctggcggaggaatatgaggactcttccaccaagccacccaagagccggcgaaaagcagctctgtccagccctcgaagtcgaaagaatgccacacagccccccaatgccgaagaagagtcgggctccagcagtgcttcagtgagaacccagccagtgcacagggggaaaaggagcactgggtgcaggtggagtcggcgccagcagctgcccaggctgttaacttcccatttcccctcccatctcttccaggaagaggaagacacgaaaccgaagcctaccaagcggaaacgaaaagggtcctctgcagtgggctctgacagtgactgaggccctgcattccccatcccacccccggctggactgccctctccttcttggtgattcaaaggttaatagaggctgaggagattgcaggggaaacacccttgctgcatccccaagctcccccggtggaaggaggagctttctcctctggctgagtttgagaagctgccatgcagcccctagccccttccctcctcctggggcctccagcccctcacactgctgttcccagtgatatttgggatctgactgaagccagaggctctgtaaaatcagaccatagtggaagtcctcagccccctggccccttccgcaatctcctcccccagtctcccaaagagccatttcaacagagaagggaaatgacaaaggggcagctggccagataagctaggatgagagcagagactcagtgtgtgggtgtcccttcctgcttccccttcaggtcttggtttgttctgaagggacgttttatagtcactatccacatgccagtgtgaaatgggcatctatgacgtggtcagggtgtccattcctaatcatggggcagatgccacaagcattcagaaaggagtctgaaagggtggccacagccccacgtggtgtgccctggaggcttaggttggtctgaggttggcacctcaatctacaccagagcccagggagtcccagaggcaagtttcacagaattgtcaaatgatcccatttccttgagtctgtttttttttttgtttttttttgttttttttttggcagagataatcgtgtcttaaaagttgtttttaaatgacaataaaacaagccagaatgtcttttgtgctggagtgtctgctggcatttgccccgtgcatgtatagcttggtcttgatttgattggcacccctacttgtaaccgcagaacatccccctttcccttcctgttctgcccccacttttgtctagagcagaagggacttggctttggccactacccatccttcctgctgccactggaggtgggagccaggcactgatctgtctatgcagaaccatcccccgtaggatgaggcctgtccttactcatttctcaagaaacaagatgcttccaaaaggtctgtcatcctccagttgaagtctgtgtgcctaccaagaatggccggaggactcgctgcttgacgggagggatgctccagcttggtctccagggacaactgtacctggagataaagtctggataccagggagggacagagatgctcttccttccacagtgtggccacttgctgggccatgtgaaccagcagagg

SEQ ID NO: 2744 - DNA, 2300 bp, Homo sapien
ggaagaggaagacacgaaaccgaagcctaccaagcggaaacgaaaagggtcctctgcagtgggctctgacagtgactgaggccctgcattccccatcccacccccggctggactgccctctccttcttggtgattcaaaggttaatagaggctgaggagattgcaggggaaacacccttgctgcatccccaagctcccccggtggaaggaggagctttctcctctggctgagtttgagaagctgccatgcagcccctagccccttccctcctcctggggcctccagcccctcacactgctgttcccagtgatatttgggatctgactgaagccagaggctctgtaaaatcagaccatagtggaagtcctcagccccctggccccttccgcaatctcctcccccagtctcccaaagagccatttcaacagagaagggaaatgacaaaggggcagctggccagataagctaggatgagagcagagactcagtgtgtgggtgtcccttcctgcttccccttcaggtcttggtttgttctgaagggacgttttatagtcactatccacatgccagtgtgaaatgggcatctatgacgtggtcagggtgtccattcctaatcatggggcagatgccacaagcattcagaaaggagtctgaaagggtggccacagccccacgtggtgtgccctggaggcttaggttggtctgaggttggcacctcaatctacaccagagcccagggagtcccagaggcaagtttcacagaattgtcaaatgatcccatttccttgagtctgtttttttttttgtttttttttgttttttttttggcagagataatcgtgtcttaaaagttgtttttaaatgacaataaaacaagccagaatgtcttttgtgctggagtgtctgctggcatttgccccgtgcatgtatagcttggtcttgatttgattggcacccctacttgtaaccgcagaacatccccctttcccttcctgttctgcccccacttttgtctagagcagaagggacttggctttggccactacccatccttcctgctgccactggaggtgggagccaggcactgatctgtctatgcagaaccatcccccgtaggatgaggcctgtccttactcatttctcaagaaacaagatgcttccaaaaggtctgtcatcctccagttgaagtctgtgtgcctaccaagaatggccggaggactcgctgcttgacgggagggatgctccagcttggtctccagggacaactgtacctggagataaagtctggataccagggagggacagagatgctcttccttccacagtgtggccacttgctgggccatgtgaaccagcagaggagagttccttggctatgctgttgttcccccgctgtccagggagaatggaggtggactgaggagtgaagtttgggcgaactgcacagagctgctcctcttcaccccgaaaatttgtctttttacagaatccaggttctcccctccctcatcactgctgttgcttcctttgaaagtctaaaccactggaggcttctttttccttcctctctccttccccagtttcctctgtcccaattaaaaccaggatggagagcatttgctggctggccccaattattgtacccttgcccaaagggaggggcctctgtcgtgacccctcagaaatctggcagtctgggtttccacctttcccctatttaactctcagcccccacccatcccctggggttgcggctggcaggccgggacttgcagaaccaaatgggccaggggccaagttcattcttttgggagagagcaatggtaccttcccttaacgggaaaacgagaaatattgaggggaagatggactgcgatccaaacgccctggctctcaggcctggactctagggcttagccagatgcctaaaccgcccaagccgagaaacaacttagaagacagacataaccctgggattcagggaaggcgcgagcaccgcccaggacctggtagggtgcgagccgcgagcagtccgggagggagcgcgcctagggcggagcgtaggctgtggggggagggctgggagtccggggccgccccacacccgcactcctcccgggtttctgctctccgcccgtgtggagtggtgggggcctgggtgggaatgggcgtgtgccagcgcacgcgcgctccctggaaggagaagtctcagctagaacgagcggccctaggttttcggaagggaggatcagggatgtttgcgagcggctggaaccagacggtgccgatagaggaagcg

SEQ ID NO: 2745 - DNA, 2300 bp, Homo sapien
agagatgctcttccttccacagtgtggccacttgctgggccatgtgaaccagcagaggagagttccttggctatgctgttgttcccccgctgtccagggagaatggaggtggactgaggagtgaagtttgggcgaactgcacagagctgctcctcttcaccccgaaaatttgtctttttacagaatccaggttctcccctccctcatcactgctgttgcttcctttgaaagtctaaaccactggaggcttctttttccttcctctctccttccccagtttcctctgtcccaattaaaaccaggatggagagcatttgctggctggccccaattattgtacccttgcccaaagggaggggcctctgtcgtgacccctcagaaatctggcagtctgggtttccacctttcccctatttaactctcagcccccacccatcccctggggttgcggctggcaggccgggacttgcagaaccaaatgggccaggggccaagttcattcttttgggagagagcaatggtaccttcccttaacgggaaaacgagaaatattgaggggaagatggactgcgatccaaacgccctggctctcaggcctggactctagggcttagccagatgcctaaaccgcccaagccgagaaacaacttagaagacagacataaccctgggattcagggaaggcgcgagcaccgcccaggacctggtagggtgcgagccgcgagcagtccgggagggagcgcgcctagggcggagcgtaggctgtggggggagggctgggagtccggggccgccccacacccgcactcctcccgggtttctgctctccgcccgtgtggagtggtgggggcctgggtgggaatgggcgtgtgccagcgcacgcgcgctccctggaaggagaagtctcagctagaacgagcggccctaggttttcggaagggaggatcagggatgtttgcgagcggctggaaccagacggtgccgatagaggaagcgggctccatggctgccctcctgctgctgcccctgctgctgttgctaccgctgctgctgctgaagctacacctctggccgcagttgcgctggcttccggcggacttggcctttgcggtgcgagctctgtgctgcaaaagggctcttcgagctcgcgccctggccgcggctgccgccgacccggaaggtcccgaggggggctgcagcctggcctggcgcctcgcggaactggcccagcagcgcgccgcgcacacctttctcattcacggctcgcggcgctttagctactcagaggcggagcgcgagagtaacagggctgcacgcgccttcctacgtgcgctaggctgggactggggacccgacggcggcgacagcggcgaggggagcgctggagaaggcgagcgggcagcgccgggagccggagatgcagcggccggaagcggcgcggagtttgccggaggggacggtgccgccagaggtggaggagccgccgcccctctgtcacctggagcaactgtggcgctgctcctccccgctggcccagagtttctgtggctctggttcgggctggccaaggccggcctgcgcactgcctttgtgcccaccgccctgcgccggggccccctgctgcactgcctccgcagctgcggcgcgcgcgcgctggtgctggcgccaggtaaggctggagctccgaactgactaaggcggggccagccacagaagggggcgtgtcggagaccacagaaaggcttggtctcatccctgggcctgggaagaagccgactatcccttggggttcgaaagtgggtggagataggagtctccgggtttgagaagggatgaggctgaatctttggtgccccaaggatccccaaggagtcgagttccaggcctcagacccaagatggaatgtccatacccttcaccctcatccaagagcagtgtgggctgggatagggaggggacatgggtcataggctcttctaggtagagccagggccccggcgttgtgctttcccacccttctagagtttctggagtccctggagccggacctgcccgccctgagagccatggggctccacctgtgggctgcaggcccaggaacccaccctgctggaattagcgatttgctggctgaagtgtccgctgaagtggatgggccagtgccaggatacctctcttccccccagagcataacagacacgtgcctgtacatcttcacctctggcaccacgggtgagggccgggcaccatacttagctccccgaaaccaaggcagaggaaggcaggggtctgctcccaga

SEQ ID NO: 2746 - DNA, 2300 bp, Homo sapien
acaggccgggcacagtggctaatgcctgtgatcccagcacttcaggaggccgaggcagacagatcacaaggtcaagagattgagaccatcctggccaacatggtgaaaccctgtctctactaaaaatacaaaaattagctggacgtggtggcacacacccatagtcccagctacttgggaggctgaggcaggagaattgctttgaacctgggaggcagaggttgcagtgagctgagatctcaccactccactccagcctggcaacagaacaagagtccatctcaaataaatacataaatacaaatataataaagggtgtgtgtttcattttttggtcttgttttgtttttgttttgagacagtttcactctgtcacccaggctggaatgcagtggtgtgatcttggcacactgcaacctccaccttgcaggttcaagtgattctcatgcctcagcctctcaggtagctgggactacatgaaagctccaccatgcctaattttagtatttttagtgcagacagggtttcaccatgttggccaggctggtctcgaactcctgatctcaagtgatctacccacctcagcctcccaaagtgctgggattacaagcgtgagccactgcacccggcccctgtttcgttttatttatttttcattgcaactggaaaagaatctttttaatttaattcattcattcattcgttgattctttgagatggagtctcactctgtcgcccaggctggagtgcagtggcgagatctcagctcactgcagcctctgccttctgggttcaagcaattctttgcctcagcttcccaagtagcagggattacaggcgcccgccaccacgcccagctaagtttttatatttttagtagagatggggtttcaccatcttagccaggctggtcttgaactcctgacctcgtgatccaccctcctcggcctcccaaaatgctgggattataggtgtgagccaccacgcccagccctggaatagaaaaaaattttaagtactccatttttacaaatgaaattgaaacttgggaaggtaaaataacttactaaatatttgacctggttaacataagtagcaattttaaactgtgtttctttgacttaaaagattttcttactattttatctttgctgtttcctaccaggacaacaaacctggatttgaaagtgttggagaaaatctaaatctgaatttgcatttagattttttttttgttgtttcctggagagagagcctcgctgtatcgccctagctggagttcagtggtacgatcaggctcagtgcagcctcaacctcctgggctcaagcaatcctcccaccttagcctcccaagtagctgggactacaggcatgtgccaccatgcctgacaaatttttaatttttttgtagagatggggtctcaccattttgcccaggctggtcttgaactcctgggctcaagccatcctcccacctcagcctctggaggagctgacaatacaagttgagccaccatgtccggcctacatttagattttgttagtgtaaaaaaaatcaaagtgaaaagggaagataatgattaattagcttgtcgttaacactttttcttcatgagtaaagaaaaaaatagtgcttcttatcaggctaagcacctgagttcttcattttaaaaagcatcttaaatgtcttcagattttgaatctgctaaccctggtgacatgcagtttacctatataacaaacctgcacatgtacccttgaacataaaataaaagccaaaaaaaaaaaaagattttcaatctgtatccatgtagaattaagggcacgtgtcaacaggccttgcttatgtagatttaagtttacttaaattgctgggttgaatgcccagaaatctcctttaatataaatgttctaggacaatatcaggtaggacatagcttagttaactttgaactttgtgtgtgtgtgtgtgtgtgtgtgtgtgtgtgtgtgtatgtgtgagagagagattcttgttaataacttcaccattccacctttttaaaaatggactatttaagggactttattctgatcttacttgtatttttctttccataggatggatagaatgacagaagatgctcttcgcttgaatctgttgaagcggagcttggacccagcagatgagcgagatgatgtcctggcaaagcgactcaaaatggaggggcatgaggccatggaacgtctgaaaatgttggcattgctcaaaaggaaggatttggcaaatcttgaggtgccacatgagttacccaccaaac

SEQ ID NO: 2747 - DNA, 2300 bp, Homo sapien
ctggaggacagagatgggaaggaagcttacttttcactttgtacaaccacatgcatgcttttctactcaaaatataaatttttagaaaaaatgtcctaaaaactacaaaagcatcagctcttctccaacacagatctgttaaacctgttttaattccatcagctacaaatccaaatccctcttttgcagtctggcctgaaaacactgctcttgccctttgctgaaatatattaagtatccttcgcctctgctgaaatgtattaagtatccccccatctctctctctctcttacacacacacacacgcacacacacacgccccccaaataagcatttatcagaaatgagaaaactggttctcaggaggctacctgattttccaggggacaacagagaaaaggttgctagctagctcagttagcatccacatgccacccaccaccaagcctccatctccacctcactgccagccctatgagctaacatcttgtgtttggaagttgatgctggggaagaatccaaagaggctaccatacctttatgaaacgggaaagctgtaccgggcgcgcgaatggcacctgaacctctgcactcgcatgagtggctcgctcctcaatgtaattgagagcagggaggccaaaagtactctaagtcccggtgtggttagggaagggtaagttccaccgaccctcaggaactgaactggaagacagatccagtgtgtcccacaagcccagtcgctgtagaagctaagtgcccacatagcctgagacaattctcttcccctacgggagggcgagcgaacggtggacgacgaaataaaggggtaaggttatgcgctcctgatccctttccctaaataaagataattatctggtgcttcctttacccttagattccccattcgtcccatccgcccgcaaacacaagactgagcagggagcggcccccgcaccctgagggcaccactgggggtggagagagttaaaaaaaaaaaggggggggcgcgctagagaggaaaggaggggagcatggcgggcatgaggcagggagtgaaagcggggatggcgggggaaacggggcgtgagggaggggagaaagagtacaaggagacgaaatgaagggacacgagctgggggcgcgcgaggccgaagtgaaagaccgggtcgcgcgcgccaaggggggagaggatgaggtgaagaaggagcgcgaggcgggggcgcgccgtgccggggtggggggagggggacgcaaggcgggggcgcgcgggcgggcgtcggctcgcgggcgcttcccctccccccgcccctccacctttcccttcccccacctccgccaccactgcctcctcccagcctccttcccttcctcgctcctcaccgcccccgggcgggcgggcggccaggctggcctaggccaaagctcctcacctggcggtggcggtgtaactcccggctagctcgcctcctcaggcggcggcggaggcgtcgaaaaaggaagaggcgacggcacaggggatccagaccctgctgacgggactagggacgggggtaggggaggggggcgggccggaccggggcgggcgggcggagcagacactgcggtacagacgggggcagcggcggcggcgacggctgcaccggcggcggcggcaccacacaaacaaggacgctgattgggcagctgccaagcgcctcggctccgccttacccacacgccacgacgcccattgggcgacctaagccggccaccccgccctcatcttctcggccatgccagtagaagactagatgccgggacttcaccccacccttgaagaatgagtggccggagaagtgatgattggcgtgcttaaaacccaatcataaacggaggaggggggatggtctagcgggggcgcgttaatgggtacctctgccagtcccagacacatccgggtcttcgacagcccattaagtgtcgggggtcaaaaaatcgcttcaggctgcaactttaccttagagacgttttggtccccaggcagccgccgtaccccagtctctccaaaccgggattcccctttggccatctctcattctttcaattctaaagatggagactggcgaacggcgatggggtctgcggtgggcggtgtttcgtcgcgacagactctaggaaatttcacgatagaactagctttaggcgcttgagccttgccgtctttttggggtgtggcctgtctccgtctgccaaaggctttgagcttcctggtgttcatcgtacctccgcttggtcctgtcgtgactaaaccacgacagcag

SEQ ID NO: 2748 - DNA, 2300 bp, Homo sapien
tgtgttagccaggatggtctcgatctcctgacctcgtgatctacctgcctcggcctcccgaagtgctgggattacaggcctgagccaccgcgcccggccgggaggatctcttgagcccaggagtttcagagcagcctgggtaacatagcaagacctcatcgctaatttaaaaaataaataaagtgggggctgcggtgggcgcggttgttcacgcctgtaatcccaccactttgggacgccaaggcgggtggatcacttgaggccaggaatttatgagaccagcctgggaaacatagtgaaaccctgtctttaccaaaaatacaaaaatcagccgggcgtggtcacgtgcgcctgtaatgccagctacttgggaggctgaggtggaaagatggcttgagcctgggtggtggagattgcaggcagctgagatcacgccactgcactccagcctgggcgacagagggagactgtctcaaagaaaaaaaagaaaaaaaaaatgggtgcgtctgtgtttgtgtaggatctacctacggctttaagttgccatgtcctccattataatttcatttccattgcacagcatgacttttaaataatttaaaaaacatgttcaaatacctgtggaggctggcgtggtggctcacacacctgtaatcccagcactttgggaggctgaggcaggaggatcacctgaggtcaggagttcgagaccagcctggccaacatggcgaaaccccgtctctactaaaaacacaaaaattagccgcgcgcctgtaatcccagctactcgggaggctgttgaggcaggaggatcgtttgaacctgggaggcggaggttgcaggaactgagattgtaccactgcactccagcctgggagacacagtgagaaaacaacaataacaaaatgcctgtggaaccagttgtttctgggtttaaaccactgcttagtcactaactagcggtctgacctttggcaagttacttaacctctctgagccttagtttcctcatctacttgggttcaaatttcagctctaccacttaacgtgtaactggacaaattttttgatcctaattttcctcatttgtaaagtagggataacagtacctacctcacagtcatgaggaataaatacttcatgtaaagttcttagcacagagcctgacacagtctctttccaaaaacgttaactactatcataaccttaacacccggactctgttacttggtccctatcctcaaggtgctccagaaacgctcgctgagtttaggcgggcctaactgctccgtggaagcagggaggccagcaaaaggagctggcccttgagttaattaggtggaatcgggcggggtgggaggctgtttcctcgctgagaacctaaccagaccaggagttcccaagagaaggagctgcgagggctctgcacaccgtaattcctcagcaacttggctagctgcttttttttttttcctgctgtcgtggtttagtcacgacaggaccaagcggaggtacgatgaacaccaggaagctcaaagcctttggcagacggagacaggccacaccccaaaaagacggcaaggctcaagcgcctaaagctagttctatcgtgaaatttcctagagtctgtcgcgacgaaacaccgcccaccgcagaccccatcgccgttcgccagtctccatctttagaattgaaagaatgagagatggccaaaggggaatcccggtttggagagactggggtacggcggctgcctggggaccaaaacgtctctaaggtaaagttgcagcctgaagcgattttttgacccccgacacttaatgggctgtcgaagacccggatgtgtctgggactggcagaggtacccattaacgcgcccccgctagaccatcccccctcctccgtttatgattgggttttaagcacgccaatcatcacttctccggccactcattcttcaagggtggggtgaagtcccggcatctagtcttctactggcatggccgagaagatgagggcggggtggccggcttaggtcgcccaatgggcgtcgtggcgtgtgggtaaggcggagccgaggcgcttggcagctgcccaatcagcgtccttgtttgtgtggtgccgccgccgccggtgcagccgtcgccgccgccgctgcccccgtctgtaccgcagtgtctgctccgcccgcccgccccggtccggcccgcccccctcccctacccccgtccctagtcccgtcagcagggtctggatcccctgtgccgtcgcctcttcctttttcgacgcctccgccgccg

SEQ ID NO: 2749 - DNA, 2300 bp, Homo sapien
cgaaaaaaaagaaaaaagaatatgggcagaggcatatccatatctcccgaattcaggcccttagccatgatactaaactgcctcctgttttttagatgaggagactaatgaccaaataaatgaaatgatttcttcagagccatatattttatatttctaagcagcaaggtctgggtacaaattttctccactgcctctgggttcttctaggccccttgggaggcagctgctgcctactgtctcttctgggctcttgttcctggctgagccattggccggacagtcctagacaggatgtctgcaggggaagggcggtccctggggctccaagacagggagtgggtatgaggcagggttagggtgtcgaggtaggccatcctgatgggcactgtgcttggtaggctgtgttggaaagcaagtggccgtctggcacaccaggtgggcgtctgcgctgggccaagctccggaatgttgtcctgggggctgctcagttccgccagcccttgagagaacggcaacagcagcagcagcagcaacagcagcagcagcagcagcagcagcaggagcaggtgtcagcacatcaagaggcaggcagctcccaggcaggtgggtagggcctggtgagacaggcttggggatggagtagctgggctcaggcagggaaaggcatagagagttggggctggtctaatggttggcattgggtttctggggattgataaattacacttgactggtaacaaaagggataaaaaaattagctgggcgtggtggcgcgcacctgtagtcccagctacttgggagactgaggcaggagaatcacttgaacccaggaggcagaggttgcagtgagctgagatggcgccactgcactccacctagctacagagcaagactccatctcaaaaaacaaaacaaaacaaacaaacaaacaaacacaaaacggataaagttttgcctgggaggaaccctgcaaaccctggtccatctaaggagctctattttggaacaggggactgggttcctagctggccgcctctaaaccccttctcgtcttttacagagccctatttggagcgcccttcccctactcgccctcttcagcgccagactacttgggctgggcgaagtctgagagacccagcctcaccccctggacgcctggtgaagagtggtagcctgggcagtgcccgaggggcacagcccactgtggaggccggtgtggcccacagtgagtgcccttgtctggctccctcactcccccagtcagctttcctaaccacttgctagtgaggtggggaagaccagaaacagagtggagggcggccctctgtggtgggtgctgtagattctgagggaatctcgcccagaatatcatcatggtgggggtggtggcaccagagtttgtgcagccaggaattgtgtttattcaggaaaggggaagttggtgcagaggctggggtccatcttccctcattcttttctgtgctgcagtgatagaggccttgggggtcctggaaccccggggatcacctgtgccctggcacgatggaagtctctcagacctgagcctgacaggggaggagccgctccctggaggcagcccagggggctcaggctcagccctgagtgcccagtccactgaggccctggaagggctaagtgggcggggacccaaggctggtgggcgacaggatgaggcaggcaccccccgacgagggctgggtgcccgcctccaacagctgctcactccttcccgccactcccctgcctcccgcattcccccacctgagctgcctcctgacctgccacccccagcccgccgcagccccatggacagtcttctgcacccccgggagcgccctggatccactgcctccgaggtagccagtgaaggagggtccagatgccttagcattagtgggcttggggaggggctacgactggaagaatgctcaaaaagggggctctgaggggtgcttgaaacacatatcctgggtggaagagcatggggttggctgaccatggtttctcatgtcatggtagagctcagcctctctgggcagtgagtgggacctctcagaatcttctctcagcaacctgagtcttcgccgttcctcagagcgcctcagtgacacccctggatccttccagtcaccttccctggaagtgaggataacccctcccacacagatgtgcttgaacacacatagcacacactcaccctgtccaaggcaggagatggggaggaggtgggaggggctggggaaggggcatgggctccagagtgctggcggcca

SEQ ID NO: 2750 - DNA, 2300 bp, Homo sapien
ttctgtcgctctgcttgctgccacctccctctgtcattgcctctgttcctggggtggatgaaggttgctgggcaaaggggatatgttagcagggctaggcaggacaccagttctaaatcctacttcctaaagatttgtctgtatgtctatagctggagcagttcagcatggagagcccatcagccagcctggtgctggatccccctggcttttctgaagggcctggatttttagggggtgaggggccaatgggtggcccccaggatccccacaccttcaaccaccagaacttgacccactgttcccgccatggctcagggcctaacatcatcctcacaggtgaatgggggtgggtggtgatgggaaatggaaggaggaagtgacacattcactaatgagtaggagattgaggggtcttggaaaagtttacaggacatggggtcctcacctgtctcttctacccacaggggactcctctccaggtttctctaaggagattgcagcagccctggccggagtgcctggctttgaggtgtcagcagctggattggagctagggcttgggctagaagatgagctgcgcatggagccactgggcctggaagggctaaacatgctgagtgacccctgtgccctgctgcctgatcctgctgtggaggagtcattccgcagtgaccggctccaatgagggcacctcatcaccatccctcttcttggccccatcccccaccaccattcctttcctcccttccccctggcaggtagagactctactctctgtccccagatcctctttctagcatgaatgaaggatgccaagaatgagaaaaagcaaggggtttgtccaggtggcccctgaattctgcgcaagggatgggcctgggggaactcaagggagggcctaaagcacttgtaactttgaaccgtctgtctggaggtcagagcctgttggaaagcaggggtagaggggagccctggaagcagggcttttccggatgcctaggggtgggcagtgccagcccctcctcaccactcttccccttgcagtggaggagagagccagagtggatactattttttattaaatatattattatatgttaataaaaaaatcatatcaaacccttggtgtggttagttatttggggcatggctggggatctagggagttatagggccatgggtctttttatctattaggctttttgcatcttcttagcaccactgtgctttgtggaagggccccacagcctcggaatttgtacccagctggatgtaggcttccacggcagcaggaaatcacttcatgtgccctcctgtctgtccagggccctgctgcagcatcagatgggggctttgactgatcagacaagttattcctcttcctcaaccctaggtctggcagtgagtcgggtaaggaggtgattgctggctgagcccacaggtctgaagtgctcctaggtctcagggaagcaagccttcatcctcactccctcactatgcatgcattcacttcaccctctccactcttcaccactcattcattttagttttaattaaacagatccttcagtgccatgcatgttctgaaggttttctctttctggattgggttgccagcccttggaccagccgtgtgggcctctgcacccctcactcccccaacccgcatagtgagaaaagtagagccccgcagttaccttacccccacctccactgctctattccacaccctgcagtcctggcctctcttcctctttccaaagctcttgtcattttcaaaaaagagaactgagagcttctggttctggtccaaagggaatgccctgtgccctaaacctggaagtagggggagccacctgggtccccgtagactagaccttcgggacttcacctgcgcccacatcatgcttgccacatctgactgcaggacccaggcgggaagggagcgcgccgcggccctctgggtcgcctggggtcagtgtcctgaggcacgggctggatggtgggaagctacctgggtgcagggggccctcccagccgccaggggtcgggctgcaggcggctgggctttgggcagacgcttgccagggtcacggccgccggccgaggaggaggggtgggggtagcggcggcgcccgcggcccggagcgggggttgggggagtagagaaagcggggcgcgcggaggaacgctgggtccccggcgccgcgggagctgggaggaccgagccggccgagcgagcagcgcggcagcacagtccccgcgtggcgcagcgcggcggggacgcggggaccgcc

SEQ ID NO: 2751 - DNA, 2300 bp, Homo sapien
ccaccttgtcttccatcactcaggtatgcgtggctgccttccctgcatgtctgtctcccttcccttttctcctgccatgttgtttccctcccaccctcctttcctgaaatacctactctatactcatccccttccattcctctgtcctccgcctgccccatcttttatccatcttgtctcctcttgcttcacagtgcaaacccaaacgctgtggttaagcttttttagcttcaaaccctggctccacctcttactagcagtcaccttggacaagttatttaatttctataagcctcagtattttcatttctaaaacaaggatggttcataaggatcaaatgaagtaacatacataaaatacttagcaccacacatagcccaggtatgcttgacaaatagtagcttaccctttccttttatttgcctcctctgttcctgtctgttttatatctgtcttttatctcatgcctctatcttgtcccgtctcctcccctgtatcccctcctaatttcatagaattcgtagaatcagtcaatttcctactgtggagcccaattccttcacttaatagatgaggaaagtgggacctagagggaaagtgacttttccaagtttacccagcaagttaggaagagttgagactagaactcgaagctcttagtttagggctttttccacagagatgaaattcttagcccttgtctcccttcctgtccttttcttcttgttctctatctctactcctcttttctttcatccaaatgctcttttccctctcctctgcccaacttttcctcctccattgctatccctggaatgtgtgttctgtgttccatctttactcaggtcccctcttttgtaggaaagactgaggccagattagcaagggctctgttcccagagtgtggagtgagcttgacttcccttcctttctttctccttttctttctttcttttcccaccccctctggcctcttcaaggctgtagaacagcagttctcaaccttagttccttatttactaacaataaatagttcaagtatcaagatttaagaatggtttacttctaaggctaggcacagtggcttatgcctgtaatcccagcactttgggaggccaaggcgggagttcaaaactagcctggtcaatatggtgagacccagtctctacaacaaataaaaaattacccaggtgcagtcgcgcacgcttgtagtcctggctactggggaggctgagatgggaggatcacttgaaccaggaaggttgatgctacagttccaactatgattgcaccactgtactccagcctgggcaacagagtgaggccctgtctcaaaaaaagagaatagtttacttctggagtagatttaaaattacccctgtgttagcctcactatatcactttcattctgataggcacttttttttttttggagacggagtctcgctctgttgcccaggctgaagtgcagtggtgtgatcttggctcactgcaacctcccacttcctgggttcaagcaattctcctgtctcagccacccgaatagctgggactacagacgcctgctaccatgcccagctaatttttatatttttagtagagacggggtttcaccatgttggccaggctggtctcgaactcctgacctcaggtgatccacctgccttgggcctcccaaagtgctgggattacaggcatgagccaccacaccctgccaactaatacacatccctggggttgagtaactgcactcaaccccagggatgcccgtgagaatgtggaatgttgtcatgtttgttttgggaatggttgtagctaaagaaggtgggaagctctgactgagagttcttggggtatacactgagcagtaagcttccctctttttacttcttttcagggcgtccccctggataccagtaaactgtccactgaccagcggttacccccatacccatacagctccccaagtctggttctgcctacccagccccacaccccaaagtctctacagcagccagggctgccctctcagtcttgttcagtgcagtcctcaggtgggcagcccccaggcaggcagtctcattatgggacaccgtacccacctgggcccagtgggcatgggcaacagtcttaccaccggccaatgagtgacttcaacctggggaatgtgagtactcaggctccttgctcaaaagcaggggagtgggtgagggtgggtcaatggggcctgaatggcatggctggtgcactgtgaatggggagatctaggtggggtgggtggtggggagatctcctctcc

SEQ ID NO: 2752 - DNA, 2300 bp, Homo sapien
gtgcataacccactgtaaccattgtgaggattattatctaactgtagactgctcccctttaggagctttttcatcatgttggggacagagacaggaagatgggaggctgatcttgatagcgtgaggccctgccctcaggactgtgattctagcagaggcatggtgggatcttagggctcgtatgtgcaaagaaaggctgtgcgaaactcaaaagctggggcttctctttacggtgcctcgatctcttaaaaggccccttctacccaccttgctcctattggttaatttctcagctacacagaaaagtctagtgggcatacatggccaggggacccaaaagtctagagctagggacaagagatctgggactcagcctgttatctggccaggtgggagggctcatttgagacagagatggccatgggaggctataccactgagatactggggttgccatatatgagacctcaagtggtcttcaagtggtccagaggtcagcacagtgctcactaggctgacctcctggaacagaatgtcagttctgatgttggcttctgtacaagagtgtgaccctggaagctcttagaacttgcccctcctcagctgccctcctccccatggccttgccctgggcctgtttatttggctggtcgcaggggctgagccttggaaatagatgctcacctctcacagagacaggatgtctgtacacaggctaaacccatgccaggctgtcttacgcctatgccagacatagctccccaaagtgaggatgagaccaggaagatggccctggcccatgctggagtgggctgctgctctctgtccaccctccttctccaggcttccctgccaattcaagagccttaggattcagtggaagaatgtcccttggttttggtgctgtttttccagctaggagagctgctattccttggatgttctagtttgggaggtgcaggctttgtgtagccttcctgaggctgggcaagtggcagagcccagaagcctgtgctctccagagtgggaaggaaagaggctggcagtaatggctctgtgacatccacctgtggccttcctcttaatctctcaattagtcctggacgcatctggaaagaaagcagaggttcctaataggcactcccccttgtgagtagcccgggagctcctggcagcccctcagggactctgcttagagtgatgccaaatgagacaggccctcagcagagtatctgtctctgcctggcaggatgatgtcaagcagtagtgatatcattgatgagggcagtctgcagatgggctctggtgggttatttgcaccaaatctcggtggacctttcaaaccccaacactggccttttttttctggcagataatttctttattttttttttaacttttttttttttggagacaggatctcagtctgtcacccaggcggctagagtggagtgacataaacatgtctcactgcagcctctacttcctgggctgaagtgatcctttttttttttttttttttttgagacagagtctctctctgttgcccaggctgcagtgcagtggcacagtctcggcttactgcaacctccacctcccaggttcacgccattctcctgcctcagcctcccgagtaactgggactacaggcgcccgccaccacgcccggctaattttttgtatttttagtagagacagggtttcacggtgttagccaggatggtgtcgatctcctgaccttgtgatccgcctgcctcggcctcccaaagtgctgggattacaggtgtgagctactgtgcctggcctagatattttaaaagcagtggcggcagcagcatatcctggtgacagagatggcaaggatggctgaaggaaatagtgctcaggaccctcctgacattcccacttgttccccatgtctcagttacaggcccaaaaactgcgactggcatacacaaggagctctcattatggtgggtctctgcccaatgttaaccagattggctctggcctggccgagttccaggtgagtagaccccagccagggaggagtggagtttcttaggctgcttcctctgctgacttctgtcctttttggcagagccccctccactcacctttggattcatctcggagcactcggcaccatgggctggtggaacgggtgcagcgagatcctcgaagaatggtgtccccacttcgccgatacacccgccacatatccttcacaggggacttgggagtgtctgaaaggtagtgggatggggttcctcagggactcataggaagcacttgaagtg

SEQ ID NO: 2753 - DNA, 2300 bp, Homo sapien
ggccatgggcttcttcctggtcctggtgatggagcagatcacactggcttacaaggagcagtcagggccgtcacctctggaggaaacaagggctctgctgggaacagtgaatggtgggccgcagcattggcatgatgggccaggggtcccacaggcgagtggagccccagcaaccccctcagccttgcgtgcctgtgtactggtgttctccctggccctccactccgtgttcgaggggctggcggtagggctgcagcgagaccgggctcgggccatggagctgtgcctggctttgctgctccacaagggcatcctggctgtcagcctgtccctgcggctgttgcagagccaccttagggcacaggtggtggctggctgtgggatcctcttctcatgcatgacacctctaggcatcgggctgggtgcagctctggcagagtcggcaggacctctgcaccagctggcccagtctgtgctagagggcatggcagctggcacctttctctatatcacctttctggaaatcctgccccaggagctggccagttctgagcaaaggatcctcaaggtcattctgctcctagcaggctttgccctgctcactggcctgctcttcatccaaatctagggggcttcaagagaggggcaggggagattgatgatcaggtgcccctgttctcccttccctcccccagttgtggggaataggaaggaaaggggaagggaaatactgaggaccaaaaagttctctgggagctaaagatagagcctttggggctatctgactaatgagagggaagtgggcagacaagaggctggccccagtcccaaggaacaagagatggtcaagtcgctagagacatatcaggggacattaggattggggaagacacttgactgctagaatcagaggttggacactatacataaggacaggctcacatgggaggctggaggtgggtacccagctgctgtggaacgggtatggacaggtcataaacctagagtcagtgtcctgttggtcctagcccatttcagcaccctgccacttggagtggacccctcctactcttcttagcgcctaccctcatacctatctccctcctcccatctcctaggggactggcgccaaatggtctctccctgccaattttggtatcttctctggcctctccagtcctgcttactcctctatttttaaagtgccaaacaaatccccttcctctttctcaaagcacagtaatgtggcactgagccctacccagcacctcagtgaagggggcctgcttgctctttattttggtcccggatcctggggtggggcagaaatattttctgggctggggtaggaggaaggttgttgcagccatctactgctgctgtaccctaggaatatggggacatggacatggtgtcccatgcccagatgataaacactgagctgccaaaacatttttttaaatacacccgaggagcccaagggggaagggcaatgcctacccccagcgttatttttggggagggagggctgtgcatagggacatattctttagaatctattttattaactgacctgttttgggacctgttacccaaataaaagatgtttctagacatctgtacagtatctgattcgtttgttttgggaaaggggtgggcatgtggccagcctgagagggcctgagtcccagatgtttacagctgttttaagattcttggtctcactgttttcactcaggacccgatagtccccttccctgaagatgacctaatttttcctcctttgtgtcttggtacttctttcccggtctccacccctcggcttcccttctcttccctcccctccctcttcctttcttctctcttcaatccctctctcctttccgttcgtagtctcagggctaatttagaactactcttcccagcttgcacctctcagggagtagccgagagggtggagccaagtccccagtttccggagtcagcagggctgctgggaagtggagtccgtttcctcctagtgctgcgtgactggggatgtgaaggagtctcgtaaacaaactacaattcccggcggcccccgcgcgcaacaggtcagggctaggctggggccgggttcgcggtgctcgctgaggcggcggtggctacggctggaggagccgggccgaggccgcggcggaggccgcggctggtactgggagggtggcagggagggacggggaaggaagatggcgacgtcgggggcgaacgggcctggttcggccacggcctcggcttccaatccgcgcaaatttagtgag

SEQ ID NO: 2754 - DNA, 2300 bp, Homo sapien
cctgcctcggcctcccgagtagctgggattacaggcccccgccaccacgcccggctaatttttgtatatttagtagagacggggtttcaccatgttgaccaggctggtcttgaacttctgtcctcaggtgattcatcctcggccttccaaagtgcttggattacaggcgtgaaccaccgcgcccggccccttaagaagtcttcacattcctcttttacttaaggaattactgggcttcgtttctggagccttgtgagaagcattacactgtccccccttttttttttcttttttaaaattaattttcctgtaggaagcaagatcccatctgtcccttctttaggcaatgaagcttttttcacctttgcataaaagaacagctgagccccctttttaaattttcttttgtcttaccgtcccttgaggctagaagaggattctcaaggcacagagttgtgggccacaagaatccaggttgaggaaacggtgaaagtcctgagctgaaacaactaccttggggcattcaaggaacagcaaacagcaaaccgaccggcgagggtggcgggagctgggctggaaatcaggtgggagaaccggccagacgcccgcaggcgcggtacgcagatatcctggaatgcgctgggggctcttccctgggcgcggcttcagcaccccgcattccggtcccaccacgtccccacccacctggagaaggcggaggctgcactgagtgccataagtagtcgagaagggatgattttcaagacataccctctctttgctttcccccctttccaattctgccttgtctttttccttgttgtgggtgctggtgagggaaagcagtcaaggaagttggtcccaagaggggaatgctttcccttgggcgccaagaggcactgacgaggtgtcagagccttctgagggacagatgagactttggcccaaggccaggaagatgttttcagatgtgggccggaagacttgacaatgcggggtctccctcttttaaaaatatccatataatcaaagcctttgttgactggcccgctccggcccctcagtcctccacagatgcgccccagggccccagccccgaggtccttttcctaatatccgctcttgctctcgctcactctcctcaggtcgcctgctccgcccgctcccgctcccgatctctgattgctcctaactgacgtcactcccggtctgtccccgcccactcggtgctgccattggcagtcggtcgtgggtacgcggctcctgtgggggaggggggagctatgggagggggcgggaattcccgactctaggccggaagcgcgcggagaccatgtagtgagaccctcgcgaggtgagtgcgggctgtctggcagcggggtccatgtcggctgcccaggcctccccgggcccgggaacaggagtcccagctcacgcattcttcatctgcttcccgcgacgcttggcggcctcgcaccccgcctcctggagcccggactttcaggcaccgccctcagtgtcgcctcagtccgtcccgggaccgcagactcttagggcccctctctttggccatctgcctctaggtcccatcctggggcctgaagcgcttgttctctgcgctgggaaaaggggaacgatggagcgatccagcacccaaacttaccctgtccaggtggcccacgaagctacccaagacatctctgcacagccctagcctttttggcttcacccactccgttcgggagttggggacccggcctctacattccttaggggaactccagctccaggtcctatttggaggcggctcctagtttcctagttttctgggggcaccaggtgaaagggtgatgagatatccatacagcctttctcatgcctcggtttcccccgtgcagtctccctgaataagtcacttgggaaagaaagtgtgagaagagaggaatgttcctggtacaggagtagatgagtcaccctgggtaggggaaggtcacaaagtggctggggccagggagctgcactctgctgaccaagcttccccattccttgccccatcttcctttgcatgatttttcccaaccactctggtctgtcttcctaggtctgagagtcactggagctaccagaagcatcatggggccctggggagagccagagctcctggtgtggcgccccgaggcggtagcttcagagcctccagtgcctgtggggctggaggtgaagttgggggccctggtgctgctgctggtgctcaccctcctctgcagcctggtgcccatctgtgtgctgcgccggccagg

SEQ ID NO: 2755 - DNA, 2300 bp, Homo sapien
cagaagttgtagtgagccaagagcatgccactgcattccagcctgggcaacacagcaagactctgtcaagaaagaaaggaggaaagaagaaaggaaggaaggaaggaaaaagaaaagaaataaagttgccaagagattttaaatgttctcatcacaaataaatatgtgaagtaatgcatatgttaattagcttgatttacccattctgcaatgtacatatatttcttttcttttttctttttttttgagacggagtctcgctgtgtcgtccaggctggagtgcagaggtgtgatcttggctcactgcaacctccgcctccccggttcaagcgattctcctgcctcagcctcctgagtagctgggatcataggcatgcgccaccacgcctggctaatttttgtatttttagtagagacagggtttcaccatgttgagcaggctggtctccaactcctgacctcgtcatctgcccgcctcggcttcccaaagtgctgggattacaggcgtgagccaccgcgcccggcccaatgtacatatatttcaaaacatcatgttgtacaccataaatatatacaattattaatcatatatgacatatgtatgtgtataaataaacaaatatatatatttgacaactataaaggtagaacttggaccagaatccaggtttcctgacccccccagtcataattccttgttaatgttaccaattacgaataatttttttttttgagacgaagtttcgctgttgttgcccaggctggagcgcaatggcgcgatctcggctcactgcaatttccggctcccgggttcaagcgattctcctgcctcggcctcccgagtagctgggattacaggcccccgccaccacgcccggctaatttttgtatatttagtagagacggggtttcaccatgttgaccaggctggtcttgaacttctgtcctcaggtgattcatcctcggccttccaaagtgcttggattacaggcgtgaaccaccgcgcccggccccttaagaagtcttcacattcctcttttacttaaggaattactgggcttcgtttctggagccttgtgagaagcattacactgtccccccttttttttttcttttttaaaattaattttcctgtaggaagcaagatcccatctgtcccttctttaggcaatgaagcttttttcacctttgcataaaagaacagctgagccccctttttaaattttcttttgtcttaccgtcccttgaggctagaagaggattctcaaggcacagagttgtgggccacaagaatccaggttgaggaaacggtgaaagtcctgagctgaaacaactaccttggggcattcaaggaacagcaaacagcaaaccgaccggcgagggtggcgggagctgggctggaaatcaggtgggagaaccggccagacgcccgcaggcgcggtacgcagatatcctggaatgcgctgggggctcttccctgggcgcggcttcagcaccccgcattccggtcccaccacgtccccacccacctggagaaggcggaggctgcactgagtgccataagtagtcgagaagggatgattttcaagacataccctctctttgctttcccccctttccaattctgccttgtctttttccttgttgtgggtgctggtgagggaaagcagtcaaggaagttggtcccaagaggggaatgctttcccttgggcgccaagaggcactgacgaggtgtcagagccttctgagggacagatgagactttggcccaaggccaggaagatgttttcagatgtgggccggaagacttgacaatgcggggtctccctcttttaaaaatatccatataatcaaagcctttgttgactggcccgctccggcccctcagtcctccacagatgcgccccagggccccagccccgaggtccttttcctaatatccgctcttgctctcgctcactctcctcaggtcgcctgctccgcccgctcccgctcccgatctctgattgctcctaactgacgtcactcccggtctgtccccgcccactcggtgctgccattggcagtcggtcgtgggtacgcggctcctgtgggggaggggggagctatgggagggggcgggaattcccgactctaggccggaagcgcgcggagaccatgtagtgagaccctcgcgaggtgagtgcgggctgtctggcagcggggtccatgtcggctgcccaggcctccccgggcccgggaacaggagtcccagctcacgcattcttcatctgcttcccgcgacgcttggcggcctcgca

SEQ ID NO: 2756 - DNA, 2300 bp, Homo sapien
ctggtcttgaactcctgacctcaggtgatccacccgcttcagcctcccaaagtgctgggactgcaggtgtgagccaccacacccggcccaatagatctcctcaattttaccttaccttgatgtatgattttaggcaagtcagttttcctcaccagagtttgataaatcaggggcaaggaggaagttaaacaagcagatgactgcagagggtccttccagttctaacatcaacggaagctaactacattccccactcaaatcatctctgcacatacagcccgcaggaagccctttgaaatgtatttaaccacctttctcgctctcagaatgatctcaacaagaacagctttgctttccttggagctctgcatcaatctaggaaggctgctttgtctcttcactacttgagcaggatggagagatatgagcgggaaagacagataagaaatctgagaaagccccacaaggtgggttgatagtgtgaagaacatgggctgaagcatccaaatcttggttcagctacttacagggtaaccttgagaaagttacttaaacttgtcagctcggacgggcgtggtggctcacgcctgtaatcccagcacattgggaggccgaggtggacggatcacgaggtcagatcgagaccaccctggctaacacggtgaaaccctgtctctactaaaaatacaaaaaaattagctgggcgcctgtagtcccagctactagggaggctgaggcaggagaatggcgtgaacccgggaggcggagcttgcagtgagccgagatcgagcctctgcactccagcctgggccacagagcaaaagaaaaacaaacaaacaaacttgtcagctccatctgctgtaagaattatatgagtaacatggaaatgcctgactagaccctgttcccgtttttacccttagcccgttcaaatcttcataaggataattagtagcagtttgagttctgggattcacactccaaactactgttttactcacccagctacccttttctgaaatactactgaaaaccatacctgtatcagtttacctccattgttttacttgaagtgaattcctggaccatcagacattagaccaaggcaaaaaaataaaaataatcaatcaaccctgagttttggtattactactttctagtcatggatctgcctcctcataggtaaaatttgcaaaatattacccgccgtgtgtgcctcagaactgttatggattaaggaagagaacaatttttatgaaaacgttttgtaaattatacaagtgtgggacataatgttcccggtaactgtatgcaaacaataagacaacaaacgcaaaaggctttttaacttgttgcagttttcctgccccgtgtccctccgtgaatgagcagcgtgcagcgagcgtgtgcgcacagctgctgttctccattaacgccacactgctcggcttgcggacggggaaacccgccatcgcgctcctgccgcctgccgagcgaggatcaccgctccactggggtcagcgggctgttgactccccgcctgggtgaaaccggagcttccgagtcacgtggcgcgcgaagacaaacctggctgctcagggtttcccggagctttctcccagcttcccggcgattcatattctggcgcttacccctccctttaggctggcggaacccaatccccgcctgacaaataagtcccgccggccggacgcagtggctcgcgcctgtggtcctagctgctcgcggtgctgaggcgggagaatcacctgagcccgggaggtcgggggctgcatggaaccgtgatcgcaccaccgcactccagcctgggcaacagagcgagaccctgtctccaaaaataagaataaagaaaaaaaaaagaaagaactgcggccccattggcctgactctcctgaacagccaaactgtctccgaccagttacggaagaggcggccttgagagggtagtgtgccattggctcgatgtcctgcccctccgaaacctaagtcttcagcttccaatcaggactcagctttgggaagagcgccacgcggtgggcgaggggatgccctagtaaattcgcaggtctcttgactctttccgcctttgtttacaaccctgccatgatctccctcttgcaaaagcgagggctacagaacaggcattcaggagtcctgtgctccagtcacagccttttctgttcttcagctaggagacaccaaaccctcaggaagatttactatagctaagagaaaactgcagcagaaagggcgcggctacctacttcttaaattccgtt

SEQ ID NO: 2757 - DNA, 2300 bp, Homo sapien
tatttaaccacctttctcgctctcagaatgatctcaacaagaacagctttgctttccttggagctctgcatcaatctaggaaggctgctttgtctcttcactacttgagcaggatggagagatatgagcgggaaagacagataagaaatctgagaaagccccacaaggtgggttgatagtgtgaagaacatgggctgaagcatccaaatcttggttcagctacttacagggtaaccttgagaaagttacttaaacttgtcagctcggacgggcgtggtggctcacgcctgtaatcccagcacattgggaggccgaggtggacggatcacgaggtcagatcgagaccaccctggctaacacggtgaaaccctgtctctactaaaaatacaaaaaaattagctgggcgcctgtagtcccagctactagggaggctgaggcaggagaatggcgtgaacccgggaggcggagcttgcagtgagccgagatcgagcctctgcactccagcctgggccacagagcaaaagaaaaacaaacaaacaaacttgtcagctccatctgctgtaagaattatatgagtaacatggaaatgcctgactagaccctgttcccgtttttacccttagcccgttcaaatcttcataaggataattagtagcagtttgagttctgggattcacactccaaactactgttttactcacccagctacccttttctgaaatactactgaaaaccatacctgtatcagtttacctccattgttttacttgaagtgaattcctggaccatcagacattagaccaaggcaaaaaaataaaaataatcaatcaaccctgagttttggtattactactttctagtcatggatctgcctcctcataggtaaaatttgcaaaatattacccgccgtgtgtgcctcagaactgttatggattaaggaagagaacaatttttatgaaaacgttttgtaaattatacaagtgtgggacataatgttcccggtaactgtatgcaaacaataagacaacaaacgcaaaaggctttttaacttgttgcagttttcctgccccgtgtccctccgtgaatgagcagcgtgcagcgagcgtgtgcgcacagctgctgttctccattaacgccacactgctcggcttgcggacggggaaacccgccatcgcgctcctgccgcctgccgagcgaggatcaccgctccactggggtcagcgggctgttgactccccgcctgggtgaaaccggagcttccgagtcacgtggcgcgcgaagacaaacctggctgctcagggtttcccggagctttctcccagcttcccggcgattcatattctggcgcttacccctccctttaggctggcggaacccaatccccgcctgacaaataagtcccgccggccggacgcagtggctcgcgcctgtggtcctagctgctcgcggtgctgaggcgggagaatcacctgagcccgggaggtcgggggctgcatggaaccgtgatcgcaccaccgcactccagcctgggcaacagagcgagaccctgtctccaaaaataagaataaagaaaaaaaaaagaaagaactgcggccccattggcctgactctcctgaacagccaaactgtctccgaccagttacggaagaggcggccttgagagggtagtgtgccattggctcgatgtcctgcccctccgaaacctaagtcttcagcttccaatcaggactcagctttgggaagagcgccacgcggtgggcgaggggatgccctagtaaattcgcaggtctcttgactctttccgcctttgtttacaaccctgccatgatctccctcttgcaaaagcgagggctacagaacaggcattcaggagtcctgtgctccagtcacagccttttctgttcttcagctaggagacaccaaaccctcaggaagatttactatagctaagagaaaactgcagcagaaagggcgcggctacctacttcttaaattccgtttgtggaccctcagactcttagtcccctactcccagatacagcggccctaccgtggctcctggcaaggtggcatccacttttgtagtgtaaggctgggggcggggtttggctggcaggtccaggatacgagatcctggaagaaagaaaaggtgtagtgtttggggaggtcaacgggctatgctggcttgacagggctgggctcttcagaacaggtaatgcttggggggggcctctttgtctaaacctgagggatagggctgaaggtgaaatatcgaggggacaggtgagggggcttgctag

SEQ ID NO: 2758 - DNA, 2300 bp, Homo sapien
catggcaaaaccccaaaaccccatctctacaaaaattagccagacgtggtggcacacacctgtagtcccagctactcaggaggctgaggcaggaggattgcttgagcccaagatgttgaggatgcagtgagccgtgattgcaccactgcactccagcctggatgacagagtaagaccctggctcaaaaaataaaaaatagttcaactgttcatgtctccttggtcttcaggcccaatgccacaaaaaccggggcaaaggcagttcatcatcagtttccattccctcatccctttgctctgtctgtgtgattatatatgtatcaaggagtagtggttctggctgacaccaagactcaccagggttgtacagggcactggggctacggtgcctgctctgggcaggatgtgggcatgagcatcaaagggcagctcactgaccatgcaggaatcaggcaccataaatgctgggctccactgatctggagtagaaaacaggtagctgggagaaaggagacttaggaacaccctgacagccgcagggcctgggtagtggcacaggttgggtaaacccccttaaccccatggttagggccagtcccgaagggccatttcccccttcccacaaagaacactgacctagctggatggagataaggcctacatttggcccagtttccccctgcatcctctccagggcccctgcctcatagacaacctcatagagcataggagaactggttgccctgggggcagggggactgtctggatggcaggggtcctcagagatgccactgtcactgccaggagatgcttctgagcagtacacctcattgggatcaatgaaaagcttcaagaaatcttcaggctcactctcttgaaggccctacagtaggaaaaggttatatatatgtgcagggaagaattttggaagtcctccctgacttatgcttcattttcagtcctttcacttcttgggcatggagacagttattatacaacttacgtctattttgggggtggtctgttttcagacctgtctccaagtgggagctgaagcctcttatcacagagttgtgtctcaaccccacccccactcccactcgtcacactcacacagccacggtccccaccggacttccagccttgcagtccctgttcctgtagcctagttaccggaacctctggaggggggcagtggagtcccagctccaggacggatcctgtcgagaagatatcctctgggggctccagccacgcgtccagcaggtcagggattccgagatccatgcttctgcaggaaggcgtgtgggacggagggttgcagaaacggaatgatggctgcttactaccccctacagtttctgggctcctctgctcccttttccattatccccgcccccccactccttcctcactagcaagccccctcacctgtcccctcgatatttcaccttcagccctatccctcaggtttagacaaagaggccccccccaagcattacctgttctgaagagcccagccctgtcaagccagcatagcccgttgacctccccaaacactacaccttttctttcttccaggatctcgtatcctggacctgccagccaaaccccgcccccagccttacactacaaaagtggatgccaccttgccaggagccacggtagggccgctgtatctgggagtaggggactaagagtctgagggtccacaaacggaatttaagaagtaggtagccgcgccctttctgctgcagttttctcttagctatagtaaatcttcctgagggtttggtgtctcctagctgaagaacagaaaaggctgtgactggagcacaggactcctgaatgcctgttctgtagccctcgcttttgcaagagggagatcatggcagggttgtaaacaaaggcggaaagagtcaagagacctgcgaatttactagggcatcccctcgcccaccgcgtggcgctcttcccaaagctgagtcctgattggaagctgaagacttaggtttcggaggggcaggacatcgagccaatggcacactaccctctcaaggccgcctcttccgtaactggtcggagacagtttggctgttcaggagagtcaggccaatggggccgcagttctttcttttttttttctttattcttatttttggagacagggtctcgctctgttgcccaggctggagtgcggtggtgcgatcacggttccatgcagcccccgacctcccgggctcaggtgattctcccgcctcagcaccgcgagcagctaggaccacaggcgcgagccactg

SEQ ID NO: 2759 - DNA, 2300 bp, Homo sapien
ggcagaggttactgtgagcagagttcgcaccattacactccagcctggagacagagcgaaactccatctcaaaaaaaaaaaaaaaattcaggcttgatgcacagcatccttaagtatatatatattatattatattatatattacaatgtataattatatatattatatattaaatatataggaaatatataatatatataacatgtatatgtttataaacatataacatattatatataatatataattatatattatacatatatattaaatatatattataattatatatttaatatataatatattatgtttaatatataattatatataattatattatgtttaatatataatatataatacatattttaatacataatatatatatatccccctttcaccatacataatattttttacacagcaaaatgtaataacttgataaatgtaagtatccaagcattgatgaggtaatgataaaccttatttgtggcttatgcttaagttcttttttttttcttttgagatgaattcttgctcttgttgcccaggctggagtacaatggtgtgatctcggctcaccgcaacctctacctcccgggttcaagtgattctcctgcctcagcctcacgagtacctgggattacaggcatatggcaccatgcccagctaattctgtatttttagtggagacggggtttctccatgttggtcaggctggtcttgaactcccgacctcaggtgatccgcccacctcggcctcccaaattgctgggattacaggcgtgagccactgcgcccagctgtgtttgagttctgtagtaaactgtccggtaggtttaatttgctcaagcgatgaggaaaagacttgcactttgtgcctcctgggaaagagactaacgtcttcaacataccttatggcagatatttaatttcagagtagagaccccactctgatgcctggtaaggttattggaagtgaaatatcacaagatcttacagtttgttgtgagataaggtaggatttggtgaggagtaacaaatactagcagatttcggcccaaacttcaattatagctaaacattactggaaaaaaccccacaacctactttatgtaacatataactactcacacacatacacaaaaataatacacacacaatttcagcaaacacaaataataatttaaagaaacaaattcaaaattagagccaggtatggtggcacatgcctgaaatcccagctacttgggaggatccctgaagacgagaagttccaggctgtaatgcgctatgatggctcctgtgacttgccactgcactccagtctggcaacatagccagagtccatctcgttcaaaaacaaaaacaaacaaacaaaaaacggcgaaatgaaggctcagccctcatcaggtttaggtgacagagctagaccctgtctaagaaaaaaaataaaattaaatgaaaattcgttatcagacagtaaagcatgaacccacagtgctggtcaagtcactgcagatctgagtgtgtatcaaggtttaactccataagatgaaaagcaggcaatgaatctttggcctgggtgttgacagtctaggctcaagcctcagctttcccactcattagcttgctgaccttggacaagtcacttatattctctgaacttactcatgaaacggagatacatttcatctgcctctcgcaagaaaaagtcctggtaaatacacattagcatttccgttttacacagaacactgacagatactttcctaagatcatggagttaataaccaccagaacctagactcaatacttatggaacttcaaatctcatgcttttctcattgcacttatgattactccattatgtaggagcaagggagagttgagagcatttgaagaggttatgcaaaggaccagctctgaggagtaggcttagcaaagtaacatgagggaaggtaacaccgttcatctgtgtagcggagtgggagccaagagacaaggagaaagtttcatgttcgtcatgtgtctcggatattccggtttctgcagggacgagaacgcgcagtttcgcctccatcccttgacctccaacacagcttctccactggatcatcggtggcgatgaaggggcggctggggaaggatgtcagagaaaccagaagcttgacggtgaatcctcgggttttaaggagagagcaaagtcctgagagggcgacgtattgtccctgctcacctagcccagaatgaacaaacacgcgccagccagggagcagcgagccgagaattcgga

SEQ ID NO: 2760 - DNA, 2300 bp, Homo sapien
aaattagccgggtggtggcgggcgcctgtagtcccagctactcaggaggctgaggcgggagaatggcgtgaacccaggaggcggagcttgcagtgaaccgagatcgcgccactgcaccccagcctaggtcgacagagcaagactccgtctcaaaaaaaaaaaaaaaatagggccaggcgtggtggctcacgactgtaatcccagcactttgggaggccgaggcgggcggatcagaaggtcaagagatcgagaccatctggccaacatggtgaaaccccatctctactaaaaatacaaaaattagctgggcgtggtgtcgggcacctgtaatcccagaggattacaggtactccagaggctgaggcacaagaatcgcttgaattcgggaggcggaggttgcagtgagccgagattgcgccactgcactccagcctggcgacagagcaagactctgtctcaaaaaaattaattaattaattaaaaaataaataaaaaatttttttgaaacaggatcttactctatcaccgaggctggagagcagtggcatcataatcgtggctcactacagccttggactcttgggctcaagtgttctgcccacttctgtcccccaagtagctgcggctgggactacaggccacaccaccatgtatggctaatttttttttttttttttttttttttttgtcgaagcagtctcactatgttgcccaagctggtcttgaactcctgggcttaagggatcctctcacgttggcctcccaaagtgctgggattacaagtgtgagccaccgcaacaggtcttagataatattttctttctttcgtgtttcgtatttttttccacccccagcacacatatagcaagaataatttttttctaaaggcagagataaacttgtttctcttttactctctttctttctttcttttttttttttttttgagacggagtctggctctgtcgcccaagctggagtgcagtggcgcaatctcggctcactgcaagctctgcctcccgggttcacgccattctcctgcctcagcctcccaagtggctaggactacagtcgcctgccaccacgcccggctaattttgtgtgtgtgtgtgtatttttagtagagatggggtttcaccatgttagccaggatggtctcgatctcctgacctcgtgatccgcccgcctcggcctcccaaagtgctgggattacaggcgtgagccaccgcgcccggcaaacttgtttctttatacccgtgctgttcatatttcagcttcctggttaccaaggctacacattcatggcctattgagtgagatttcaggagtactgcaccttaagtgggccatattaaaagattcacgtaaagaatgacatttttagttcaaatctctgttttcctaagctatttggtcagagaaatcacacatgggtccccataagagagatcgttccaactgaagccccaggatgtgtctaggtaggctgtgtgtgttggggtggtggggccgattctgtataactaatttacgttttcaccctgttccaccagggggcagactgactcaacaaataacctacttctgcgcatcccgcttttttcaaagtgaattgggacccatagaactaagggcttggacaactaacagtaaaattctaggactgccttttactcagccccagaaaccgatgataactcatcttctagcttcgttgaatagcatctccaaaactcagccccatttttttttttcaatttctagtgctctccctaccttcacccttattcccaaaactcttggttctcttcccctaatccctctaaaatttctcttctaaaatttctggtcgtcgtggttaaacctctacttcccttcaccccagcctctctggcctcagaatggaagagtaaggtcctaagaggggagctacaattaccgaaaggctgtggaaaatagcgagagagacaggccggcctaagctaggaagggaaaaccgagagaacagaggccgggctggcagccttggcctgctcaaaagggtgggcgggcagggggtggagcccggaggggtgccgcctctcctctttcccggagcctgggcggagagggaggaaaacttcttcctggcctgggctccgtgccgctctgtttgccaaccgtccagtcccgcctaccagtgccgggcgctccccacccctcccccggctcccccggtgtccgccatggccaaagcctacgaccacctcttcaagttgctgctgatcggggactcgggggtgggcaagacttgtctgatc

SEQ ID NO: 2761 - DNA, 2300 bp, Homo sapien
gcgtaggctggggtgcaatggtgtgatctgggctaaccgcagcttccgcctccctggttcaagcgattctcctgcctcagcctcgcgagtagctgaaattacagacacccgcactaccccctgctaattttgtatttttagtagagacgagctttctccatgttggtcaggctgctctcgaactcccgacctcaggtgatccacccacctctgcctcccaaaggcctgggattacaggcgtgagccactgcgcccaacctttgtttttacttttattttattttttgagacaaagttttgctcgtcacccaggcagaagtgcaatggctcaatctctggtcactgcaacctccgcctcttgggttcaagcgattctccagcctcagcttcccgagtagctgggattacaggcgcctgccacgacgcccagctaaattttttttttttttttttttttttagtcgagacggggtttcaccatgttggccacgctggtctcgaactcccgacgtcacgtgatccgcccgcctcagcctcccaaagtgctgggattacaggcctgagccaccgcgaccggcaaagaaaaaattattattattattattattattatttgagacggagtctcgctctgtcgcccaggctgcagtgcagcggcgcgatctccgctcactgcaagctccgcctcccgggttcacgccattctcctgtctcagcctcccgagtagctgggactacaggcgcccgccaccgcgcccggctaattttttgtatttttagtagaggcggggtttcaccgtgctagccaggatggtctcgatctcctaacctcgtgatccacccgcctcggcctcccaaagtgctgggattacaggcgtgagccacggcgcccgggcaagaaaaaattattcaagggagtctctctcgagcctattctggctgcctataaaaaattaaaggccggacgcggtgtctcacgcctgtattctcagcactttgggagaccgaggcaggtggatcacgtgaggtcgggagttcaataccagcttggccaacatggtgaaaccccgtctctactaaaaatacaaaattagccgggcatggtgccgcatgcctgtaatcccagctactcgggaggctgaggcaggagaatcgcttgaacgcgggaggcggaggttgtggtgagccgagatggcgccatcacactacagcctgggcaacaagagcaaaactgtgtctaaaaaaaaaataaaaataaaaataaaaaaaaagaaggcatctttcacttatccccatcaccttccgtgtccatgcttgtcccttctcaagctaaactattcaatctctttttgtccattctctcacctctcattatctccttgagtcttccctatttcttttcactgaccaaaccatgtctcccctgtttatttatttatttaagacagagtcttgttctgtcacccaggctggagtggatctcggctcactgtacttccgcctcccaggttcatgcgattctcctgcctcagcctccagagtagctgggattacaggcacacgccaccacgcctggctaattttcgtatttttagtagagacggggtttcactatgttggccaggctggtcttgaactgctgacctcaggtgatccacccgccttggcctccctaagtgctgggattacaggcatgagccactgcgcccggcctaaactgttaaattaaaccaatagaaaaagagttaagaatataggtatttaaaaaataggacggaagtcctggatatggctccttctccctggtgttttcctcaacctttcctatttattaggctccaactgtcaaggtatggcacaaaattttaaaagtgtccatttatccctggatagtgatcaaacgctgacctcaaattagcaaggtaaccctctcaacatggtgacgcatatgtgtcacaactaacagttaaagaccttccgaaaatggcagctcccttgtctccccactgcggcggatcaaagtaagacgttccaaacatggtggcacaagatccttgcgtcatttcctgtagtgtgctctatataaggggcaggatttccgctttcgctcctttccggcggtgacgacctacgcacacgagaacatgcctgtgagtgctttggtccaggtttcggcggagatctcgctgttctgtccgaactctcccctcacgctgatttcggatcgtagagggtcctcatttaccctctgcacttcttaggacattaactccagggaccgcagcggcccacgggccacc

SEQ ID NO: 2762 - DNA, 2300 bp, Homo sapien
ctcgccctgtctcccaggctgttgtgcaatggtgtgatgtcagctcactgcaacctccgcctcatgggttcaagtgattctcctgcctcagcctcctgtgtagctgggattacaggtgcatgccaccatgcctggctaattttttgtatctttaggtagagacggggtttcaccatgttggccaggctgttctcaaactcctgacctcatgatctggccaccttggataatgcatttctttttttttttttttttaattattatactttaagttctagggtacatgtgcacaatgtgcaggtttgttacatatgtatacatgtgccatgttggtgtgctgcacccattaacttatcatttacgttaggtatatctcctaatgctatccttcccccctcccccaaccccatgacaggctccggggtgtgatgttcccctttctgtgtccaagtgttctcattgttcaattcccacctatgagtgagagcatacggtgtttggttttttgtccttgtgatagtttgctgagaatgatggtttccagcttcatccatgtccctacaaaggacatgaactcacccttttttatggctgcatagtatccagaatctacaaagaactcaaacaaatttacaagaagaaaacaaccccatcaaaaagtgggtgaaggatgtgaacagacacttctcaaaagaagacatttatgcagccaacagacacatgaaaaaatgctcctcatcactggccatcagagaaatgcaaatcaaaaccacaatgagatatcatctcacaccagttagaatggcaatcattaaaaagtcaggaaacaacaggtgctggagaggatgtggagaaataggaacacttttacactgttggtgggactgtaaactagttcaaccattgtggaagtcagcgtggcgattcctcaaggatctagaactagaaataccatttgacccagccatcccattactgggtatatacccaaaggattataagtcatgctgctataaagacacatgcacacgtatgtttattgcagcactattcacaatagcaaagacttggaaccaacccaaatgtccattagtgatagactggattaagaaaatgtggcacatatacaccatggataatgcacttctaaatacaattgtccctcagtatatgtggggaactggtttcaggaccccacatataccaaaatccacgcatactcaagtcctacattcagccctgtagaaccttattatttatttatttatttggttttttgtttgtttgtttgttttttgagaccaggtttccctattgttgcccaggctggagtgcagtggcgtgatctcagcttactgcaacctccgcctcccaagttcaagcaattctcctgtctcagcctcccaagtagctggagttacaggcatgcaccacacgctcagctgattttttgtatttttagtagagatggggtttcaccatgttggccaggctggttttgaactcctgacctcaggtggtccacccacctcgtcctcccaaagtgctgggattatagacatgagccacctctcccagccagccctgtagaaccttacacaaaaagttggccctctatatatgagtgggttctgcttgtttttaagtatgaggcaaatttcttaccttagcacctttaaatgttctcattttcttctgaatagcttatagtatccctttccctttacagtttatggatgtccaggggtctttcttctgaaagtatggtttcccttactatgttgattttttaaaaaacctcttttatttcagggaattttaagctattttccctgattctgataattagtttaggtctagcaaaacccttttcattattatttcattttcattattattgaaccatagcaactatgcttatttaatgaagagaaatatttatttatttcttttatagatagaaactggttgagtaatttatgagcataccattttgctgatgttttgagtatatgaatgtgtattataagaatagtccttataaatatattttgctccttttttcctgctcttatagaataaagatattcagcctataaaatttctaatcaaacaccaacaagaagtgaagatttattttcccatcatgcttacacccaaatttctggcatttcctcatcatcctatgggaatgttatatcgttataaagtacaggtatggtgtcctataaggcttcacaaggagataagccggtttctctaatagcttaatttattgaaatttgattaatgttacattt

SEQ ID NO: 2763 - DNA, 2300 bp, Homo sapien
tgggttccagcgatcctcctgccttggcctcccaaagtgctgggattacaggtacaagctattgcaccgggcctggaaagtttttacaaaaatttgtgtggaggggaccaggattaaggatgctttgtcaaccatgaggtggcctttatgtagaaaggaacaggagcatggcataattattgtcaaccagaagttaatcagcttgagccctttttactttcagacagcttgtgcagcaacatcatttattgtttgtgtagggaactttctcatatatatgttttaattcattaatgatagtgctttctatttcttaatgaaagaggcttcaaagtaattttctagttaggtttccctttcttgttgtaaatacctgaatatttttaaatacgtgatcctatcttgtctgcttttggcttgctctacaggaaatacttttagtagtttggcagggatgatgtttgagtggagcattgcccaggacaacgagtcagcaagagaagaactgtctagcaaaattaggtaaacttgaaaccaaacataaatcatctgactatgaagaagacatctgccattaagcggcatgctgaacaagcaaccatttgtgtggactttgatgaccctgctatctacttttttgaaactgataaattactgagagaaatgtctttgatagaatgaaatatgacatagatgtaggtacctttatgatcgcttaatctgagttattatggaggagttcatgggctaagtactacacaattatttgagccaggtatatcttctggaaattctttttgttcaagctacctgcacatgctggagtagagggagaaggatgatagtatgaaattttgtcttcagtaccaaggagtagatctcagatccaagttttactcccaccacaattttagccagaggctcataaatccctttcttttttttttttttttttcttcgagatggagtcttgctctgtctcccaggctggagtgcagtggcgtgatcttggctcactgcaacctctgcctcccgggttcacgccattctcctgcctcagcctcctaagtagctaggactacaggagcccgccaccacgcccagctaattttttttgttgttgttgtatttttagtagagaacagggtttcactctgttagccaggatgttctcaatctcctgacctcctgatctgcccactttggcctcccaaagtgctgggattacggcgtgagccaccgtgtctggccttttctttttcttttctttttctgtttttttttttgagatggagtcttgctctgtcactcaggctggagtgcagtgacacgatctcggctcactacagcctccacctcctgggttcaagcgattctcctgcctcagtctcctgagtagctgggactacaggtgcctgccaccacgcccagctaatttttgtatttttagtggagatggggtttcgccatattggccagggtggtctcaaactcctgacctcaagtgatccacccgcctctgcctcccaaagtgctgggattataggcgtgagccactgcgccttgcctttatctttttctttttcttttttttttttttttgagacggagtcttgctctgtcacccaggctggagtgcagtggcacaatcttggctcactgcaacctccatctcctgggttcaagtgattctcctgtctcagcttcccaagtagctggaattacaggcacatgccaccacgcccggctaatttttgtatttttagtagagatggagttttgccatgttggcctggctggtctcaaattcctgacctcaagtgatgtgcccgccttggcctcccaaagtgctaggattacaggcgtgagctaccatgcccagtcaaaagtgttttacattctatagacattgaagaaactatgtttaaagtctcttagggacttttggaagaacccttcgtttaattctgctagaaacacattttattttatgtctttaggattcttaaatactccgaagcagaatatgctcccccaatatatatagctgagatggaaaaagaggagaaacaaggagatgtgattttagtgtctgggattagaactggtgctgctgttgtaaaagttcgaattcatgaaccattctataaggtaaaaagtttgtgtgctataaattttccttacttgttttttcaagatatggtctaactctgttgcccaggtactacaagaatgcactacccgccctgttttttttttttttttgtttgtttgtttgtttttgtagagacagacagggt

SEQ ID NO: 2764 - DNA, 2300 bp, Homo sapien
tagaggagaggaaaaggtgtaggcctgccttaccgagagccaaacagagcccagggagactccgctgtgggaaacctcattgttctgtacaaagtactagctaaaccagaaaggtgattccaggaggagttagccaaacaacaacaaaaacaaaaaatgtgctgttcaagttttcagctttaagatatctttggataatgttatttctattttttatttttttcattagaagttaccaaattaagatggtaagacctctgagaccaaaattttgtcccatctctaccccctcacaactgcttacagaatggatcatgtcccccttatgttgaggtgaccacttaattgctttcctgcctccttgaaagaaagaaagaaagaagactgtgtttttgccactgatttagccatgtgaaactcatctcattacccttttctgggtttgaagctgctgtctctagaagtgccatctcaattgtgctttgtatcagtcagtgctggagaaatcttgaatagcttatgtacaaaactttttaaattttatattattttgaaactttgctttgggtttgtggcaccctggccaccccatctggctgtgacagcctctgcagtccgtgggctggcagtttgttgatcttttaagtttccttccctacccagtccccattttctggtaaggtttctaggaggtctgttaggtgtacatcctgcagcttattggcttaaaatgtactctccttttatgtggtctctttggggccgattgggagaaagagaaatcaatagtgcaactgttttgatactgaatattgacaagtgtctttttgaaataaagaaccagtccctccaaccctcagacctatttgacttttatttattaaaactaaatgtgctttctccacagaagctatgaggtttgggttaaaaatagcatctttgtgggtggtagcaacaggatttattctttattattattatttttgagatgaagtttcattcttgttgcctgggctggagcgtaatggctcgatctcggctcactgcaacctccgcctcctggttcaagagattctcctgcctcagcctcccgagtagctgggattacaggcacctgccaccatgcccgggtaattttttatattttaagtagagacagggcttcaccatgttggccaggctggtctcgaactcctgaccttcaggtgatccacctgcctcagcttcccaaaatgctgggattacgggcgtgagccaccgcacccagctggagcaacaggatttaatatagagcaaatgtttagttttatcatctgtaaaatggagataagtattgtcagagtaaacatgaagattagaaagaacacttaatgtgctgggccttttataggttaacactgacatctcaggctgaactatatacattttccttcacaaccatatcaatccttataaactatggatttatgctccttaaaacaatatataatgctgatcactactataaatgcgtggttttaaccaactgtactgaaacagctttgagtttatattctgtttggatatttggagaaaacaacaagtgctctcaagagtatttgcttagaggccggctgtgtgagtggataactttgaaagctgcttttgagacgccagtgtctggcatttcctgcattctggcctggaggccggacgtgaatctgacttctagtaaaaatacacggttcccttgacaaagtcgagctgtttatcccagagactgcacaattttccgttgataggcatggaccaatgctaactggaaatcattgcaaaaagtttttttgtcgggcggagggtgtggtgttaagataaacagtgtgcaacagaagaaattaaaactggaagaaattaaagggttttttttagacttttctgcttgttccttactgttaaaaaggtctgccatccagtatttaggaaagccctttaagagagtttgaggtgttttagctgggtttgtgccaaaagtttccattatattggcttgctgaaggactgcatttaaaaatgcccacacatccgagcaagaagcaggtcccatccccctctgctgacgtcacgcctgtggattggctgatggagctgtgagccggctgtagttgagcgggaacccgagacctggcagtcgccatgactggctgtccggcgtcatcaagacgccgaggcttcgggctctttttcttcttgcgtctacaccgcctcctgttgttgtttctggttttgcgtgggaccctggccaacaaacttaacgtgccaca

SEQ ID NO: 2765 - DNA, 2300 bp, Homo sapien
tcaggtgatctgccggcttcggcctcccaaagtgctgggattacaggcgtgagccaccacgcccagctgtatatatccatatttttatttaatattttagtatttaatttcttaataagtttttttgggggtggtggaggagacggtgtctcactctgtcgcccaggctggagtgcagcagtgcgatcttggcttactgcaacctctgcctcccgggttcaagtgattatcttgcctcagtagatgggattacaggtgcttgccaccacacctggctaatttttgtatttttagtagggacagggtttcaccatgtttgccagctggtctcgaactcctgacctcaagtgatccacctgacttgacctctcaaagtactgggattacaggcatgagccactgcgcttggccaggatgtattacctttataacaaaaagttttttttttttttttgagacggagtttcgctcttattgcccaggctggagtgcaatggctcgatctcggctcaccgcaacctccacctactgagttcaagtgattctcctgcctgagcctcccaagtagctggaattacaggcatgtgccactacgcccagctaattttgtatttttagtagagacggggtttctccatgttggtcaggctggtcttgaactcccgacctcaggtgatctgcccgcctcagcctcccaaagtgctggggttataggcgtgagccactgtgcccagccataacaaaaaattttaaatgaaataattaaactaaggtgtgggagtagtaacatggaatttccatttgaggggcagacagagaggagtgggcttttaaaagtacagttctgagacccttggagtggagctgacgacacactcctcagggtgtcagtattgcttttgtcctatttctggcagaggtatgaaggttattgaaaaccgggccttaaaagatgaagaaaagatggaactccaggaaatccaactcaaagaagctaagcacattgcagaagaggcagataggaagtatgaagaggtaagtgaccttctgttagtccctctcgtatcggccttttacaaagcataatgcggtaaatggctcctttgcttcactaagctatactgggatcttttcctgtaggtggctcgtaagttggtgatcattgaaggagacttggaacgcacagaggaacgagctgagctggcagagtcgtgagtatctagctccccaaatcttgtcattaccaatttatcccttcccctttggcttgggcactaatatgaataaattagcattccttcaaccttgttaaacagggcctagggaatgggagtcatctatagtgcttttttaggcccaagaatggttttaggcttccttattctcctgactagtgacaagtgacaaaagaggctttcttattttttgttggtagggtttacaaattgagagcaaataaggactaatacatggtgaacagttaattggaagatcctactgggtccttccacctggggtggaagacatcaaagtggctatcctgatttaagatctagtgtctggctgggtgtggtggctcaaacctgtagtcccagctacttagtatgccaaggcaggaaggttgcttgaacccaggagttggaggccagcctgggcgtcatagggagaccctgtccctaaaacaaataaatttaaaaaaaaaatctggtgtctgttttggccactttgccaatctgctagggaaccttagggcaagggtagatattaactgctctcccgtcggtaccttctgggccttgattaacaaagtcagtgctgaatgcatatgtatttgtgcttccctcttacattcccgtctgccagacataacatatcatgaccatggtggtgttctcttcccattttttgaatttttttttttcgttttgctgcttgttttcttgctgtgttcctttttgacctttctccctccccacaacctggcttgtgccatccccgtgactatcactaacagccgttgccgagagatggatgagcagattagactgatggaccagaacctgaagtgtctgagtgctgctgaagaaaaggtactaaccattaagcccacagcaaggttatatatgtggtgtggttttgttttgttttgtttttgttttgcagctgcctcccctccacttgattttgttgagtgctgtctcatctcttcatggaatgctccattcttttccacttacttggcatctttcatctcttctttcctagttgcttcactgcctctccacagggtctccttcctt

SEQ ID NO: 2766 - DNA, 2300 bp, Homo sapien
tcacacctgtaatcccagcactttgggagcctgaggtggacgatcacttgaggccaggagttcaagaccaccccagccaacacagcaaaatccagtctctggtaaaagtacaaaaattagccaggcgtggtggggcgcgcctgtaatcccagctactcaggaggctaaggcacgagaagcactggaacccaagaggcggaggttgcagtgagcctccctcttttttttggtctcaaaaaaaaaaaaagaaagaaagtgaggatagctgcatgctgaataccggggggaaaaaaaagagtgtggaaaacaagttgcagaaccgtctagtatattattactttggggaagctgggatgggatttttgtgtgtatatatatatatatatatatatatatatatatatatatacacatatatttaaataatatttatttatttttttgagacagagtctcactctatcccctaggctggagtgcagtggcacaatctcggctcactgcaacctccacctcccgggttcaagccattctcatgcttcagcttccctcaagtagctgggattacaggcgcctgccaccacgcctgactaatttttgtatttctagtacagacagggttttgccatgttgaccaggctggtctcaaactcctgacctcaggtgatctgccggcttcggcctcccaaagtgctgggattacaggcgtgagccaccacgcccagctgtatatatccatatttttatttaatattttagtatttaatttcttaataagtttttttgggggtggtggaggagacggtgtctcactctgtcgcccaggctggagtgcagcagtgcgatcttggcttactgcaacctctgcctcccgggttcaagtgattatcttgcctcagtagatgggattacaggtgcttgccaccacacctggctaatttttgtatttttagtagggacagggtttcaccatgtttgccagctggtctcgaactcctgacctcaagtgatccacctgacttgacctctcaaagtactgggattacaggcatgagccactgcgcttggccaggatgtattacctttataacaaaaagttttttttttttttttgagacggagtttcgctcttattgcccaggctggagtgcaatggctcgatctcggctcaccgcaacctccacctactgagttcaagtgattctcctgcctgagcctcccaagtagctggaattacaggcatgtgccactacgcccagctaattttgtatttttagtagagacggggtttctccatgttggtcaggctggtcttgaactcccgacctcaggtgatctgcccgcctcagcctcccaaagtgctggggttataggcgtgagccactgtgcccagccataacaaaaaattttaaatgaaataattaaactaaggtgtgggagtagtaacatggaatttccatttgaggggcagacagagaggagtgggcttttaaaagtacagttctgagacccttggagtggagctgacgacacactcctcagggtgtcagtattgcttttgtcctatttctggcagaggtatgaaggttattgaaaaccgggccttaaaagatgaagaaaagatggaactccaggaaatccaactcaaagaagctaagcacattgcagaagaggcagataggaagtatgaagaggtaagtgaccttctgttagtccctctcgtatcggccttttacaaagcataatgcggtaaatggctcctttgcttcactaagctatactgggatcttttcctgtaggtggctcgtaagttggtgatcattgaaggagacttggaacgcacagaggaacgagctgagctggcagagtcgtgagtatctagctccccaaatcttgtcattaccaatttatcccttcccctttggcttgggcactaatatgaataaattagcattccttcaaccttgttaaacagggcctagggaatgggagtcatctatagtgcttttttaggcccaagaatggttttaggcttccttattctcctgactagtgacaagtgacaaaagaggctttcttattttttgttggtagggtttacaaattgagagcaaataaggactaatacatggtgaacagttaattggaagatcctactgggtccttccacctggggtggaagacatcaaagtggctatcctgatttaagatctagtgtctggctgggtgtggtggctcaaacctgtagtcccagctacttagtatgccaaggcaggaaggttgcttgaacccaggagttg

SEQ ID NO: 2767 - DNA, 2300 bp, Homo sapien
ctctgcctcctggatttaagcaattctcttgcctcagcctccctgaatagctggaactacaggtgtgcaccaccacacccggctaatttttgcatttttagtagagacggggttttgccatgttggccaggctggtctcaaactcctgacctcaggtgatctgcccgccgtggcctcccaaagtgctgggattacaggcatgagccaccacatctggccaaagggaagtttctaactcataaacagttccttgggggtacttggaagtacagtggcattgaaattggtaaaagttgtaacagaatggaggctcaattctatagtacagtttacaggcactcatgtctggctgttgcatgaaggatctagtaacagtcgtctgttttttatttttttgagacaggctctcaatctgtcacccagactggaggcagtgatacaatcttggctcactgcaacctctgccttcccggctcaagaaatcttcccacctcagcctcccaagtagctgggactacagacgtgctgccaccaagcctggctaattttttaattgtttgtagagacgaggtctcactatactgcccaggctggtctcaaactctgggctgaagtgatcttctcgcgttggcctcccaaatgttgggatcacaggcatgagtcaccccgcccggctgacagtggtctgtaatagaggatttcttcctgataaaatgggggcatatctttcttacctacaaaaggaattgtaagtgattattaaattatttatttatttttagagatgaggtcttgctatattgcccaggctggttttgaactcctgggctcaagccatcctcccacctcagcctcccaaaatcctagacttacagacatgagctaccacgcccagctgatgattaaattgccaagtcctgaatcattccaaggtttggaggggctggaaggttggttaatttggtgcatgatgactctcaaaagtaacagggacctgtaatcccagcactttgggaggccgaggccggcagatcacgaggtcaggagatcgagaccatcctggctaacacggtgaaaccccgtctctactaaaactacaaaaaaaaaattagccgggcgtggtggagggcgctactcgggaggctgaggcaggagaatcgcttgaacccgggaggcggagcttacagtgagccgagttcgcaccactgcactccaacctgggcgacagaggagactccgtcccaaaaaataaaaaacaaaacaaaaataaataaaataacagggagcctgacggggtggcgtgcacctgtagtcccagctacaccggaggctgaggtaggaggctcgcttgagcccaggagttcgaagctgtagtgagttgtgatctcgccactgccgcactccagcaacagagcgagatcttgtctcttaaaaaaaaaaaaaaaaaaaaaaaaaaggagaaaagtctgttctaaatagaacacttaagttcataccatgccaaatagaatgagaatttgtgccatcttgcccatcccttccactccgacagttccattcattgacttccaggagacgggagagagaacctacctacctgagccgactttgaaaggagactgagtggggctcttttgaacctgaggcccagaaagtcttttagacttttcttataacttggttttggagtttgtcgtggggtgagtggaagcagagacttgtaggatgtttatattgtggagcaaatacagtgaggggtgacgggtatcggcattgcgggagtgaggggtcaattgcgggagtgtaaggtcagccgactacctgcaaaggggccaaccattgtgggcagccagcctggcgggagaggctagggcacgaagcgccgcccagttaccatggtaacactccctcgtcccaaccccgtcccagtttactggcccaaggtaaggccgggagccgtactccagggcgactgggaggatccactccctgccgcggctctccctccagtggactgccttcccgcctgcctggcggtgggagggcgcggcagagggacgtcacatccgggcgggttggtgagttccggtatttcagggcgtagcaggcggaagtaagggtgagaggaggctgcaacgccgagcggaggaggcaggaaccggagcgcgagcagtagctgggtgggcaccatggctgggatcaccaccatcgaggcggtgaagcgcaagatccaggttctgcagcagcaggcagatgatgcagaggagcgagctgagcgcctccagcgagaagttgaggga

SEQ ID NO: 2768 - DNA, 2300 bp, Homo sapien
gtgggggtgatctgggaaggttaggagttctgttggaaaggtaaagcagggtgtacaagtcctctgcccccaccccggaaagcctcagggcagctggaatggcattgaagagagcaggtggcaattttgatgaggagctgctgacacggctgatcctctgggcgctggggccgtgacatcagggtgagaagctctgtgtgggagctctagggaacgatagttgcccggatgtggagccctgccaggtattcttcctggtttaggccaacgtgatccagcaaaggccaggagcttgtagaggaggagctgaggcagggatgacacgtaggacaataagcaagagctggctgtcttgggaggtgaagagcaggagccagtacccttcctcaaggagatggctctccacctagacatgattggtgcctggtgtctgctctattctttctttgcaactggaaggaaggcagatgacccccaaagctctcctgcctgcttctgtgtgatatgtttgatattgggttgtttaattaggaaccaactaaatgtcaaacatattcttacagcagcaggtgattcagcaccaccctctttcatacttcaatctctggggctcctgtctcttttactgaacctcttctctccaggacccccccaaaagtccagtagctgcaacctatgtgcatttcaatcttaacctaagagggctggtgtgggaatgggagagagttggaatttgaggatagaatctttctatttcttgtccccttatactagaagggacatttctttgccttttcttgtcctcgtatttttctcccccttattcacttgcccaccccccccccattttccactccttcctctccctgttccctaacccctttccctggctaatctccagagaaaggagacttggtttctcctctctctgtcgagagtcagctgatggtctatctgcctatctacctctagtgactggaagctctcaatagtggactccagctctgctctacccactggcctggtgggtgtctccgttcccccattgctggggcttagcattaactctcagtatcctgacataaatgactaactagagccatttatatttgtccaatatatctggtcaccttgaacagtgcccacctctcccttggcatattttcaggtgtatggtgccagtggactggtatccttgccacctgttagtaacaaggctcccaatggaagaataaacatggtctggaactaaactggaaagaatagagctgataatgatgattacgatgatgtggtgagtggcagcgttggggagaattaagaagggagaagataaagggaagaagaggagagagccacacagaccaaagtctgtgtgggtacaacagttctattttaagattactgtgggaaaacaaagggtatgatcctgtctggattgttctgaccctcccctgtttctctccccaccccacttgaagctctgggatagccttcaaggatagggttggagattccaaccctacctcttactctactcttgtggctcttggtggggaggaaaaacgtctccctgccaatcggagactcccagaatagcacagcaatttgatctggggatctgggagaattgttaaggatcatgagtgacctcccctcttccctgtgcccaagctccttgaataccaggaatcaaaagctaaaactcaactaacggagtttgaccagcattcaacacagtctgggggagagtgaaacgggaagctgaaaggcaaccaggaccccctggatgcaaactgccaacctagaattgccaaagtacacttctctatttcaatgttcttccctcccctcttcctcttcttttaaaacatccatagagctgcccagaatgagtggaaagtttcagggtcagggagaacctcttccctcccccactttccattgtctaaaatcagcctcagctgttgctagatattttttttgctggtgatgtcagttcatcaaagcgtctcaccctgtgttcccccaggagaacaatgatggggtggagggagctggaaagaccatattaggaacaaaaggtggagctatgagcacagataaagactcaagtctggggacctcctggtcactcaggcagcagccccttctttcttgccccagtctccagttctccagtgttcacaggtgagcctaccaacagccactgctcatgatggaggccatcaagaaaaagatgcagatgctgaagttagacaaggagaatgctctggatcgggcagagcaagctgaagctg

SEQ ID NO: 2769 - DNA, 2300 bp, Homo sapien
tggagtgctgctacttttttagggtgtgtgtgagagagagagacagggtctcagtctgtcgcccagactggagtgcagtggcacattcatggctcactgcagcctcgaattctgggttcaagcgatcctcctgcctcagcctcctgaggaaccaggactacaggtgcttgccaccatacctggctaattttttgcagagatagggtctcactttgtttcccagactggtctcaaactcccctgggctcaagcgatctctggcctctgcctcctgaagtgctgggattacaggtataagtgaccatgcccagcctctctgctactttttttttttttgagatggagtcttgctctgtcacccaggctgaagtgcagtggcgcaatcttggcttgcaacctctgcctcctgggttcaagtgattctcttgcctcagcctcccgagtagctgggattacaggcacccgccaccactcccagctaatttttgtatttttagtagagacagggtttcaccatgttggccaggctggtctcgaactcctgacctcaaacaatccacctgcctgggcctcccaaagtgctgggattacaggcgtgagccaccgcgctcagcctcttgtatttctaagctactagatggggttttagtaactagtttacaaaataggacagataggacacaaataactatttgtgactattgctgcatttatggcctgggataagccctgatttctttgattagtcctcattctgtcaatgacctcccctctctgttcttcagggttaaagcacgaattgggagctctcagcgacatcaccagtcagcagccaaagacctaactcagtcccctgaggtctccccaacaaccatccaggtgacatacctcccctccagtcagaagagtaaacgtgccaagcacttccttgaattgaagagctttaaggataactataacacattggagagtactctgtgacggagctgaaggactcttgccgtagattaagccagtcagttgcaatgtgcaagacaggctgcttgccgggccgccctcggaacatctggcccagcaggcccagactgtatccatccaagttcccgttgtatccagagttcttagagcttgtgtctaaagggtaattccccaacccttccttatgagcatttttagaacattggctaagactattttcccccagtagcgcttttttctggatttgcattcaggtgttattcttaatgtttctgtcaaagcttcttaaaaatcttcacttggtttcagccatagttcaccttccctgttccaggtttatttaattccaaaggtgagagttggagtgagatgtcttccatatctatacctttgtgcacagttgaatgggaactgtttgggtttagggcatcttagagttgattgatggaaaaagcagacaggaactggtgggaggtcaagtggggaagttggtgaatgtggaataacttacctttgtgctccacttaaaccagatgtgttgcagctttcctgacatgcaaggatctactttaattccacactctcattaataaattgaataaaagggaatgttttggcacctgatataatctgccaggctatgtgacagtaggaaggaatggtttcccctaacaagcccaatgcactggtctgactttataaattatttaataaaatgaactattatcaaataaaacgtatgaatcagtcctttatagttgtcttttaataaaacaggcatttgataatgttatctgcacatttctaacagggtatagggcatgaggatttgcctccagagaattggtgggactgtgtgcataccctggacctacgaccatacacatactccttgggaccctagcacaagaaatcctaaaatcaggactgtggcccttgctcatagatgcctgtgtcaccaacagaaggctgcagaacaaggattctctcaaggtttctggggcaacaggccaggtggccaatcaactcctaggcccagggttattgttggaggtgtaaatgttactatgactactgaaaccttggttactgaactaaacagaggagcctgtcagtctcctcagactgtatcaagcaaatctatagacatgtctgtggaaaagatgacaaaagtagaagaggtatgcagagttggaaggaggggctgggttgaagtttgatgaagtttccagatcaatttactataagtgcatcttttactgggaaaggcttttgatgtaacaagggtataatgtagttagtaacaggagtgggaggctgtg

SEQ ID NO: 2770 - DNA, 2300 bp, Homo sapien
ggtgttaccaccaaatgaccactcaggcacagctttatacctttggtctcaatcagaatctccctctaactcaacttgctcatttcattagacctatttctttttatttttgagacggagtcttgctctgttgcccaggctggagtgcagtagcacgatcttggctcaccacaacctccacctcctgggttcaagcggttctcctgcctcagcctcccgagtagctgggattacaggtacctaccaccatgcctggttaatttttgtatttttagtagggacaggttttcaccatgttggccaggctggtctcaaactcctgacctcaggtgatctgcctgccccggcctcccaaattgctgtaattacaggcgtgagccactgcgcccagcttcattagacctacttctaagtttggggaattaactagaaagactaaagaatggggcaggcgcagtggctcatgcctgtaatcccaacgctttgggagggcgaggcagacagatcacaggaggccaggagttcaagaccaacctagccaacaaggtgaaacccttttgtatttttgtctctactaaaaatacaaaaataagcctggcatggtggtgcacatctgtaatcccagctaatcaggaggctgagactagagaattgctcaaacctaggaggtggaggttgcagtgagccaagatcactgccactgcactccagcccgggtgacagagcgagactccatctcaaaaaaaaagactaaagaatgagaagagatatcattgtgctgttttctccacagagatcccatttcattctgaaggccggcatccccgttccttaatgggcaagaatttccgctcctacctgctggatctgcgaaacactagtacgcctttcaagggtgtacgcaaagcactcattgatacccttttggatggctatgaaacagcccgctatgggacaggggtaagccagttttttcttcggggcactaaagagatccctcagactgagagatcctcactcttcctttctctttcctaaggtctttggccagaatgagtacctacgctatcaggaggccctgagtgagctggccactgcgtgagtttggaggggaacgtgtcagagggagctggtacagtagtgttggactgttgccacagtgcagtgaccttcataaagcatataaacaaaatccatgataccataagagttgtcaggttctagactattagatcagtctcttacattagaaagcagatgcggccgggcacagtggttcacgcctataatcccagcactttgggaggccgaggcgggaggatcatctgaggttgggaatccgagaccagcctgaccaacatggagaaaccccgttctctactaaaaatacaaaattagccgggcgtggtggcgcatgcctgtaatcctagcttctggggaggctgaggcaggagaatctcttgaacccgggaggcggaggttgcggtgagccaagatcgtgccattatactccagcctgggcaacaaaagtgaaactctgtctcaaaaaaaaaaaagaagaaaagaaagcagatgcaactatacaagctagtaaaagaagtttttactagcatttttcttgtgtgcatttttcttgtcttttgtttagcccaataaaatgtcaaaattggtgtagcctagcaaagggaatagtttttcagcacacacagggattccttctcttcagagtctcagcgtcccttttgtgtcttggcccaataaaagtaagaattaaataacattgggccgggcgcggtggctcacgcctgtaatcccagcactttgggaggccgaggcaggcgaatcatgaggtcaagagatcaagaccatcctagccaacaaggtgaaaccctgtctctactaaaaatacaaaaattagctgggcatggtggtgcgtgcctgtaatctcagctactcgggtggctgaggcaggagaatcgcttgaccccaggaggcagaggttgcagtgagctgagatcacgccactgcactccagcctggtgacagagcaagactccatctcaaaaaaaaaaaaaaaaaaaaaaaaaaaaaaagaattaaataacatctatttttggccgggcgcggtggctcacgcctataatcccagcactttgggaggccgaggagggtggatcacaaggtcaggagttcaagaccagcctggccaacatggtgaaacctcgtctttactgaaaatacaaaaattagctgggcatgctggcgggctcctgtaataccagctactcgggaggctgagg

SEQ ID NO: 2771 - DNA, 2300 bp, Homo sapien
attagccaggcgtggtggcgggcgcctgtagtcccagctactcgggaggctgaggcaggagaatggcgtgaacccgggaggcggagcttgcagtgagctgagattgcgccactgcactccagcctgggcgacagagcgagactccgtctcaaaaaaaaaaaaaaagaaagttagtggtaatgttccattgcataaactggatattggttataggtgttcattattatgctttttataattatttaaaatgtacatctatgttacctgtattttgtgtatcttatgtttcacaatgggagtttgtaaaaagttacaacaaaaaatttatttcctggggctctggtaaccctcttaggtaagagagattaatatgaaactgaaaatagtagttgctgctgggtaactgagaggtgctacctttagtatctttttttttttttttggagacgtctcactctgtcacgcaggctggagtgcagtggcgcaatctcggctcactgcaagctctgcctcccgggttcacgccattctcctgcctcggcctcccgagtagctgggactacaggaccccgccacaacgcccggctaattttttgtatttttagtagagacagggtttcaccgtgttagccaggatggtctcgatctcctgaccttgtgatccacccacctcggcctcccaaagtgttgggattacaggcgtgagccacagcacccggcccctttactatctttaaaatttgtataccatgaatttgacttggctattttaaaagaaatatgtgttaatttttttttaaagtagcctctagctaggtgcatacctgtaatcctagctgctcagaaggctgaggcaagagaggctgggcgcagtagctcacacctgtaatcccagcactttgggaggccaaggcaggcggatcacttgaggtcaggagtttgagaccagcctggccaacatggtgaaaccccatctctactaagaatagaaaaattagccagacatggtcgtacgcgcctataatcccagctactctggaggctgaggcaggagaattgcttgaacctgggaggcggaggttgcagtgaactgagattgcgccactgcactccagcctgggtgatagagcaagactctgtctcaaaaaaaaaaaaaaaaaattggaaataatgttggtgctgtatagcttgaaggatttctggcacaagttaaatgttctagcttagagatgtgcagcttggagaggttattggaaaacccaatcccgttctttcctaaattcttacctcttatctggtaattttattaactacatgagcatggtctctatttctgttgtcttagttattcattaactctgccccattttcacattggtggaaagcagagtgcagggtaaatgattgtgtattctttttttatgtgaacaggacttgaaagaggagattgatattcgactctccagggttcaggatatcaagtatgagccccagctccttgcagatgatgatgctagactactacaactggaaacccagggaaatcaaagtatgtggcaagctcttggaatgcttcagtgaggagtcccacaagtccagaattccttttctctcagagttgtcaaaagctgctggcaaagccttagttattcctgttattggatatatgttagatgcagagcccatttattagcttgctggagtttggggaattttttttttcttttttgagatggagtttcactcttgttgcccaggctggagtgcaatggtgcagtctcagctcactgcaacctccacccccttgttcaagcaattcttctacctcagcctcctgagtagctgggattacaggcatgcgccaccacgcctggctaattttgtgtttttactagagacggggtttctccatgttggtcaggctggtctcaaactcctgacctcaggtgatccacccacctcagcctcccaaagtgttgggattacaggcatgagccaccacgcccagcctggggaatatttttagggttatgcctaacaccagtcttttcctcaacaggttgctacaactatctgtataggatgaaagctctggatgccattcgtacctctggtaagggctacctgacagggtccattctaggatcctgaaagcccacctagggaacagagtaatgaacccactttgtatgttaggatttgtcctttctgcacatccctggctagtaggaaattctagagttttgaaagtactagattagagattttgctgaaggaaatgatataagcaggttattctc

SEQ ID NO: 2772 - DNA, 2300 bp, Homo sapien
gccactgcactcagcctatataataattgaaaagtggacatttgaattaagtttcttcttcaaatattatgaacaatgcccctataaataatcttgcacatgtttcttggtacacatgagcaaaacttaatttctctatggtaggagagaaactgttggaccatggattaggtacatgtgcaatcttaccagacaatgaccagttattttccaaagtggttttactaatttatactttcactagcaatggttgagaatttagaaaaaatttttaagcaaaaggaatattgctctgaactagaccaagggacccctgaatagccaaagtattgattggttcatgatgtgctagaaactaaccctatgtctttctcatgaggcaggcaggactgttaaggtttcaagccaggacatcctcctagagccttttcatgtactatgtcagcaaagaacaaagaggggaaggttaatagcacttgttaatgaaagtacagtgctctaggagttgagggagtcatgagctctagctctacaactaacctgtttttcattcagcaacaaattacagagtacctgctatgtgtaggccctggcactaacctgtttttcattcaacaagaaattactgagtacctactatgtgtaggtcctggctttatagtcgtgaacaaaactggcatggtgcctgcattcttgaagcttacggtctagcggaagagagaggcatgttttaaacaaatggacaaacataaaaattatggtaaatgctatgaaggaaaaatcagggtaccatgtgaaaataaagagagggggaacctactttaaaataggtaataagcattccttttttggaagtaacatttaagctaagatcaaaagaatgaatgagctagccaattgaagaccattccagatcacaggagcaaaaagggtggaaaattcagccagtggagctgggtcccagtgatctggggagagccacacaaaagggggttggtaagggaagcaggtgtcttttacttagaagcgaaagactaaagaagcagaatgagagtggcagtgggatagcaataattctgattcacaaatgttgggtttgagatgtctactacaaatctaagtggaaatgtcaggtaatcagttggcaatatatgtaaggaactcaggaaagagttctaggatagagataaaatttcatctgtagctaaagccaaggaaaggaagacagtcacctaaggagaaagtacagacaaagataaaagaccactgggttattcacttcctatacgtcttctggtaaactgcctccttttcttgggcttcttggtaacatgaatggtggaattagatgatttatggagctcctcttaagtctaaaattatgtaaaggtaacccttctcattgctcttgggttaaccttaatgatctcaaccccatcctaatcaaacaaaaaacactgggtagtttaagatgagctgggaaatattttactacaaacagttgggaacttcgacccaagcccttcattctgcagatacaaaaacagaagttccaggatgagccacatgcttgccacagcactgagcaggtaagccaagttccaaagcgcacagtgcctgctcaacttagtaagtacaaggacaagtgcacgcaaagaaacatgagaattaaagtcatcactaaaggcagaggaaatctcattcttgaccctaaaagatctggagaagtatgtttaacttgtgccctaaggacctaccttgggggcattgtgtcccacagggacatgaggtccccttcgagatttcattgcaaagcgcatgatttgcctcttcacaaaaataaatagcagtacaaacacctgtccaaaaagatgtaaaaatcctttaataaaaagtcagttttgttttgttttttttttaaaaaagcatgccttcattccaaatccccagattccggctctcaggaatgtttcagggtaaaacttggggcaaagcaaggccgttatgatgggggtggatctaagaagccagcagcagggaggcgtggggtctgtgctctagcgttaaagggagggttctagactaacgagggcgggtcggcccgactaagtgacttaaactcccacctactcctggaataaggagtcaaagcccggataggcgcaggtgagtgggtggagaatgcagacggggtacagctcaaaaggagggtctctactgggtaagatgcgacagcaggaatggggtggggtaatctcctcaccaggctcccgtaggccatcaccagcacgacattcacc

SEQ ID NO: 2773 - DNA, 2300 bp, Homo sapien
ccatgtgaaaataaagagagggggaacctactttaaaataggtaataagcattccttttttggaagtaacatttaagctaagatcaaaagaatgaatgagctagccaattgaagaccattccagatcacaggagcaaaaagggtggaaaattcagccagtggagctgggtcccagtgatctggggagagccacacaaaagggggttggtaagggaagcaggtgtcttttacttagaagcgaaagactaaagaagcagaatgagagtggcagtgggatagcaataattctgattcacaaatgttgggtttgagatgtctactacaaatctaagtggaaatgtcaggtaatcagttggcaatatatgtaaggaactcaggaaagagttctaggatagagataaaatttcatctgtagctaaagccaaggaaaggaagacagtcacctaaggagaaagtacagacaaagataaaagaccactgggttattcacttcctatacgtcttctggtaaactgcctccttttcttgggcttcttggtaacatgaatggtggaattagatgatttatggagctcctcttaagtctaaaattatgtaaaggtaacccttctcattgctcttgggttaaccttaatgatctcaaccccatcctaatcaaacaaaaaacactgggtagtttaagatgagctgggaaatattttactacaaacagttgggaacttcgacccaagcccttcattctgcagatacaaaaacagaagttccaggatgagccacatgcttgccacagcactgagcaggtaagccaagttccaaagcgcacagtgcctgctcaacttagtaagtacaaggacaagtgcacgcaaagaaacatgagaattaaagtcatcactaaaggcagaggaaatctcattcttgaccctaaaagatctggagaagtatgtttaacttgtgccctaaggacctaccttgggggcattgtgtcccacagggacatgaggtccccttcgagatttcattgcaaagcgcatgatttgcctcttcacaaaaataaatagcagtacaaacacctgtccaaaaagatgtaaaaatcctttaataaaaagtcagttttgttttgttttttttttaaaaaagcatgccttcattccaaatccccagattccggctctcaggaatgtttcagggtaaaacttggggcaaagcaaggccgttatgatgggggtggatctaagaagccagcagcagggaggcgtggggtctgtgctctagcgttaaagggagggttctagactaacgagggcgggtcggcccgactaagtgacttaaactcccacctactcctggaataaggagtcaaagcccggataggcgcaggtgagtgggtggagaatgcagacggggtacagctcaaaaggagggtctctactgggtaagatgcgacagcaggaatggggtggggtaatctcctcaccaggctcccgtaggccatcaccagcacgacattcaccccggagagccagttactgccggacgccatggcctccctacctcgcgcagaattgttcgggtttaccccgctgtcctggctggtcagcccaggctccgccgaagcgacggcgcctgggtcccctggagctccccggccatttccttacgggggaagaccaagccagacccggcctgaaaacatggcggacaggcaggagagctgggaaaggagaacgacgccttccagcttccccctgacacgtgactcaggcaggcaatggcacccaggagcgtcgagcgctcagacgcggaactacgacagtaagaggaagcggcggccatccgtgcgtcacgtggtggaggcagggccgccgtgaaggaggcggggtggactcgcggagccggaaagaggtgtctcgtggcgaggcggcacgcgcacgcttgcgtgcgcgccccttttagcgtcacgcgctgagggacgcaggaaggcaagtgggcgggggaaggcgcgagagcgagcgcgagagggaaaaggagggagggggtggggaagagggaatcttatatcacgtgacaggggcggcgcggcccggggtgtcagtgtggaggagactgaggtaaagttgggagcgcagcggcgttggcggcggcggcggcggcagcggcagcgcggcggggccgggtattgtccgcggcccctttaaatccgcgatcccccttttaccctccctcttttctcccctgcccccgccgtatcccctccctcggtaggcccccccacaccgtgtgttcccccactgtacaccccc

SEQ ID NO: 2774 - DNA, 2300 bp, Homo sapien
aactcaggaaagagttctaggatagagataaaatttcatctgtagctaaagccaaggaaaggaagacagtcacctaaggagaaagtacagacaaagataaaagaccactgggttattcacttcctatacgtcttctggtaaactgcctccttttcttgggcttcttggtaacatgaatggtggaattagatgatttatggagctcctcttaagtctaaaattatgtaaaggtaacccttctcattgctcttgggttaaccttaatgatctcaaccccatcctaatcaaacaaaaaacactgggtagtttaagatgagctgggaaatattttactacaaacagttgggaacttcgacccaagcccttcattctgcagatacaaaaacagaagttccaggatgagccacatgcttgccacagcactgagcaggtaagccaagttccaaagcgcacagtgcctgctcaacttagtaagtacaaggacaagtgcacgcaaagaaacatgagaattaaagtcatcactaaaggcagaggaaatctcattcttgaccctaaaagatctggagaagtatgtttaacttgtgccctaaggacctaccttgggggcattgtgtcccacagggacatgaggtccccttcgagatttcattgcaaagcgcatgatttgcctcttcacaaaaataaatagcagtacaaacacctgtccaaaaagatgtaaaaatcctttaataaaaagtcagttttgttttgttttttttttaaaaaagcatgccttcattccaaatccccagattccggctctcaggaatgtttcagggtaaaacttggggcaaagcaaggccgttatgatgggggtggatctaagaagccagcagcagggaggcgtggggtctgtgctctagcgttaaagggagggttctagactaacgagggcgggtcggcccgactaagtgacttaaactcccacctactcctggaataaggagtcaaagcccggataggcgcaggtgagtgggtggagaatgcagacggggtacagctcaaaaggagggtctctactgggtaagatgcgacagcaggaatggggtggggtaatctcctcaccaggctcccgtaggccatcaccagcacgacattcaccccggagagccagttactgccggacgccatggcctccctacctcgcgcagaattgttcgggtttaccccgctgtcctggctggtcagcccaggctccgccgaagcgacggcgcctgggtcccctggagctccccggccatttccttacgggggaagaccaagccagacccggcctgaaaacatggcggacaggcaggagagctgggaaaggagaacgacgccttccagcttccccctgacacgtgactcaggcaggcaatggcacccaggagcgtcgagcgctcagacgcggaactacgacagtaagaggaagcggcggccatccgtgcgtcacgtggtggaggcagggccgccgtgaaggaggcggggtggactcgcggagccggaaagaggtgtctcgtggcgaggcggcacgcgcacgcttgcgtgcgcgccccttttagcgtcacgcgctgagggacgcaggaaggcaagtgggcgggggaaggcgcgagagcgagcgcgagagggaaaaggagggagggggtggggaagagggaatcttatatcacgtgacaggggcggcgcggcccggggtgtcagtgtggaggagactgaggtaaagttgggagcgcagcggcgttggcggcggcggcggcggcagcggcagcgcggcggggccgggtattgtccgcggcccctttaaatccgcgatcccccttttaccctccctcttttctcccctgcccccgccgtatcccctccctcggtaggcccccccacaccgtgtgttcccccactgtacacccccccccgagtcatgcgagccctggcgccccccacctcgagtcggcccccggaggttttgtttatggttgggttcgcggcctagtgggccgcgccagagccggggcctcgatttgggagcgtggccggggcggggcttggagcagccgtaggaagggggggccatgcggctagagcctgagaggggagagcgagaaagagcgcgagcgagcgaggcctgggccttgcctgaggtagggctctctcttcaccccggccggtgcctgcggaggagagggcctcctccctttccacccactgcgggcctcctctgatccggatccggcctggtttgggggtggcgtgggggagggagggcgatggggtggagctcc

SEQ ID NO: 2775 - DNA, 2300 bp, Homo sapien
tacaatctaatttaagaaacaattcagaaactgaagctagactgagttgggtaaaatttgctacctctaacagaacaactaatttctgtagatgctttgttgaaatggcccctgcatccccttccccaccaccttgatatctagttagtaagagtacttcccagttaggacatagcaaggaggagctttaaagatgaaaaacaaaacaggacatttttaggcctttcatcactagtttatgtgccagcaatatttcccattcacaaaggaaacaatcattgagatagtctaatctttaaggacaatggtgtcagatctcaaagcagttttatcaactgatacacagccaaaatgttttaattctctgtaatcattgggatagtctaatctttaagtacaatggagacagatctcaaagcagttttatcaactgatacacagccaaaatgttttaattctctagaaacgctggttactagtaatgtccatcacctcccagcaagtcacatcaggtatccccaaaacaggatatgcggcggaggaaggtaggatgggagagaagacaaaaaaaaaggatttctccatttaataatcagggagagtcaaaggcaaaaacgttaacaataataacaaaaacgcctgttactgtggtgtttttctttccacaacatcctacaccagaggtggctacatttcaagaatggtggaaaaggagcagtctccagtttgtgacatcagtttgcaaagcaatttaagggctgtccacaaggttaagggtttgaagaaactgggcattcctgtaccattatgagaagagtgaacaaataccccagtgctctagtgacgtcccttaagcgtaaatacaccctatgggggcctccatgtccagcttcccaaataacacaattgtttggggtacccaaactacagtataaacaggaagctaaagacagcagcaaaaacatattccaagaactgggttggtgagaaagaagggagggtaataagaggagctgacaaagagcctggaaacggagaggggacgcaagcccacgggtggaggatgggaggctcacccccctcagcgccacatcgagagcccacggggccaatctcctccctacctcccagccggaacaaattaatccttcgcacaccaaactgagggccacatgggggagtttgggggagctccaccccatcgccctccctcccccacgccacccccaaaccaggccggatccggatcagaggaggcccgcagtgggtggaaagggaggaggccctctcctccgcaggcaccggccggggtgaagagagagccctacctcaggcaaggcccaggcctcgctcgctcgcgctctttctcgctctcccctctcaggctctagccgcatggcccccccttcctacggctgctccaagccccgccccggccacgctcccaaatcgaggccccggctctggcgcggcccactaggccgcgaacccaaccataaacaaaacctccgggggccgactcgaggtggggggcgccagggctcgcatgactcgggggggggtgtacagtgggggaacacacggtgtgggggggcctaccgagggaggggatacggcgggggcaggggagaaaagagggagggtaaaagggggatcgcggatttaaaggggccgcggacaatacccggccccgccgcgctgccgctgccgccgccgccgccgccaacgccgctgcgctcccaactttacctcagtctcctccacactgacaccccgggccgcgccgcccctgtcacgtgatataagattccctcttccccaccccctccctccttttccctctcgcgctcgctctcgcgccttcccccgcccacttgccttcctgcgtccctcagcgcgtgacgctaaaaggggcgcgcacgcaagcgtgcgcgtgccgcctcgccacgagacacctctttccggctccgcgagtccaccccgcctccttcacggcggccctgcctccaccacgtgacgcacggatggccgccgcttcctcttactgtcgtagttccgcgtctgagcgctcgacgctcctgggtgccattgcctgcctgagtcacgtgtcagggggaagctggaaggcgtcgttctcctttcccagctctcctgcctgtccgccatgttttcaggccgggtctggcttggtcttcccccgtaaggaaatggccggggagctccaggggacccaggcgccgtcgcttcggcggagcctgggctgaccagccaggacagcggggtaaacccgaacaattctg

SEQ ID NO: 2776 - DNA, 2300 bp, Homo sapien
agcaagtaagtaacaagattcttcatctccagtgtgatagctgggaatgggtctgcttgctactaattctgtgccctcaagtgatccattccagatcacttacttttgacctgttgctcagtgttgtcactactaggtggtaaaaattttcttagtcacatttcgaagcacttgtaagagggaaatgttactagcaagagtgattaggagaatttttttctttcttggttaattatatctttcaagatgactttttaatatgtttacatctgactggtacagtatatgcaatagtgtatagctagtcatgcagtttatacctgcaatataacttatcctcacaaatagatatcacatgtggagtagaaaacagtcaatatttgtaagttacagtagtgggttggaaatgactatgccatattagaaacttcatcttagagccaattttaaaacaaaatagttttcctctcgtctttatatatatacgtatatatgtgtatatgtagtcttgttgatttggattcggggtacttggttaaacattttttttttttgtaaagttgaaacgactataatgctaacctgggaaaatgggctactgtgtagcaaataatcctttctagcttgaaatacttatgggcttttgtgtgccaatatgtgtagggggaagaggtaatgggttaaaaattacctgagaagctaccttaaaaaaatctttcttgatacaaagacctatgcaacctattgacgcaacttggtgaagaatttatgcacagaaaaagtcagctttctctgtgacatccaagaaagtcagatgaaattcacttccctaatagttaatccttgcatatttctttagaagtccttcctcccactcaaatccagtaatatctctgggcagtctagaattacgttgtataaggtttcattaacaagaaaaattaaatatagagcagaaaagtataaacttaccctctttggaagggaataaatgcagagtaacctattattttgaacactctatcatatgattaatgttttcttttttactaaatgcagcagctgagattgtattataaaacaaagtatgaactaaaggaacttgaattcagtagaatccttccttgttagaagtcttgtaacaaaaactatattctggtttggggaaggccctgtgtgttctgtgtctctttaaagactcaactaagtcatcttgccagcattaaggtctcaagtttaaaatgatttcttagaagcactttcttccaaataaaactttgtgctagatgcttttggtttgagacaaatttgagattccctgtatattaaggtgagtggtggagggtaattgccattttggtttcttgaaaatgtggactaggagaccaagagaagcacctgtaaaagcagtgtgttggaattattttccagagaacagagattctggacaaagtcattggggctaatacgtaccctgttgaaggctgtggtttaaaaaaacaaaaaacccccacaaacacaaaacaaacccatagcatactgagagagatgaaacttgagggacaaagaagagtctagacttgaacttgtcctttcccaagcaatggaggtcacatgcagcttacataaaaaaggttgtaaggcaggtaaggctgttttcttaggtgattgaatacagtatttaaaattatttctctggagtgtagactaatctccttcctggaaggtttttgtttccagactttactgattatctttccttctgtcaaaggtacttcagatacttgcatctatgtaaaaggcttttgattattagttaaatgtaaagtctgcttatgggggactagtaaccaaactgctgtaacttcttaaaaaaatccatcacttacacatgctttatacatttcttgttacataaaaatggattaacagccatagctccttaaggaatttatcaagctaattatgttgtaagaataaatgaatcttattgatttgttcctttgaagaagtgaaagtgtttggtggtgaaggtgctgatgagagagttaaaaacatattttgcccacatttaatacctaattttcttttaaatctttcagtattctaccttgtaaatactgttatttgtatatactgtaaatgatgacatcggtgggcactaaccgagcccggggaaactgggaacaacctcaaaaccaaaaccagacacagcacaagcagcggccacaggtaaataatccaaggcatacggattcatggatagcgttgcctgctgatactggtttccatgcagtaca

SEQ ID NO: 2777 - DNA, 2300 bp, Homo sapien
agcggcccaccccatgcctcagcttcatgtctgtcccattcctataccatccccaccctgttgtatgtattataggatttgtattttctccttttttttcccccttccattccttctcccctcttgcattcaagattatgaaactttgctatgggccctgcacttcctttgcttcctcctgttcaccctggtggtgtacggatgaggcggggaggtgggacccccaaacatatatcagcccaacagccctaagtctccttctttattattaggaaaacaacaacaacaacaaacaaaaaaatggcgtcatgaatatgaacagcattgtcagatgaattagttgaagtggttttttttttgttttttttttttttttgtactgtgtcctcaaatttaatggattaatgtgtcttgtatatataaaaagaaaacctctaccttcagcctctgcctattcttgctccgtctaggacatcctcaatttcgtcgatgaccagcttggtgaataagtattactgtaccaactgggcctcctctagcaggcccctgaaggcagtggaataaaatgaaatcttcgccctttaagaactcctgaccttaatgtggtagtagtatcttgtccttgaggggatttccttcccctcacccctaagactttcacaacctggtgactggaaagaaccaccacaaatcttcatttcctccagaaactgctacatctacagccgatttcaggcagtaaagggagagggatagaggagattgggtggaaaatggagaggatcaagaaggagctgagaccatttcaaagaaaaaaaatgctttatagagttttaagtatgacttagatgggtccaggcaaataaactaaaaagaagtgaaggcaacatgtatcgtctggcagaactaaatcttggagtggggtgagggatgaaagactacatattgggtacagtgtacactgctcgggtgatgggtgcgctaaagtcgcagaaatcactaaagaactcatccatgtaaccaaacaccacctgtaccccaaaaacgaaataaaaaaacaaaaccttggggcccattccccctaggaatggactactgtagtagtggcttcttggatgcttctctgtgacatagctatacccaattctttgaaaaagaatctagagcaaggtctggcttggggatggggtacagggagagacaggtctcggagaggttttgaacaaaacacttttaaaaaggaatgaggacaggcgctttgggaggctgggttgggcggatcaccttaggtcaggagttcgagaccagcctggtcaacatggtgaaaccccgtttctacaaaaaatacaaaagtagccgggcgtggaggcgcatgactgtaatcccagctactcgggaggctgagacaggagagaacctgggaggcgaaggttgcagtgagccgacatggtgccactgcactccagcctgggaaacatgagagaaaactctgtctcaaaaaaaaaaaaaaaaaaaaaaaaaaaaagataccaaagggatatttctttataacccccaatttgttccttctcaggactcaactagcttcccttcccttgctttcttaaaaatcctttgtcttgctggttgcagagcctgcttagaaaaaagaattctatatagttataacaaactccctagtagctagagaggtggaggaagttaagtccatgcgtctcttatgtcttgatctcttctctgggaaattcaatactagaaggagcttggaaaagcattttgttcatccctctaacagcagacatcgcccaggtcagtcaaaaagaacgcccgagtaaggagcgaggtggcttctgctgtgaggctggccagccccgcgggtggggtggttgagggacgccctcaagccggtccatttgtgcggctgggctgccctctggcggctttatccgggtgccatccagagtcaaaccctcgaaatcgcttttcgtactgagttggtctgcagaaagaagaacagatttaggaggaaggcggtcataggaaactgaaagtgcgtcacgcccactcccgtcacggaaactggtctctgaaaggtggggtaaagataaagcctttcaaatttgaggaagaccttcggtcccgcctccatttcacgtccggcttaccgtcgtttacgacagtgtcaggatcgcgggcttgctttccggtagcgtgggctgacgcctcgctcaatttctcacagggctgcgcaggtttcccccgtctgcgaatggaccactggaggggttcaaaggttcgcg

SEQ ID NO: 2778 - DNA, 2300 bp, Homo sapien
tacaggcgcccaccaccatgcccggctaatttttttgtatttttaatggagacggggtttcaccatgttagccaggatggtctcaatctcctgactttgtgatcccgccttggcctcccaaagtgctaggattacaggcatgagccgccgcactcagcctgaattatttctagtgtgagatccaagaaccctctcttgggatctggattcagacccctttcctgtaacaagattaggcaccaggagaaactgacacacatggatgatataacagatgcctaaatggatcctatgggggaactggagctggaacagccctttagagttgtcgcaaagtgaggcaaagaggctagacttttatatccctccatcaatcagtgtttgacatgggccccataggagggcatgtaaccttcggtgaggcatctttctgacttgaagggcattgcccaatgagggaggtagctatgtggtatcagcagctggtatttcctacatgtagcgaatgggcatattggctcccaagggggaatctgggtggagcactatagtatccattaaacctagtaaagaaatattatttctttactagtcacacagatgtgcccaggacagtggtagagcccacagggttacataaatcataatggtagccctcaagaacttcataaactgtatatggtattttaaaaagttgcatattgtctgtttccacctactagaacataagctctaggagggcagagactatgttttgttcaccactgtttctccagtgtctagacgtagattctttgaatgcatttaattggagccttgagatatgaagaagtaggatgcggttacttcatgcagagcaagagtggcatgcacccagagaaggccaggtggagctcagcatgagtgtgaaggcctcatgtcaagccatgtcaggggacacaaagatggagtattctctaacctatgtgacactcggcataagggaagtacaagcactcaatatgtgagtttcattcccacagtctgtggtctttagcccagtctttccagatgcctattgagttcttcaagcatccaaatggtttggggtaaggcttcaggttctaaatgagaggctttgtgggttaccagctggagagtcagaaaatctggatttgaattcactcagccatgaaataattgtgtgatcttgggccgggcacggtggctcacgcttgtaatcccagcactttgggaggccaaggaaggtgaatcactagaggtcaggagtttgagaccagcctggccaacatggtgaaaccccgtctttttttttttttttttttttgagacaaagtctcgctctgttgccaggctggagtgcagtggcacaatctcggctcactgcaacctccgcctccctggttcaagtgattcccctgcctcagcctcccgagtagctgggactacaggcgtgcaccaccacgctaatttttttgtattttagtagagatggagtttcaccatgttggccaggatagtcttgatctcctgacctcgtgatctgcctgcctcggcctcccgagaaaccaagtctttactaaaaaatatcaaaattagccaggtgtgatggacctgtagtcccatctacttgggaggctgaggcaggagaattgcttgaacctgggaggtggaggttgcagtaagctgagatggtgccactgcactccagcctgggggacagagcaagactctctctcagaaaaaaaaaaaaaaaaagtttgatcttggggagttctaaggcccactagcctcatctgtagaatggaagcaatagtactactttgcagagctgacttcaggaccaagagatctaatgtctatgaagcggggtacttccttctatttgtcaggatgggggaggctagtcctgtgatgactgggaatgaagggtaaaagagacagaggttgggtaaactccaggctctgtgttcatagcctgctcccagacattctcttgttatctctctgtttcctagcctacacacgtgcacagacacgtagctgctgttcaggaactgagctaatggttttaaagtctgttccttatctttgctggaggcaggcagtagctgtgcagtgacagtgtgcctatgcagacagagggagcagtgaatagcaatagggtgtttccaccatggtcttcactcaggccccggctgaaatcatgggccacctccggatacgcagcctcctggcccggcagtgcctggcagagtttctgggtgtgtttgtactcatggtaggtaggatcactgcgg

SEQ ID NO: 2779 - DNA, 2300 bp, Homo sapien
gtctatcttggcactccccaccatccccaactgcctgtgttgcacaaagccagatgacatggaatatttggatgagagagggcagatggagcacctggcagctgacagggaaccctctgcctctgttgactccaaggttctgggcactgggatgctgattgtggggctcttggccatcctggacagacggaacaagggagtccctgcgggtctggagcctgtggtggtggggatgctgatcctggccctcgggttatccatgggtgccaactgcgggattccactcaaccctgcccgggacctgggcccacgtctcttcacctacgtggctggctggggtcctgaagtcttcaggtgggagacagactctcctggtgctggcctccactcaccttcctctgctaagggctctgtccctgggtccacagcactctgcctttaaaatagctctcttggcttcttaggacagtgttctttctccaagtcatattctccccctttctcccttgcttccctcccaacttttcactgaaacagtaagatttagaggttgtgttcttaggcatgccacattacttccatgcacattagtgacttcatcagcaaaattaatatattcagataattccctaaggcaagaggctggaccaagctctcctggggttccctcttctaaatactatgctttggtgacaaggcaatcctcttcctggtgtctaccaccctgggaacaactttagggcactctcttgttactgccccccgtccttggagaggggaaggctaagggagtcactcctgataccttcccactgtccttcttttgcagtgctggtaatggctggtggtgggtgcctgtggtggcccctctggtgggggccaccgttggcacagccacttaccagctgttggtggctctgcaccaccctgagggcccagagccagctcaggatctggtgtctgctcaacacaaagcctcagagttggaaactcctgcctcagctcagatgctggagtgtaagctatgattaggacaaccctcacttcactcatggaccctggagccagccactgaccccgcctgggaacaacagtcattcttcctctttgttaatgtgccagaacctgggaggcttctctgtttatctgtttggcatcccttcctcctaaactaagaaggatcctggacagggagaagtggaggaggataaggtaccaggactcaggcttctcatcccctcctcccgcaaagcggttttctgaccctcagggcctctcggaatgtagttgctcgaggtaaccgctagagggtgcgcacctggatgctggatggggacggctgcgggcatctgcagggtggagggggccaccatccagtgtagggcacaaccctggggactgccctccatagcctgtcccgactgccgactcctagctctcatcgcctcggcgcctcccaccttcaccctctcggggatgcctccccaagagggtagttaggggtggggaagccgcctccacccagggggcgtggtgggggcggagggaaggagggcggcggggcacagagacagagagcaaggctgtgaaactgaggcaccgttcctagacatctcggtgctgtgtcgttcattcaaggagagttgagatacagtgaaatgagccagggcgaggagggagggtgaaggaacggagggcgggcggctccgaggagcgagagtcgggctgagggcaacctggcgccagggaaaattctggttattcaccacttctacagctctcctgccgctccctgcagaggatgctcgttttgcagagaaggcagtgttcctctattcccttcttccgaattaaaaataccccctcagagcgatctagcctcccgaattgttttttcttttaagatgcggatggacgtacgtgtgggggcatcccagcccagccacgccgaggctcggaagggctaagaccctcccactgccccgcacaaagatggctgctccctcctccccgctccttctcccctccccaaaaccccctcccgccccccggcccccgccgccggctccgtcacttccgccccgccgtggccgaaactgacacaaagtagcgggccgaggccccgggggagcggggccgcagctgggggggcgggagcccgtggggagccgagccgagcgccccccgccccagcccccggcatgggcagtacggggccgccggggcgggcgccgagcgctgagcgctgaggtgaggcgaggcgaggcgaagcgggggcgcccgggagcgcggggccagga

SEQ ID NO: 2780 - DNA, 2300 bp, Homo sapien
gaggtgaggcgaggcgaggcgaagcgggggcgcccgggagcgcggggccaggagggcagagggagatgcggccgcagccgcggggctggaggggccggggagcgggtgtagactggggagcaccgggggccaagatttgggagctgcggccagacggggcggggatggcggccgactggagacgaggggctgtcgggttcccggggacggggcagagcgggggtctgcgtacaggatgggaggatggggtgccgaaggggcgcgtggagagcaggagagcggcgcgagtgccaaggagaagctcgtgcagccttggccaggggagacccgcccagagagttgttgggcgagaggagtaaccgggacccgagggtttggtgcctggagaagggagtttgggctggtaggctttgtctcagtaaggtggaggtctatgcctgaggaaaactgagggtgtcaggaaggggcagtagctctgggagatgatagctgtgccgggagccctgagttctgtccttggtgagggaaggtggcccgagctcgtgttggtggccagtgagctggaggtctcgagttccatttcctcctgtttccctgacctgccatcctcctctgaaagaagtggccagcctttggggctcttgcttgtaagggagcagggaccggacctataggaggagctgttttcctccatggagcattgcctgcttgccggggctggctatttttatcccaaatgtggccgagagggggctggggctgggtgacggggcagggcaacgtggctgatgggcctgacctgctcagaaaacccaggctgtgtgagactaagaaggaaaagtgagaggggatcccagttcccaggtctctcctctcttccccttggaatgatggcccccccagaggggatgaggtctggggccaagcctgcttccagtctccccagggtctcagaggtagaacaactttcctggtccatatccagactcctgactcctgatggcgtgtgcagctcctacattaactctttcatgggactcaaactcagatgtttaggctgatagtgtttcttgatcccttcctccccaagggcggggctgcctgtagaacttgtgatgcccactcttgcatcctttaacctctccctgtgctccccaccctcccgtgactcatactcagactgggtggagaccctggctgggggccctggaggagggcttggcatctctaaaatatggatgaggtttttcttcctgagccaggcaccctggactgccatagttggagaaggtcagggatgaaaaggacttctggctttcaggattgcctgacttggtgtaagggcgggatctgagctagcgaagggagaactggtgtgggtgactgggttgtggccagaatctgtaattatagagcttagccagacaggcaattagtatctcttggggctgacaggttggtggggtgtgcctggtaggctaaaggcagagggaaccaaagaggatgaggaggtgaaaggccttccacccagacaaggaaagaggaggtgactgactggcagtttcctttgggccaggctggggagtaaggatgaggctctgccttgtaaggccaggccttgaaccttttaggagaaaggacatgggaaggcggaagcaggcagaggcttgtctcactggtgctccctaagcctgcaccctgtgccatactgactggactaggcttggggtgggagggagggaggggcaaactccccaccagggttgggaagacccctctgccagcccagaagggtggctgacccaggctgaggggaagctgtttagggactgtctgtgcagaaagtgagggccatgcctctaatgtgagctcccctggaggaggtgataatggaagccctagtaatggggggtggggatggcagggaacttataagcctttcgagaagggtggagcctgcccaccctgtttcctgatgccctgccaggtgtttcctggctcatgttccctccaccccaccctttggggaaactgctttctagtaagcacaagcactactcattgccgccagaacacatgagagcctccattgtccctgggatggataccttgagagctgttccccttttttcaatatctggcctcttctcctttccctacaggcatgggcttctgtaaagtctcagccccccatgtcacccaaggcaggggcatgatgggaggtggtggggaagtcccctctttcccaggaacccatcatggcagtaagaggagagactgggagaaggaggctgggggag

SEQ ID NO: 2781 - DNA, 2300 bp, Homo sapien
atggcgtgtgcagctcctacattaactctttcatgggactcaaactcagatgtttaggctgatagtgtttcttgatcccttcctccccaagggcggggctgcctgtagaacttgtgatgcccactcttgcatcctttaacctctccctgtgctccccaccctcccgtgactcatactcagactgggtggagaccctggctgggggccctggaggagggcttggcatctctaaaatatggatgaggtttttcttcctgagccaggcaccctggactgccatagttggagaaggtcagggatgaaaaggacttctggctttcaggattgcctgacttggtgtaagggcgggatctgagctagcgaagggagaactggtgtgggtgactgggttgtggccagaatctgtaattatagagcttagccagacaggcaattagtatctcttggggctgacaggttggtggggtgtgcctggtaggctaaaggcagagggaaccaaagaggatgaggaggtgaaaggccttccacccagacaaggaaagaggaggtgactgactggcagtttcctttgggccaggctggggagtaaggatgaggctctgccttgtaaggccaggccttgaaccttttaggagaaaggacatgggaaggcggaagcaggcagaggcttgtctcactggtgctccctaagcctgcaccctgtgccatactgactggactaggcttggggtgggagggagggaggggcaaactccccaccagggttgggaagacccctctgccagcccagaagggtggctgacccaggctgaggggaagctgtttagggactgtctgtgcagaaagtgagggccatgcctctaatgtgagctcccctggaggaggtgataatggaagccctagtaatggggggtggggatggcagggaacttataagcctttcgagaagggtggagcctgcccaccctgtttcctgatgccctgccaggtgtttcctggctcatgttccctccaccccaccctttggggaaactgctttctagtaagcacaagcactactcattgccgccagaacacatgagagcctccattgtccctgggatggataccttgagagctgttccccttttttcaatatctggcctcttctcctttccctacaggcatgggcttctgtaaagtctcagccccccatgtcacccaaggcaggggcatgatgggaggtggtggggaagtcccctctttcccaggaacccatcatggcagtaagaggagagactgggagaaggaggctgggggaggggcagggtcagagctggagaagagggtcttcaaaagaggtctcatgaggggagggaagggttatcctcagcttcctgacctcattcgtctgtcacttcttgcagggtctcccatgggattgctgggatcttgctgggtgagatggcagtgtgtgcaaaaaagcgccccccaggtaagacaggcaaggaggggagatcccgggaaccatcaagagtgggtgttgttatggctcagggagcaaaaggaaaagggacaactggtatgggtctgagggagggtagcttacagcagcccctacccagcttgggggcagcctaggaaaccgaattcttccgcttgatcccaaagctgggttatctgccaggacagcgcagagcaccagccccacgccccgaaacacctgcagtcttatcttcgggcacctgcagctcctgctttctggcctagggagctgtgttctcatctctgcttggtcctctcaccccttccctgctcccctcgtttttccatctaccggttctcctggtttttccgcgggcgggggtgtgtgtgtgtgaaagcggttgcccccgacaacgccggcagtccgctcacccgcattggcccggcccgggggtgggaggggaggcggggctcgcgcgcgagctttcgcctacgcggcgcgctggcaggctgcggctcctgcagtcggggagcgggcgggggcggaaccctgggcgtgctcggcgtgtccggggccactcagcgcacgctggcatccgccggggggcatggggggcggcggcggcggcgcagctgagctcgcggtgtccccgagcgccggcggccgggaggatggcctgggctgcgggtggggcgcgcgcccgacggctggggctcccctctgagcggctgcggctcctgcacctccccggggagccgccccgtcgatgccactaaggccaaggacatatagacggtctgccctcccccactcaaaccgggatcatgacggtccc

SEQ ID NO: 2782 - DNA, 2300 bp, Homo sapien
ccttcaggctctccttgccctttcccacccaggtttctgtgcccaggtgtcttctccgttcttgtctctccccaggcggagggcctgcagcgaaggcccatgtgggtggggcacctcctcttcttcccgacccaagcctcacctcttgtcccctgtgcagtgtggaggtcatccgtctgggccacagctacttcatcaactgggataagaagatgttctgcatgaagaagcggacgcctgcagaagcccgcaccaccaccctaaacgaggagctgggccaggtggagtacatcttctccgacaagacgggcaccctcacccagaacatcatggttttcaacaagtgctccatcaatggccacagctatggtatggtggcaccactggggactgggggcttgcacctcgcctggaaggacagtggaactggggccccacagtttccttaacattggttttttcttccttcctagttgggtctgaggggcctagaagaaagggtccatcctggccaggcacggtggctcatgcctatagtcatagcactttgggaggctgaggtgggaggattgctcgagcccaggaatgcgagaccagcctgggcaacatagtgagaccacatccctacaaaaaatttaaaaattagccaggtatggtggcatgcacctgtggtctcagctggccagtgactcaggaggctgagatgggaggatcacttgagcctgggaggtcaaggctgcagtgagccatgatcttccactgcactccagcctgggcgacagaatgaggccctgtctctcgagaaaaatccacacacaaagaagaggtccattctgtgtcccatgtcaagaagcagatcctggctgggcgcagtggatcacctgaggtcaagtgttcgagaccagcttggccaacatggtgaaactccgtctctactaaaaatacaaaaaatagctgggcgtggtggcaggtgcctgttttcccagctactcggggggctgaggcaggagaattgcttgaatccaggaggtggaggttacagtgagccgagtttgcgccattgtactccagcctgggcgacaagagtgaaagtctatcaaaaaaaaaaaaaaaattagattctgagagtcctccccttgtcctctcctgatgccctgaccctggtctcagctccaggaattaggggagctccttggctgtttgaagtgagacactggcctctgggcatcctggccaggcggaaccctgctagactctcccctgttgctgctcagggtccttgtgagtctgtggaatgtggctgtggttggacttcccagtgtggcccgtggctgtgctgctgggatggcctggggcagcatgtggggctgacttttatgcagagtgtggacccctcttgtgactgctttctgtactgactgatgcctttcggtcagtgtctgagccttgtctgctgctcaggtctaatgggtgcaaggaggcctgggaggtgtggaattggagctgccctgaggggggtgccgcctagggtagagacagggatggtgagcagtgggtgccggggctctttcatggccaggccttggggttctggaatctagggtgcctgatgcctcctatcccgcgagtcagcaatgtgactgagtgactcacactgtgacagctgctcagcgattagggttgaggggctcagtgcctacggggattctgcattggagatgtttttccatgctctggagctctctggctctgacattgcttctttttctgccctggctgtatgtaggtgatgtgtttgacgtcctgggacacaaagctgaattgggagaggtaagattcagtctccctaattctatgtgccagtgaaacagggtgcctggccagtaacagtgtagtcaggagtgatgtgttgtctggataggaaatggaagctgcttggagaaatgggtgttttaaggcagaactggtgatgacggaagtggaaattttgaggtccaccgtggacaggagcctactgagagttgggagggcagggatgaacccttccccgggatgcagcctggcactctagcctttcctaagagccttcttatgtgtttcagaggcctgaacctgttgacttctccttcaatcctctggctgacaagaagttcttattttgggaccccagcctgctggaggctgtcaagatcggggacccccacacgcatgagttcttccgcctcctttccctgtgtcatactgtcatgtcagaagaaaagaacgaaggtgggccgaggagccggctcgcactctcctga

SEQ ID NO: 2783 - DNA, 2300 bp, Homo sapien
aacggccattgaggacaaacttcagcaaggggttccagagaccattgccctcctgacactggccaacatcaagatttgggtgctaaccggagacaagcaaggtgagagcccagcagggcagagccagttgcaactgacagtagccctgttggacccttgcatggagccgaggacatcaggcaggcaagtgtgctgaccttgttgggtgcctgtccgtagctcctgcgttctctcttggtagagacggctgtgaacatcggctattcctgcaagatgctgacggatgacatgactgaggttttcatagtcactggccatactgtcctggaggtgcgggaggagctcaggtaaacaagaagcccaggggaggcggtgctgtgcgttgtgcccagggctcaggtgggggtttctggaccatttagacttgaatccctgctccccactgccgttctggaagaccacaaccgtatcatttccacctcgacaggaaagcccgggagaagatgatggactcatcccgctccgtaggcaacggcttcacctatcaggacaagctttcttcttccaagctaacttctgtcctggaggccgttgctggggagtacgccctggtcataaatggtcacagcctggtaggcatcgctatccttagcttgggcagtatctttccagtgagcacttctgtccagggcttttatatcttgttctaatttcccctgatttcagagaagactggtctcaaaggggactgggaggagctgagactcccaggtgtctcctggaaagactggctctctcaggtttctctgtgctccaggcccacgcactggaggcagacatggagctggagtttctggagacagcgtgtgcctgcaaagctgtcatctgctgccgggtgacccccttgcagaaggcacaggtggtagaactggtcaagaagtacaagaaggctgtgacgcttgccattggagacggagccaatgatgtcagcatgatcaaaagtgagtgtgggctgtgcaggtgtgtaggctgggcttgaggctggggaggggcccactgaggtctctggactgcagaagaatgacgggaagggggttgtaacttggtaggctctaaagtgtgtggccggtggccatcttcaccctcttgtcatctcttgtctctgcagcggctcacattggtgtggggatcagtgggcaggaagggatccaggctgtcttggcctccgattactccttctcccagttcaagttcctgcagcgcctcctgctggtgcatgggcgctggtcctacctgcgaatgtgcaagtttctttgctatttcttctacaaaaactttgctttcaccatggtccacttctggtttggcttcttctgtggcttctcagcccaggtaataaatgttcccagtccactgttgtgcaaatctgtaaacctgagggcagaggttctgtcttgtttatcactcagtcccccagggcctagctattttctggtacatactcttaaaaaatgcttattaaaggaggagagaaggagcctcagaaaatttcttagggttctctgtatgtgacatcagctgtcttcctgtgcctgatgtgtagcaaagaaaggttgcatgctcccttgctccctgttctcttccagaccgtctatgaccagtatttcatcaccctgtataacatcgtgtacacctccctgccagtcctggctatgggggtctttgatcaggtatgggggagtttgatgatcagatgggatgcggggaaggtcactgcttgaaggagtcacatagacgtggtgtgtgacacttgtgcccatttcctgtggccactgggaaggcagttctttcagccggggaaggtgtggctggttctccctcctggctgcagctgatctagaactctcttgggttgctgaactaagttagtctgggggtagctggcttgaggttggttctagctgccaaagactttggaaaggaggaggcagggacagagtcagagtctgcccttggtcatccagggtcaaaacggcaacctctgaggccccctatgctacatggtcctcccacacaggatgtccccgagcagcggagcatggagtaccctaagctgtatgagccgggccagctgaaccttctcttcaacaagcgggagttcttcatctgcatcgcccagggcatctacacctccgtgctcatgttcttcattccctatggggtgtttgctgatgccacccgggatgatggcactcagctggctgactaccagtcctttgcagtcactgtggccacatcct

SEQ ID NO: 2784 - DNA, 2300 bp, Homo sapien
caccatgcccggctaatttttgtatttttagtagagatgtggttttaccatgttggtcaggctggtctcgaactcctgacctcatgatctgcccaccttggcctcccaaagtgctggaattacaggtgtgaggcaccacgtccggcctggccaggattaaattttttcatgtgaaccacaacactaaaactttgtatattgctgcgcttatcttacaaatcaggaaataggggttcagagaagttaaatagcttgcttaagtcacacagccagcaagtggtaaagctgggatctgcatgactacagagcacacaggctccccaccagtagattagagagggggaggtctgctttggtgcagagacaggtgggatctgtgatgcccgttcttggtttcaacattcttttaaactctcctatctgagcctaggactttctgcagccttcctgttttaggctggcagctcacagtccctctctggttattttcaggtctgtgtgtgccacagagaggaagggggcaaccacagtgggaaccgctttccagccctgctgcaaccccttttgaaatagcaggcgagagggctggtggcctccactgtgctcttctgttcctgtctgtgggcatggctaaagcaaacaagctcacccacaccagctcccatcgtgcggtggatcagtgcatgtgcttggttctgtctggcactgctgatgggtggttcctacagaaagatccagatgcacggggtctgaggactgtttcagaagctctgtccgtccatgcctggccctgtccacttgggagttccattaggccatgcctgttccagctgtcccaggatctttgatctgggttaggattggcctgaaaccaaaggtagaaaaacacattctaatgagcagttgctggtctagaagcttctcagcctaaactttatttcagcatttttctttccctccagattcagctatgaggccatcctatcagctttaggctctgtgggggtccttgagagagttcccctccaagggacggacagatggtccccttcaaggtccttgtggttgctcaaaagccaggtgcttgtttctttctttttttctctccttcctttccttccttcccctctatccctccttccctccctccctccctcctcccttccttttctttctttcttttctttttttttttttctttccagacagggtctcactgtcatccaggctggagtagcagcccccaatcacggctcactgtaccctggatctcccggactcaagcaattttcccacctcagcttccctagtagctgggactataggtgtgtaccaccacacccagctaatttttaaatttttttatagaaatgggggtctcactttgttacacaggctggtctagaattcctggactgaagcaatccacccacccggctctcccaaagtgttggggttacaggcgtgagccactgcccctggtgttagtgtctgtctgtcaagtcaggagggcagccatgaacgttctgatgtctactgagcacgtgtggcccagaccgtgtgtcaggtgtttaggtgccatccacagaaccttcctaataaccctgggcagcataggctttcttatctctgacagatgaggaaatggagactcagattctgaaccgaagtcacagacacagtagatggtaggtctaaatggggacccaggtctatctgactgcaaagtccaaaccgtttccttgcctctgctgcagcctgcgaggagcagctgggcagaaagactgtgcctttacggtggtgagtcttccgatgcccaagcctcaccccagaccgatgaaatcagaatctctggagacccgacccagacattggtgggttttagggctcctggctgattccagtgggcaaccgggctaccaagcactgttttaccctaagggtaagaggaacatcgcctcctcgagggctctccaggtgtgcctttcacagcgtaatcccgttcacgaaaccaaaaatcaaaactaggccactgcccactggtggctgatacgcccttttctcatcaacagaaccgggaggaagggctctggtggggctggcggtcccctgttctccccgctcaggtgcggcgctgtggcaggaagccaccccctcggtcggccggtgcgcggggctgttgcgccatccgctccggctttcgtaaccgcaccctgggacggcccagagacgctccagcgcgagttcctcaaatgttttcctgcgttgccaggaccgtccgccgctctgagtcatgtgcg

SEQ ID NO: 2785 - DNA, 2300 bp, Homo sapien
tctacaaatacccagtgaggggagtatttgtttaccctggctgctgagggctggagatgagggtcagggtcaggatcagtgtgcctgctgccttgggatcttggtcctcagtcagaggaacttcctctctctaaccaccccctaccccaagccagacaatctgttcacgggtagttggtacccagtggcccggtcagagtctggggtttctcagcccttctcaggatttacccatgaccattttcaggctccttttagggtggagtctgcatagctgatcctacacaggcctcacaggctctacaccgactcaagaaatgtttgctgcaatgaataaacaagcagcaagccaaagcaaggagagatttctggcaacagagagcccgaagcgggagggccttcattcagttcctcaatgacaccatttaggcagccgtcctcaaacctgacagtgcctaagaatcacaaggggcagtttgtttaaaaggacatgccccaggcctcactcctaggtgttcttatttaataaatctgggttagggttcaaaaatcatcatgtttaccaaagccctcccacccagcacacacaccagatctgatgctaggctcagaactaagcttttgagaaatactgatttagggtgaggctaggcacgtgtgtgggtaatgggggcaggaagaggtgccctagaaggaaattcagaagctgagatagctctttgagatacttaaaggtatacatacttcttttgtgtattttcttgcattgcagtaggaagagggaacttgagtcacccaagtccagccttccagcaccagagtgttggaaccggcagaagcctaagtcccagctagtccaggcccttagacaacgagtacacctgagaagtcctggcagctccagggtgtgtgggcggcagctgatcccgaggaaaacaaacctctgggctctaagagccccgcaggctgtacctgcggatttcccctctcagccaactccagcctctgctccccctctgctcctcacttctctaaagcgaaacatctcacagtcatttgctccatgcttcctgtacgatttctttatttttactctccagtttgtgggctgagtctgtgtgggtgtgggagaggggctgggtatttctacttctctgcattttccttctgagctgggaggactttcacttcctccccagtctctcagttctgcctttcatgggctgttcaggccatgagaccacctctcctaatccttcctgagcaccagggaaatggaaaactgactgtaactggctgccctggaagggcctagcatccactcaggagcaacaggtggtggcaactacagcagtaacagtaacctccctggggcaggagccttgggctggcgtgacagcagcagaggcagccaagggagccctgcttgctcctgaggccatccgagccctggaacctgtcttgcatccctctaacaccaccatgggcaagcctgggcctccacttccctccctcagccttttctgtcccagcactcagccagacaagagtgactctcagcttgccccaatgcccccagctctgcctgctgatctagttctatatttgagagtcttagacatctaccacactggagcacagagccacgggaggggttggcctccatcaccggggcctgacaacctgccatcccgccatcccaacctccctgaacctcagtctcctctttcaaacaaagttatatgtagatacagtggaggattagaaaacattgaatgggtgccccaatcaacagtgtctgttactggcaggagttataaatgtgtattgaaaatggaatcccttctttttttcttccaatcataaggaccacaaccatccaaaaagcaaagagagcctcagacactccagctcagcctctagttgcagaaagtcacctcctcaaagggagagatcagtgttcacctaggactggaattcagtgtgatctagtggttgaaagtcttagccttcagcctccccagcctgtcagctgttccagaagcctgtcagctgccccttagttttctgctgtgtcctcaaagaagcactgggaccctaaaataaacctctggagagccagttgcccaactcttccagaagagagactagacacgcagctgggcatgcggccagagcccaagaaaagcctggtttgccaggggcagattacagtcaacgggagcagtaagtgcctctgccctctccctcacgggtccttctcttttctagaggggagtccagcacgtgccagccccagg

SEQ ID NO: 2786 - DNA, 2300 bp, Homo sapien
tgctgagttagattgtaaaggattgcaagatcgccaggacaccggtgggctcaagacagtgtagtatgcagggaactgccagaaattccacttggtcagagcaaagaattggattatggggagatggggcagggtagtgttgagaaattggggagaaagacagtgacctactcatgtaagcctcccatgccgttctcagtgttcttcacttcttaagtaaacagtcgggagcttatgaggtgttaagagatgaggtatctgcatatagaaagttcctccttgactatgaccaggtagaggatggtttgaaggcttcctgatgggcgtttagaagagccacaaaatgacatttctgttggtctataatatagactctgtatcaccagctctggttgtccagactccagccatctctaactctggcaaggctccttgaccccaggctgctcaccaccctgtactgctagttccttctcactgtggctggttggctggttagatagctagtggttggttggtttgcatatggttttttccatctatttttatgccccatttcagactatacctttttgatttactctatcctgtacaccatggttagagttaccttccagtgaaacacaaatataattgttattccccactgaaaaaaaaaaaaaccttataatggttttgttttacatacacaaccatctaaactttgtgtccttacttttaaaatgtctacaccttggcacctggcttgcctatgcttccagctgcttctcccattacccattgcctctctcctttgtggccttctggcctttagacccatctctcagctccccattatggaacaagccctctatcgttcccacctccatatcttcactcatgcagcttcctctactggaaatgaccttctctatcaaagtcaactcatcttccatttctcttccacttggagtcaatccaagtgtagtggctaagagtatagcttctagagcccaacttcctgcttctgaatccaggctttggcacttactggtttagacaatttccttaaactctttgtgcttcagttttctcttctgtaataatggggaaataatgatatcccataatcttagagtgattgtgaaagttactagacacttagaatagtgcttcacacatggtaagccatcgataaatgttagctgctgagttgttattactggttttccctataacacttcttttactttgatttatcctggagttattagcccaatacatattattcgtgaatgtgtctggcttcccccagtttattgaaactgcataggagtcaagaactctgactaatgcacataaatgctttcccttagtgtatatgcagcaatgctttgaatatccagacagtgcctgacttactgtggtttgactataattttcaacctttacagtggtgcaaaagtgatatgcattcagtagaaattgtacttcgagtcacatacagccattctggtttttactttgagcattcagtagatcacatgagatgttcaaaactttattacaaaatgggctttgtgtcagatgatcgtgtccagctgtgggctaatgtgttcgtttaaggtgggctaggctaaaccatgatactgagtaagttacatgtattaagtgcatttttgacttgcagtcgattttattacaattcttttatctgggcttcctgacaagatgtaaaaactttgaaagtgagctatactcagagcagacaccagaacctggaaatgaagcaggttaccctgaggccactacttacaaactgcaagtggcaccctggaggtgtgcttgtcttcagatgtaatctcccaccttaaatgtggatcccattatctgactcaggcaactggagggaagaagttgtaggcaccttcattttgcttttgtaacacagctgagaagtaatcaacctatcagggagcaatcttggagttatctgccaccttcacccagacagacagaggtgctgaggcagttgggttaatgaccaggcttttatggcatctttgctttcaagacattgtgtatggtgtgtgtttttcagaaatggtgtgtgtttttcagaaattagacgacggggttccaaagatcccctggtgaaggctctccagctgcttgacagtccctgtgaacccgcagacggtggcctgaaatcagagaccttggccaaaagacggagttccaaggacctcctggggaagccgccacagctatacgacactccctacgagcctgcagaaggggggcccagggcagaggggaag

SEQ ID NO: 2787 - DNA, 2300 bp, Homo sapien
gtcgcccaggctggagtgcagtgacttgatctcagctcactgcaacctgcgcctcccgggttcaagcgattctcctgcctcagcctcctgagtagctgcaaccataggcgcgcaccaccacgcccggctaatttttgtatttttagtagagaccaggtttcaccatgttggccaggctggtctcgaactcttgatctcaggtgatctgcccgcctcggcctcccaaagtgctgggattacagtcgtgagccaccgcgcccggcctcagaaagcttttaaagggcttcgaagggagggaggaatggcagaggcgtcttttcccttaaagtggccacagttctgcacacggcactccccgcccgcacaaatccagactaggagggccgctcccaaccggcgcgagcgagcgacggccccgcgggaacagcgacccctttcccccatcagtcgggacgagggcgtttcccatggctgcctgccgacgcccctccctcccaaccctcgcctggcatcccgggacctggggccgacaagccatacctcgtctcgcgggccacgcgcgtgcacctgcgatcgcgacgcccagccttcgcgccttctccctccgcgctccgccccctctgagcccgggggcacggggcggggcttgccggcagccaatccccggcggccacggcgggaagagcctcgcgctgcccaggaccgtgtgccaccgaagagtaacggaactagcgcaggagctggcgaccgttgtccctgcgcccggacctcgggccgcaacctctgccctaccgccaaaaataacgtctgcagaaagagtggagtagagcggagtgggtgggcgaggggcttccttcccgggggtgagcggcgcacgtgacactcctgggcgcgtgtgaaggcagcgcccggccgagaccggctcggtgcagacgcgggctgtcggcggcagaagggggctctctgctcagtggggcgcggccgatccgcacgtgcggccgccgcccctttctccagagctcgcagcccgacccgcctctgccatggcgctcaccccgccgcccccagctctgggcaggaggtggcggggctgggaggcgccagccgcggaggggaggggcgcgcggagttgatgggccgctcgccgtccgtccaccgtctgtcgctgcgccggggatactcccgccgcctccgctcggtcctctctggtccctgggagcgtgggctgggccgcagggggcttccgtgggcctggcctctcccaccgcaggaggaaagagcagggggaagcccccggcgcccgccgcctccgagagccacggtgtcctcgggccgggcaggcgttgaagacgagcccgggcggggccccccgcgcgtcgtgcctgtcgcctgccgtgtccggagcagaggctagcgcccgcccgctcggcgccccgagccgtgagaaccccaccctgccgggcgtgggcgacggccggccgggggcgcacggagcagccgtcgcggggcctcgccgcggcctccagcgccccagtcacggggaatgcagtggtccccgacccctggcgcctctgcgtgtctgggctgggcttcctcgctcgcctgctccacggccccgacgctcctgggccgagccggccggggccccctcatggcggccaagtggttcaaggagttccccctgaacctgaagaccgtgtcggagcgggccaagcccgggggcggcggcggcaaattgcgcaagaactcggaggcgggcggcgctgggccgggtcctggcaagggccgcaagaactcggcggccgagctggggagcggcagggccggcgtcggccccaaggacagccggctgtcccgcgacagcctgcagggtctgattcaggccgccgcgggcaagggccgcaaaaactcccgggccacggaggaggagccccaccggggtgcaaccaagagctcgggctgcagcacctacatcaacaggctcatcaaggtggacactcaggagaagaacgggaagagcaactaccccagcagcagtagctccagctccagctcctcttcctccgcgtcctcttccccttcctccctggggcccgagctggacaagggcaagattattaagcagcaagagacggtaagaatacagcctcccttggaccacctctcagtcgaaggggagccctgggcgcctgctaagccctaggcttctttagacctaagaggcagtgaggataggtttcctaaggtcctttctccctccaccatttgggaattcctgaccatttaaaattcttagactg

SEQ ID NO: 2788 - DNA, 2300 bp, Homo sapien
aaacgaatgtagtagtaatacatgctatacgacctggatgaatctgaaaaatgatgctaagggaaagaaggccacatattgcatgattccacttctctgaaaagtcctgactagacaaatctatatagacagaaagtagattagtggctgtctaggactgggaaggcggagagggaaatgaggagtgactgctaattgacgggagatttcttttgggggtgatggagatgttctaaaattagattgttgcgatggttgtactgtaaacacaccaaatatactgaaaacacttgaggtgcacacttaaaacaggtgaattttatggtatgtgaattatatctcaataaagctttaaaaaaatgtcactacgcattttcaagaacgtcagtatgagcacgcatttcttcattttagctttcccacctcacaaaccaccacccacacaaatgaggccgtccacagtcgccatcattctgtttccattgtatatgaggactcagtgttggtcagccccttcagcacatttagtttgctaaaccaaaagatttccgttcagtaaactaagtttaaatttctttttttaaaccagaaaggtgtttttttgtttgtttgttttttgtctttttgagacggagtctcgctctgtcgcccaggctggagtgcagtgacttgatctcagctcactgcaacctgcgcctcccgggttcaagcgattctcctgcctcagcctcctgagtagctgcaaccataggcgcgcaccaccacgcccggctaatttttgtatttttagtagagaccaggtttcaccatgttggccaggctggtctcgaactcttgatctcaggtgatctgcccgcctcggcctcccaaagtgctgggattacagtcgtgagccaccgcgcccggcctcagaaagcttttaaagggcttcgaagggagggaggaatggcagaggcgtcttttcccttaaagtggccacagttctgcacacggcactccccgcccgcacaaatccagactaggagggccgctcccaaccggcgcgagcgagcgacggccccgcgggaacagcgacccctttcccccatcagtcgggacgagggcgtttcccatggctgcctgccgacgcccctccctcccaaccctcgcctggcatcccgggacctggggccgacaagccatacctcgtctcgcgggccacgcgcgtgcacctgcgatcgcgacgcccagccttcgcgccttctccctccgcgctccgccccctctgagcccgggggcacggggcggggcttgccggcagccaatccccggcggccacggcgggaagagcctcgcgctgcccaggaccgtgtgccaccgaagagtaacggaactagcgcaggagctggcgaccgttgtccctgcgcccggacctcgggccgcaacctctgccctaccgccaaaaataacgtctgcagaaagagtggagtagagcggagtgggtgggcgaggggcttccttcccgggggtgagcggcgcacgtgacactcctgggcgcgtgtgaaggcagcgcccggccgagaccggctcggtgcagacgcgggctgtcggcggcagaagggggctctctgctcagtggggcgcggccgatccgcacgtgcggccgccgcccctttctccagagctcgcagcccgacccgcctctgccatggcgctcaccccgccgcccccagctctgggcaggaggtggcggggctgggaggcgccagccgcggaggggaggggcgcgcggagttgatgggccgctcgccgtccgtccaccgtctgtcgctgcgccggggatactcccgccgcctccgctcggtcctctctggtccctgggagcgtgggctgggccgcagggggcttccgtgggcctggcctctcccaccgcaggaggaaagagcagggggaagcccccggcgcccgccgcctccgagagccacggtgtcctcgggccgggcaggcgttgaagacgagcccgggcggggccccccgcgcgtcgtgcctgtcgcctgccgtgtccggagcagaggctagcgcccgcccgctcggcgccccgagccgtgagaaccccaccctgccgggcgtgggcgacggccggccgggggcgcacggagcagccgtcgcggggcctcgccgcggcctccagcgccccagtcacggggaatgcagtggtccccgacccctggcgcctctgcgtgtctgggctgggcttcctcgctcgcctgctccacggccccgacgctcctgggccgagccggccggggccccctcatggc

SEQ ID NO: 2789 - DNA, 2300 bp, Homo sapien
aaatttgcatgtaaatataatataaacatgaagactgagaaaaatgagttatacataatgcatttctattttcctaagccaacaaagtgactttggaagatggtataaatatcatttttttccaaaatagggttttccagagaaaaattggttttcatcatggttgtgaaattttataatcattaacactcttgtggggaagccaaggaaggaggaagtattgaggggtgcaggcaggaggtgaaagagctgaacctgaagtgaagccatcacagtgggcagcgagtgcatgtctgtgacctgcaagaaagcatttcagtagggctggaaccagcctagcgcaggcagtcaggagggagtgggcagggaggaaatggaggcattaggtggagacggctctttctacaagtttggcagaaaagagaaaaaatagggtgtagttcaaaaaggcctcagggtggcatagaccttatcataaagcgggggaggttggtgcctctgtggagacaccaacccaagcccgcggagcaggatggggaggaggggatggggtgaggaagacggcctgagggcagactaggagaggagaagggtgtggggaaatgttccgggaagaggaagggaaccatatccccgggcagaggccaggcagggttgagaagcagtgaggaggaggtactcgcaaagctgtggaagtcacttcttcctgggagcataccctgaccacctcctttccctccaaatctggattaaatgacaggccgtgtgcgcccatagccagctgtatgtgcagtgatgaaacggtgtgtttagttaattgtcttgtctgcatcgctgcttggctggtgagcttcactgaagacagggctgtggcctttcttgcctatcctacaaaacatggcacgtacagcacataatagatcctcattaagtatgagttaaattgagtccagactagctggctggggatctgaaaccttgagaagtggttgtaagttatgtctctgggtctctctcttttaaaccctgctgttgtaggaggaaattctgtaccttctaaaggacttcaaccctcttgatgtccacaaaatccagaatggctgcaaatggtaatgactgttctttctttgttttctttgggaagcagctcctttcctccctgtccattttgctgatgcactcatgttgcagactagcccagcaaccgccacgtccacacccactctgacttggcaaaggaacatttgggaaaccccctttccatatttaaccctgtgacccagcagcgaatactgtcttatcaacacaaccctggcttagaagtccagagacctgggtatatttttggtcatgtccttgctgtattttctgacttgagataagttactataccaccctaagccttagttgttcctgaaaaccaaacctacttatattttccctttcttattttcaaggcagtaaaaagtgctttgaacgtttgtttgtttgagacagggtcttgctctgtcgctcaggccggagtgctgtggtgcagtctcggctcactgcaacttccacctcctaggcttaagcaatcctcccacctcagcctccgaagtagctgggactacaggtgtacaccaccacatccggctaatttttgtatttgtttgtagagatggggctttgctatgttgcccagactggtctggaactcctgggctcaagcgatccgcctgtcttggcctcccaaagtgctgggattgcagatatgagccaccacacctggcttgctttgaacttttggggcagtagtattaaactcaaagtcatagacatacgatgcatagtgaaagtcagctcatttcttctgctccttagaggcccatgacagtatctcacactggcccagccccaagtctggacatacttgtagcttgcttgtgaacagttcatcttccatcactgcagagagaaaggacactggccttccagcttgggcttggtgcctccctgcagctctgggcttctctggagatgtgctcaaagcctccctctctctcttcccttttcagctttgcatttgtagatctgggctccatgcagaaagtgacacttgcaatccaggagctgaatggtaaactcttccacaagcgaaaactgttcgtgaatacaagcaaaaggccccccaagaggacccctgatatgatccagcagcctcgggccccgctggtatgtcttctggcctttctgctctggggcgttccattttcaccctttagagcgtggctgactttgctttcagtgctttcatcctc

SEQ ID NO: 2790 - DNA, 2300 bp, Homo sapien
ggacagaacctggcatgtaataaacactcagtagacattacctgctggtgtggtaattaggtatgtcctgccagaaatggggagatcactctgattacttttatttcctagcattagattaatatcccaggttctataaccgtgtaaggttcttgagactggcaaagggctgacgacatgaaatttactcctcccagatagtggacagccctctgggccacacccccaacatctggctgaggggctcaaccctacataggttctcctccttccctatgctcagtgagctagttgcttgctcacttagagcaggatgaataaggggctaattctgttcttgacctcttccatatatctctctggacatcctttctcatttccatctggcagtgcgtgcctctgcatacctgattcatgccttgcatttgtagcgaggagaggagatgtaatgattcaggtttctcctttaggcttggggccctgagaactcccgggtgcaatagtcacctggtgaaacatgagctttgagtcacagggtcaggcccaagtcatttctgctaggaattagggaagagtttctgctgccaagggagttttaggaacagttggagcagggtcagtccaggaaacaagagggctaagtccctgcctcgatctcagctgcagctctgctcgtttccgaagtccttgctgtagcttgagagctgaagatttagactgtggagggaatggggctggaaattgttctaaaaatggaaagcacgttgcgtttataagactgctagatggactgcttcactttaacttttggctcttcgccaaatgggactgggaaggtgatggtcattctctaacctgtgtcggtttttttccttttcttttcactcccaccccacacctcctccaggacacagaagacttagatcactatgaaatgaaagaggaagagccagctgagggcaagaaatctgaagatgatggcattggaaaagaaaacttggccatcctagagaaaattaaaaagaaccagaggcaagattacttaaatgtacgtgccttctagagagaggctggtgaaggggttggtgggaaatggctgggaagtagtaggccatcgcatctcagtatggagagcagactccttttttgtgcctaatcctttcttaaatcctgggcaagctgccagactgcccctaaggtctaacgtgtgtttataaaccacacgaccaaggaatgttcctgtcatccgtccctcacagggtgcagtgtctggctcggtgcaggccactgaccggctgatgaaggagctcagggatatataccgatcacagagtttcaaaggcggtgagtttgccccagagaggggcctgcacaagagtcacccataaagaagggtatggtggcaaggggcccaagaggttctggggtccaggagtgcttatgaacttttcaggccaagaatggagctcctcaagccagtggcttggttgcatgtccatctgtggtgaacctagagctgttgatctttttctctcagtctgggaaaggggtctgcattagagaccactcaccacctggaccattctactaacacctgttttttccctccttccaggaaactatgcagtcgaactcgtgaatgacagtctgtatgattggaatgtcaaactcctcaagtgagtggggactctgggattggagaggaagttgaggaggagtgtgagtggggctactgtggtgggatctccagggcagccccatccagcattttcattcagggtcccggagcgggtgtgggcagtggtttcgtggtctgctgccagccagggcaggggagcccttatgaagctcctgaggtggaaccaggcatctgagcccaggcttgttgcttcttagagttgaccaggacagcgctttgcacaacgatctccagatcctcaaagagaaagaaggagccgacttcattctacttaacttttcctttaaagtaagacttttcttttccagtctctccctctggcctaggctgcccagtctgcctgacagtcctgtggaggatgctggcctccctcccctgattgtcgtctctctctctctcaggataactttccctttgacccaccatttgtcagggttgtgtctccagtcctctctggagggtgagtggctggcatgcggaagagggcatctcctctggcagagggcggggaagagacttggagattttgtcaggcacagctgactaacctttctcatgcaggtatgttctgggcggaggggccatctgcatggaacttctc

SEQ ID NO: 2791 - DNA, 2300 bp, Homo sapien
ggcactggtagcttcatctctgatatcaaaattcattctcatgggcagcatcccagatgttgaaagggagcgggggaatttttaccattatcttagcaataacagttggtggccactggggacccaggccccttggtgagaaccaagaatgcaatatcagtctaaagaagatcaagtaaaggaggggttcttaggagaattaaactaggatttaggaggtgggtgacagagacagccattttgcttttcttttattctttggcagtgataggcgaaaaataatgggctggtagcaaagccattccctgggctgttgcttccactcagatctggctggtggagagactggcagcattacaggcaggcgcacaacttccagacctgggggctcaggggagtaggttggaggctgcattctagcaagccactggggctctgatctccatctttcccttccttgctgcagtgcacacaggaagacgtgtcttcagaagatgaagatgaggagatgcctgaggtaggcttgccccctgaggtggcattggctggaagctcttgcagtcagcaacattggtacccatatccagaactccagtctaaaactggagagagaaaaatatcaaaggaataaagacagatttactgacctggaggaatagccagtgtagtagaggagacagggcacccatatccaaccactgaagacaggtgcagcgcggttcaaaccaaatactgggtaagttaatttcaaatggctttggagtccaacaaacctgtgtttgcatcctagctatcctaattgaggaattttatgtaatctcactaagctacagttttcttatctataaagtaggattataatacctactgcatatggttgtcttgagattaaatgaggtgttatatataaaatgcttcagatgatacatgataaatgctaaacaatctatctgatatattctctaaaaacatacagaatataaaatcatggttaggaatttgagctttagagctagacagaacttgactgaatcttagctctgctaagagctgtgactttgggcatgataattgacctcactagactcagcttccgcatctataaaatggataatgatagaataatgagtgatggtggtaagaatgaaatgagctagtatctgcggcacctaggacagaacctggcatgtaataaacactcagtagacattacctgctggtgtggtaattaggtatgtcctgccagaaatggggagatcactctgattacttttatttcctagcattagattaatatcccaggttctataaccgtgtaaggttcttgagactggcaaagggctgacgacatgaaatttactcctcccagatagtggacagccctctgggccacacccccaacatctggctgaggggctcaaccctacataggttctcctccttccctatgctcagtgagctagttgcttgctcacttagagcaggatgaataaggggctaattctgttcttgacctcttccatatatctctctggacatcctttctcatttccatctggcagtgcgtgcctctgcatacctgattcatgccttgcatttgtagcgaggagaggagatgtaatgattcaggtttctcctttaggcttggggccctgagaactcccgggtgcaatagtcacctggtgaaacatgagctttgagtcacagggtcaggcccaagtcatttctgctaggaattagggaagagtttctgctgccaagggagttttaggaacagttggagcagggtcagtccaggaaacaagagggctaagtccctgcctcgatctcagctgcagctctgctcgtttccgaagtccttgctgtagcttgagagctgaagatttagactgtggagggaatggggctggaaattgttctaaaaatggaaagcacgttgcgtttataagactgctagatggactgcttcactttaacttttggctcttcgccaaatgggactgggaaggtgatggtcattctctaacctgtgtcggtttttttccttttcttttcactcccaccccacacctcctccaggacacagaagacttagatcactatgaaatgaaagaggaagagccagctgagggcaagaaatctgaagatgatggcattggaaaagaaaacttggccatcctagagaaaattaaaaagaaccagaggcaagattacttaaatgtacgtgccttctagagagaggctggtgaaggggttggtgggaaatggctgggaagtagtaggccatcgcatctcagtat

SEQ ID NO: 2792 - DNA, 2300 bp, Homo sapien
ccttaagggtaggtttgcccctatccagctgctctttctgttgccagaggccatttactgcgtttgtccctggcaggaagttaaatttagggggtcctcagccagactccccatggctataaaggagacttggcctaaactagcccccttggtttgggcagagagggagtctggtcaggctgcatttggcaccgtggctcaggaatgctgggaatgtcagtagcgtaggcttctttctcccagcctgccatgtggagccctacagcccacgcctggactgagaaggtggcaggttcccaagggagaggtggggagaattggtctttgaggggctcttctggaagtggtgtgggtagattcttgccagtacccttttactcttgggttctggagatacagtctagtttttatacttcttccctactgaactctgcttttttcacttcagtgtcattgtgatgaggtgatcccttcctcagccgattctggagtttgaaaagcaagcttggaggactgttctgggtccagggagaacttgaagtctagaacttgtataggcagtgcaggagatgaggagtcccccttcgctgttagccaagtttggctgtgctaggtttcctggtttgtactctcgaggaaagaaagaaaaggtttcagtctgcttctcggaaagggtcttcccagggactgtttttcttccagtttagaatttgttgtgaagctgcttggttagatgctgacctaagttgggcttttatgtgtgtgtagggggtgggggtgggaagcaaaggggctagaagtcttggggggaagaggacaggcaaaatctggcttttcccagagtcacccattttgattgctcttattgctcttttcccttcaggagtcataccctgctgtgccccccatctggtcggtggagtctgatgaccctaacttggctgctgtcttggagaggctggtggacataaagaaagggaatactctggtgagggggccacagggtaggggtacattttgttcttatgaggcccatgccacaaaggcatcctgtgaaagggatcctgaaaagtggacggtacacagctaaacatttaggggatgacctctcgggggagttgcttactgaagccagagggagaccctgcatcggccctgggattggtccatcaggagactcattcccacagccacgtggcccataaggcttagagaactagttattggtgtggggcccaaactaagagctcatccatgcacttatccagatcggagtggggaaggatttgatgtctctgtgctcccctacctgtagctattgcagcatctgaagaggatcatctccgacctgtgtaaactctataacctccctcagcatccagatgtggagatgctggatcaacccttgccagcagagcaggtgagcagctgaggagcctcgggccctgttgtgcagagttgccccacagggtactcagtaaataattgagacaaatcagtagtttctctccatccccaccggctcccaaaaacatacacgtcttatgactctcaccctcgttcttctccagatgggaatcttcttttgctaaatggggcactggtagcttcatctctgatatcaaaattcattctcatgggcagcatcccagatgttgaaagggagcgggggaatttttaccattatcttagcaataacagttggtggccactggggacccaggccccttggtgagaaccaagaatgcaatatcagtctaaagaagatcaagtaaaggaggggttcttaggagaattaaactaggatttaggaggtgggtgacagagacagccattttgcttttcttttattctttggcagtgataggcgaaaaataatgggctggtagcaaagccattccctgggctgttgcttccactcagatctggctggtggagagactggcagcattacaggcaggcgcacaacttccagacctgggggctcaggggagtaggttggaggctgcattctagcaagccactggggctctgatctccatctttcccttccttgctgcagtgcacacaggaagacgtgtcttcagaagatgaagatgaggagatgcctgaggtaggcttgccccctgaggtggcattggctggaagctcttgcagtcagcaacattggtacccatatccagaactccagtctaaaactggagagagaaaaatatcaaaggaataaagacagatttactgacctggaggaatagccagtgtagtagaggagacagggcacccatatccaaccactgaag

SEQ ID NO: 2793 - DNA, 2300 bp, Homo sapien
gcgcctagactacccgtttccacgaacccacccacatcccaaggttcatgattttggctctttttggctactcctccacaactttaccttgccacctaggaatgcgtctttcttccccttactcttatttcaaggttttaggcctcggcactgaccctaactgcaaagacctggcctgaaactcactgcacatttcagcgatgcccccttctcagtagtacctctgacttaggaggttgccacctgtgggatccccgcctaggcatccctcatgcagaccctcttgctctctcaacttcaccaagtgatagtttgcaattcattgactcctcttccttctctcctttggattctttttctggtgtaacctctaactctcctctttttgcctcagctggtagcagttctgccactcccctgcctgttccctatggatatgtccatttgccctgggttgttgcttttcctggtaatgatagtgatgtgatgtgcgagggctacccccatttattctaagcagtaacagttgcatttctcccctgtgagcgtcattccatcctaggcatacaccttacatgtctcctgcctggtctaccctcagacatcccttgaacagagaattggcttctgctaatttgggaatgtctggtactgcatgctatagcacttatattggttgatgttacctgctgtgatggtattctctctaccggagcagtagctgaaatgctagcagacagtactttatccaggcaggcagacctaatcggagtagcctggggaaaggcagagttgtgaattctctgctacttgggggcctgaattcaacttactggtgttttctgtccgttttctcaatcaaaccaagttaagatttggtgaggtaaagcctcagtttggattgattggtgccccaccaaaactcatatgtcccatttctcttttcatttcctttcttttttcctgctagaaagttaaaattgaaggactaggagtggcttagttaagtgaagacttgggcatctttgataattatttttcctccagcattgaggattagagtcatggcaatgctaagatacccagtagaggtggataaggtttccctggcttgtgtgggaacctcgagttaattttgttcctgaattaagcttctaattccttaagggtaggtttgcccctatccagctgctctttctgttgccagaggccatttactgcgtttgtccctggcaggaagttaaatttagggggtcctcagccagactccccatggctataaaggagacttggcctaaactagcccccttggtttgggcagagagggagtctggtcaggctgcatttggcaccgtggctcaggaatgctgggaatgtcagtagcgtaggcttctttctcccagcctgccatgtggagccctacagcccacgcctggactgagaaggtggcaggttcccaagggagaggtggggagaattggtctttgaggggctcttctggaagtggtgtgggtagattcttgccagtacccttttactcttgggttctggagatacagtctagtttttatacttcttccctactgaactctgcttttttcacttcagtgtcattgtgatgaggtgatcccttcctcagccgattctggagtttgaaaagcaagcttggaggactgttctgggtccagggagaacttgaagtctagaacttgtataggcagtgcaggagatgaggagtcccccttcgctgttagccaagtttggctgtgctaggtttcctggtttgtactctcgaggaaagaaagaaaaggtttcagtctgcttctcggaaagggtcttcccagggactgtttttcttccagtttagaatttgttgtgaagctgcttggttagatgctgacctaagttgggcttttatgtgtgtgtagggggtgggggtgggaagcaaaggggctagaagtcttggggggaagaggacaggcaaaatctggcttttcccagagtcacccattttgattgctcttattgctcttttcccttcaggagtcataccctgctgtgccccccatctggtcggtggagtctgatgaccctaacttggctgctgtcttggagaggctggtggacataaagaaagggaatactctggtgagggggccacagggtaggggtacattttgttcttatgaggcccatgccacaaaggcatcctgtgaaagggatcctgaaaagtggacggtacacagctaaacatttaggggatgacctctcgggggagttgcttactgaagccagaggga

SEQ ID NO: 2794 - DNA, 2300 bp, Homo sapien
tagacacaagccttgctgagccccaatttttaaaaaaatgtttgagttcttaccatgggcactattttatgcactttacgtgtgttcttacataatcctcctaacaagtaagtactattatgatctccattttacaggtgtgaaaactaaggcacaaacaagctaagtaatttccccacagtcacatcattagtagttggcagagctggggttcaacacactaaaaaaggcagagtagggtacaagggcatggactttggagacaggcctaggaactctgtttacagactgtatatccttacagagtcactccttttccccagttgtaaacaggggtaaaaatacttaccttgcaatgttgttgggagatttacaaatatttgcacctgggcacagtggctcacacctgcaatcccagcaccttgggaggccgagatgggcagatcacttgagcccaggagtttgagaccagtctgggcaacataccaagacccctttctacaaaaaaaatacgaaaattacccagctgtggtagcatgcgcctgtaatcccagctacttgggaggctgaggtgggaggatagcttgaggtctcccgaggctgcagtgagctgagattgtgcccctgcactccagggcgagagagcaagaccctgtcttaaaataaataaataaataaataaataaataaatatatatatatatatatatatatatatatttgcaaaacaccttcgctcaggaaataattaacaggaattcccaccacagccttttatgctatcagcttgcacacacagacacaaagtcaacatgtagcaaactgttcaggctacctaaaccagataaatggccccacgaagaccaggaacagactataatcgtctttaaatacccataccccaacttgaccaaaggaggcctctgcagaggcaattgaatagtcttccagcaaaggctagctcattttagtacaagtgggagagaaacggggcaatctgaccagtggtttaagggctgagttggcccagcagaattgactaggccttaccacaggctaataacacttgcccttggcaaaacgaacgccagctcgggatttctgtagcttcaaccagctttgtcctttgtgatagtgccacctagcgagggtccggaggcactacctactcctggcagctgccaagaccactgcgacaaggtgttagccatttaggcctaggaaagggaatggggaccacccgagtcagcactccttccatgactctgtggaggaagcccatgctgtccttcccccaacctcgtccagacccatggggtctgaaaagcgcgaaaggcctgatattaactaacacttgtacataacacagcagtgatctattatcattcctcattttatggtgtcctcgcatcgaatccctccctgggaataggaaaaacaggcatcattctcatgagagccattgtacagatgaggaaactgagactcggcgggaaagtggttaacccaaggtcacaaaacgccatgagagccagggctgggacgagaatccacgcctcttccattccggttcccggctcctaccccgaccacccacccgagtgtgaagacacagcatgcccacccccacggggagcagaggctccaggatcctgcgccgaagaccagcatgtgggagcaggataaagactgcacggggaagacagcacttctttcttctctgtccatggagtgccgggcacgctcgccacggctcgggggcgggggaagcggcgcccggggcaggaaacagcgtcctgcgcgggtagcccctgggagcacgcggcaccgagtcacgtgagaggggagcgcaggcgaaggggcgtcgcgcgcaagcacgcacgacatacgcaaactcgcactgaggcgcccacagaggcaagccccaggccccgggtcacatgtggagggtggcaggcgagaacaggggggcgggaaagacggagagatcacgtggaggaggccagagcagggaagtcacgtgagggggacggaggcggggccgcctaggaggaggaggaggaggaggggcgcgcggcttccggcggctgggggggccagcgagcggaggggggggcctgtcccggaggtggcggcggcgccatcttggcgaaggggggatcaggaagtgcggaccgcggcggcggcggcggcggcggcggcggcggcggagcccggagcgcaggccggaggctcccggcccgccggccccggagcggagcggagcggaggatgcagcagccgcagccgcaggggcagca

SEQ ID NO: 2795 - DNA, 2300 bp, Homo sapien
tcttagacactattaacctcttcttcctctgtgcttccatccatagcacttcctttatatgtctgttagaacagccatcacattctataataatttgctgccaaactgtgatctccttaatagctgggactaagtctttttgatcactgcatcttcaacacatatggtccacaacacacatgcagtttcctggcaaaccacatatacctaacaaatgttgatctaaattgttgaaggaagatcttcccaccctctatcttttccttaagcagagggactacacacattccttctcttttccttaaggcttttcttcactacttttctttgttacaaggtttctttaattcttaagagattattgtgcgcttacacatgcgcatgccccggaacaagtcgtgcagatttacgcccatttccatgtgcatcatggggtctgtagtccttctacttctccagtcctcttctagaacttttctgcttcttcccttaattccacgacctggggacatggtcaataagttgcttttagctgggcttttatttatttatttgtttagtttttgaaatggggtcttgcttcattgcccaggctggagtgcagttgcgccatcatgccccaaactgcagccccgacctccctggcttaagtgatcctcccacctcagcctctcgagtagctgggactataggcacacaccatcatgcccgactaatttttaaactttttgtacacacgtgatctcattatgttgcccaggctggtttcaaacgcctgggctcaagtgatccttctgcctcagcctttgaaagtgctgagattacgggcttaagtcacctctcctggtccctagctgagcttttagagagaaattttccctacacattaaaaagtgtcagtccagtactagcccttttccttacctgttgagcccttataataatatgccaggcactgtgttgattcataatctagagaggcagccactgcctcaggtggattcatttattcattggacatgctctggaaacatataacaaagtatctgatctagttcttggtcaggcgcagcttccttaaggaattgacattcctgccaaatgctcaaagttaagtagaaggtgatgaggggaacatgggttataaaagagcccaagagaaccatgcatttaagtccctgaagtgtgggggatgatgggacggataagatgttcaaggatcctgaagaccttgccaatagttggaatgtggagctgggggtggagtgacccagatgaggttgaagtaagcagggacaaaacaggacagagccttgctgtatgctaagtctgctttagtcaggaatcttttggttgaaagtgacaacgaacccactgaaggaaaaaaaggggctaagagttcagggttctcatctttggtctcctttgtgttagcttctctcttgatcaggcctctgtgagtggtctctgatctccctagtcacacagaagccaacagctggagtcaagagaagggggtgaggaaggccgatgaataggggctacttgtctttccactattaccctcaagtctaccttctttgcaggcaagtctagacctcctcaggtagaccctcagtgggagggcaggaagcttagccttttagactccaaagccgtttgctttcttaaaaatagcaaacccacagccccctatctctttaaggggctaaacacattttctctgctgtatcctcagcctacctggggagcaggaccatttgggtttggtaagagaaaaaaggagggcgaaaaccccggacactcctcctgtctcccgacgctcgttctggccgtctggccctcagtactaagcaggccctgacctacttgtcttactcttgctgcttcttcccgccgggcctcttgccccttctccgaccatgctgcaggtcctgccccaactttaggacttcagaactcctccaccgtgccgtggaggaacagcccttcttccacctcacgcacaccctaccacggcagaaccaatcgaagactatcccagccggggaccccccttttttttcctgggacccagcgtttccgcctccggggcgcagactcctccccctcaccgtcccaattgtattccctggaagagcagccggaaaagcctccgcctgctcataccaggataggcaagaagctggtttctcctcgcagccggctccctgaggcccaggaaccaccgcggcggccggcaccacctggacccagctccaggcgggcgcggcttcagcaccacggacagcgccccaccc

SEQ ID NO: 2796 - DNA, 2300 bp, Homo sapien
tgggttgtttccagtttgggggctattaattacaaataatgcaaccatgaacttcttggggtttaccattacctttctagataatggtaaactggtttcctgtagtgactaagagctgctctgcatccttgctgccacctggtctaatcagatggctaatgctgtctgtctggtgaatggacagtagctcactgtagctatactgtgcatttctctgatgtgatggggttgagaaccttttcatatgtttgatattttttatctcctgtgaagttgtctttcgattgtttttgcccattgttatacctactgaggggtctgttattctttcaactaaccagccctctgaaggcgaatataaggatacaaaacatgcttcctgcccccgaggagatgacttgacaattctagaggcagatatatgaacaagaagtacatgataattgtgattactgaggcatccatcttccctagcagactagctaaaggatggcgctcttatttgtgtcatatcctgggtgcttaacacagtatctgccacataattaggtgcttagtaaagttttgttaaatgatcgaatggggcgtttttagcgcagtgtgcaagtgccctattaggggtaggcgcccagtaactcgagaagcatggagtaggaaaccacaaacagcacctgctccccctcctctccccctacctgctgtggggaaggcctcccttgtaaatttgaaaggttgattcacgggaagccgtggaggaggtgcatgctaggccaacgaatagaatgtgcaaaggcccagaaggaagacagagcccagcctgcaagggaatgttaatttggagtgactaacaccatgaaagggcatcagctggagatactgctataaagggactgccttgtaatttcataagcatgggggtaaaattaagattaaacacagggaaagaacattctcacaggtgaggatggtgttgaaccctagaataatcgtttcccagataccttgaacaaaaatccagcagttagagaagcctgaccatgaagcaaatttgacttttgtccctctagataacaaaagttatctttttgaaagtaatggtgtaatttgaatgagtgtagagaagcgctgaagactgagctttactaaagccttcagacctggatttggcagcagcgtggccttagtcaagcctcggtttctacacctgcaaagtgggaataatgcctaccttggagggctgttgtgaagattaagggagataatacatgtaaagtacttaaccatttgcctggtggggtagtttttatgacctagatcctaaattgttcactgctgctgttgctactcttggtactttttactggctggcatctgcttgcttaagtttataacatagtaggagcattaacaaggtcccacggtggggaccttggtcgtttgacgagatctgcgctcccgcccatcccctcccccccccctccacattggagacgcggccaccaccgcgctggcgcggagagagggaggaccgggcgtcatgctgtttctggcctgaggttttgtgtgcctttgttttccttttgctctattcgtgtattcctgcctacggcctgtgcggggaattaggagctcagtactgaaacggcggttttcctaaacagtaccggacgggcgcgggggctgacgcctgtaatcccaacactttgggaggccgaggtgggcggatctcttgaagccgggagttcgagaccaccctggctaacgtggtgaaaccctgttcttactaaaaatacaaaaaaaaaaaaaaaaaaaaagccaggagtgatggcgctcgcctgtaatcccagctactccgtaggctgaggcaggagaatcgcttgaacccggggggcagaggttgcagtgagccgagattgcgccattgcactccagcctgggcaaaaagagcgagactccgcctcaaaaaaaaaaaaaaaagtaccttccgtagttctcatgcagcggaggggttcgacttgtaaccggcctgaaaccaagcgtggcgcaagatttgctcaagcccctcctcttggccaaactttccggaggggaaggctttccgaggaaacgaaagcgaaattgaaccggagccatcttgggcccggcgcgcagacccgcggagtttcccgtgccgacgccccggggccacttccagtgcggagtagcggaggcgtgggggcctcgaggggctggcgcggcccagcggtcgggccagggtcgtgccgccggcgggtcgggccgggcaatgcctcgcgggcgca

SEQ ID NO: 2797 - DNA, 2300 bp, Homo sapien
aataatgtggtgttgacatcaagatagacaaattttccagtggaagagaatagatagatcagaaatagacccataagtaactggaatgttgatatataacaaagttgggaaaggtgggaaagttgggaaaggtggggctagtcaataaacaaacctggggaaaaataaaggtcatttgtatgtaaaaagtaaaatgggatccctacctcacaccatatacaaaagtaaattccagagagaataaggatttaaagatttttaggagtaagagtaagtgaataaatattagggtacggggaaaagaaaaacaggataaatattaataaattcaaagttaagaacatctaccaaaatagaaaatgaaaggatacatatggaaggataaatttgcaacacatataactgatgaagaatcagtgccctaagtttgtgaataatgtagcaaacaatccactaaaacaataataaaagactcaaactgactgttatataaagagccaaagatggcctctgtatctgggtccctgagttgtttatttcttcacagcaagctggtatctattatctcaaaagcctttcagcacctaactcaaatgtttatacatccaggcattttaaatataacacaactaagcagatttttaggcatttagagctgcttgcctgctttgtatacctcatgaaactgtgcccaacatctgttagtcatagataagataaatctgtggtttatgaagactccaatttgctgctgcccttgggagctttctgaaacagagacttcccacaggccgctgaacaacatcacctggacatggtaaggccactctcttctggaagtttccttctcttttccccttttggatggttcctctccacccccaatctctggatcttctcatgctgccaaggacttcccctaaatacaaacctgtcaaagctcacacaaataaagcttgagtgtgctactgtcacctcctggtcatatattttttcttgctcagccctaaaaatccctcaaatgccctacactgacatttcacagaagagaaactacagatggacaatacatatttaaaagagatgcttaacctcaataagggcagtttgagaccatgcattagcaaaagccaagaaatctgaggtgttagagaagatgtggatgctggtaggagtataaactggtacaaccactttggataaaaatttggtactatcatataaagtggaatactggcattccaaagtcctatcaattttattcctaggtaaatacacccaagagacatttttgcacaggggcaccagaaagcaatgctgatttccaacactgttggaaagagcaaaagactggaaattgcacaaagacttggcagctggagaatggataaattatggtacataatggatttttatgtagcagtgaaaatgaacaaaatgtaacttcggtcaataaagatgagtaaagaaaaatgtaccaggcccaggcctctagatgagagtttggaaatacacacaaaactaagaaaagtaaaaatacattgcttagtaatatatataaatgtgaaaagaaattaaagcaatataatagttgtgtaaacacaaattcaggatgggagttacttctgatggagaggcagtggcacaagatggggaccacttacaagctgatgaaagttaattgataatattttagttcttggttagcatgtcaagttaaagaaggtgttcattatattattttaaaaatgaattcgtttaatttaatttaaacgggccattcaaagactactggttataatgtattattggctaattctgtggtctttttaaaagaggattgtacctacgtatcttctcaggccttccggcccaaccacgttataaatgactaaggagttcaatcaaggccatgggcaaaaatgcagcatcctaaacccatgtacctactccccactgtacccaaaacagcggcattaacacaacgtaaaaaaccaaggaagacgtagcaacaaaaaccttaatttcctagagcgcaaacaaaagaggttgaatcacgtggttcttcctcccacgcccggcgcgccaatgatgtcaccaatctgcgaccagaccattgattcccgactgaaggtagagaaggctacgtggtgggggagggtggggggagggtcgcggccgcactggcagtctccgggtgtccggccgtgtcccgaggaagtgcaagacccggtaagagcctctgtccttctcggctacacctgcctgggctggaacgcgcggcccatgcggcctctcca

SEQ ID NO: 2798 - DNA, 2300 bp, Homo sapien
gtctctgctttgagcccctcaggaggtgcttctgcctcttgcttccagcttgttgtgtgatctttgtcgagtcccttcccctctctgggcctcgtttctctggcctaaaaacaggagctgaactcccttcctgtgccgaggcttcgcaatctgattccagatcatgtttcatcacgaggatgagcagccacagtccggagagtcctgttcttaggggtgtcagacagcacccagatggcatccatcccaggcggacggtggtttatggtgttggtgcttgggaggactgaggaaggagacagtgactcagactggggatgctgggtggattccctgtaggaggttggggggtccctgaaggactagacaagccatgatgggaggggctcgggcaggggctcaattctgagtgtgagaagcccggggagagggggcagagtgtgtagggaatagagcaggcatgagggcagcttcaggttgctgccgtgtggtgcacacaggggcatgtagggaggaaagaggagactgtctcgtctggagaggctttgggcaggcagtgaacacaggcccagggcgagggcacagtgatggatggaatatttggtagcatcagtaaccaccagggctgcagagttctgcacactcaggccccgaagacctgatatccttccttttagaggtggccaggcttggtagttaaggacttggggccaggcgcggtggctcatacctgtaatcgcagcactttgagaggccaaggagggtggatcacctgaggtcaggagctcgagaccagcctggccaacatggcgaaacctcatctctactaaaaataagaaaattagccggacctggtggctcacgcctgttatcccagctccttgggaggctgaggctggagaatcgcttgaacccgggaggcggaggttgcagtgagccgagatcgcgccactgcactccagcctgggcaacagagtgagactccatctcaaaaaaaaaaaaaaaaaaaaacttgggtggcacaccagtgatgggcgctctgggaacttactgaacccaaagcctatttcctcagtgttaagagggaatcacaactactggctgtagcacagcagccaccacagagccagccacacactgggtctcagcagctggcaactgttgcctttattagagtggtggttagaagatgccacctggagcatcaagacaggaggggcatatgcgcccatgtcacccctccactgtctgcaggtgtccctgcctggagagcacgtgtggaacatgccccttttctcatgagccaaatggcttcccgtccgtgacaagctccccagtcatgtttctggatagaccttgttgggtgaatctgtgtgagtaaaaaggaagtgggctgttctccggagggcagggctgcagtggtggcctgggctggacttctggagccttcttaccccatggggccctgttattctacactcagttagcaatttgtggtctgggcagagctaaccgggtgtggacatgcaaatcggacaggtggagagagaacaaaaataaacccgtggggccaggccagaggctgagaggcctggaggaaggtcagggggacacacgatgaccaggcagaaaaaggctgagagagtagggccacagggagagccgaactaggaagctgacctgggacagaagcagggaagaaaagcattgccacagcttgcctgatgcgtcgtcaagagaacacaatttccccttcaagacttgagtcagggtgcttcctagaattctaaagattctttctgccccttcaccctgcttggagcaccagggctgtggcagtgggtgacgttcccagccaggtgccagggggcaggcagcaagagcagctgggcaggggagggacgtgcccagggcttgccctttgtggaagccatatctgtttcacaagccctgggcacagggtaaccagagttgtattctgagcagagccttgatgatactaaatgaacagcatgcaaatgatgtgtgaaataatatgcaaattggcatctgttatttttgagtcagcttgttgggcatttttcttaaaggacaggagtgctgctcagtgtcaaattaacaggaaagtcagcttaaaggacactccttgcagggactgagctggcacctactccttagagcttgctgataccaggcctgccacgcgacatctgcaaggacagttgtttggtgttttgcttcaggttatagatggagagacctataaaggtgggtgccctgcccaggttacccagtaggta

SEQ ID NO: 2799 - DNA, 2300 bp, Homo sapien
cccctcctctggggaggagcctatgcggggggcggagctaggaggaggttggagagttaagccaagccaatgagaccagctgctaataagtgggcttggcttacaatgtaacagtggcaggaggaggcgagcgaagctattgagccagcgaggagtgaagctgagcctggcctcacacgctcctagaggaccacctcctgagagagttctttcaccccctcttctttctccaagctcccctcctgctctccctccctgcccaatacaatgcattcttgagtggcagcgtctggactccaggcagccccagagaaccgaagcaagccaaagagaggactggagccaagatactggtgggggagattggatgcctggctttctttgaggacatctttggagcgagggtggctttggggtgggggcttgtgctgcagggaatacagccaggccccaagatggacacttctgggcacttccatgactcgggggtgggggacttggatgaagaccccaagtgcccctgtccatcctctggggatgagcagcagcagcagcagcagcagcaacagcagcagcagccaccaccgccagcgccaccagcagccccccagcagcccctgggaccctcgctgcagcctcagcctccgcagcttcagcagcagcagcagcagcagcagcagcagcagcagcagcagccaccgcatcccctgtctcagctcgcccaactccagagccagcccgtccaccctggcctgctgcactcctctcccaccgctttcagggcccccccttcgtccaactccaccgccatcctccacccttcctccaggcaaggcagccagctcaatctcaatgaccacttgcttggccactctccaagttccacagctacaagtgggcctggcggaggcagccggcaccgacaggccagccccctggtgcaccggcgggacagcaaccccttcacggagatcgccatgagctcctgcaagtatagcggtggggtcatgaagcccctcagccgcctcagcgcctcccggaggaacctcatcgaggccgagactgagggccaacccctccagcttttcagccctagcaaccccccggagatcgtcatctcctcccgggaggacaaccatgcccaccagaccctgctccatcaccctaatgccacccacaaccaccagcatgccggcaccaccgccagcagcaccaccttccccaaagccaacaagcggaaaaaccaaaacattggctataagctgggacacaggagggccctgtttgaaaagagaaagcgactgagtgactatgctctgatttttgggatgtttggaattgttgttatggtgatagagaccgagctctcttggggtttgtactcaaaggtaggggctgtggtttctctttataccttgaacaaaaggaatatgtaggtagcaagagagggattgagagagggggattgtgagagagagagattgagagagagagagagagagagagagagagagagagattgagagattgggagggagactgggagagagaggtggtggtggtggtgagaggcgcttgctcagttatattcaacactctaacttcccgtggttttccttcttgatcccgggagaattcattcctagcttcctctggggggtaggggacatccccacacactgtgtctaatttgcagactctctgttagggaggattcaataatcccttctgagaaatcgcttttcctcctggctcactcgtactaaagcataacccagcagcttaacgcaccaattaattacactccgccttcatgtgtttgccagttcctgcgacttccccttctttcctcccctccctgctccactccattttcctgaggataaaaaagaaataaatgtctgggtggggggtggggattccgtaccattgcccaagtcccttctctccctgtcttctccatctcttcccaagtttctgtttccctcctcttctcagagagtctcgggcaaaatagaaaaccatccatgacctgggtctcctgagggcatggggtaaaaatataggtggaggaaatcagtggtcctttccctcaggagagaggactcagaataaacctgctgctgcttcgtaaacatctcctgataaaaatggctacaggtgttacctgggcagagcagctgggcgccgccttggaatcagctgggggagcacctctccttgggacgggatgacagggcttcccaggcggtccccacaagcccgcgccccagctcagccccagttctcccctcccacct

SEQ ID NO: 2800 - DNA, 2300 bp, Homo sapien
ttggcaggggtaggggaaatgattatgtcattgatatcaagattattattttatatatatatatatttagagacagggtaacactctgtcgcccaggttgaagtgcagtggcgctatcacagctcactgcagcctcaaactcttgggctcaagcagtcctcctccctcagcctcctgggtagctggactacaggcactcgccaccatgtccagctaatttaaaaaattttgtagagtctgggtcttgctatgttgtccaggctggtctcgaactcctgacttcaatcaaccctcctgccttgggctcccaaagtgctgggattataggcatgagccaccatgcctggccagaatcaagattattgtgcaagagtaattgtcacgtatctggggtcgtggcttgtattacaagtaatatttagctctcaatcatcagggttaatgggggattggagaggtgagaactgatatacagaggggactctgggctcattttgggggggctctgtccctccctgatctggacacttgctgcttaccagtcaggaatgctgttttaggagcttcctatgtgtatatgtgtgcatgtgtgcatgcatgggctagtgtgtgcacacaaccatgtacacatgtgcacatatgtccacctgcttacatgttttctggatgtgtgtctgtgtatgtgtgcatggatctcctaccctttcctcttcccatcgagggagggagctggacagaggccaaagggtgatggggaatcaagagccagagaggaagaggcctgccttttaaaaccccaggtgttctggggaattccctcatggtgacttcctttctgattcctaaggctgctgtggttagaaatgaaaatgaattcagctctggtcccatcctttggaaccccctctgcacacagtgggggcttaataaatacttgatgatgatggttctgaacctgggaagccagcagctgttcctagttctgactctcagagccccatggggcaaatcaggcagggaatgaccatgggggaatcttcagtcttcctgccagatccccctgtgactacacacccagctgttagggaaggggctggagccatggtccacttcacacaccctgctttggagaggccagttcttcctcagcagcttctcttttgttttccccaactaacatttgaacaatatttattgaacaaccactttgtactgaatatcatagtggaaatgcatcctgggagaaagtatctgatctgtggggtcagactgactaagttcaaatcccagcatctttaattacaagcgggatgacatctgacaagttacatatctatgtttgagcgtttgagtgttttttccactttcctttctctccttcttctccttctccttcttcttcttcttcttccaattttcatctgtaaaaggagagtgatgacatcatttttgtggggttgatgtgagggttggaaataacagagaggaccctgaacacgaggcgtaggcactcagtcaatggtaggtgagtttatccaccgggtgttagaaggtgtggatcccccctgcttctgtgaccttgacgttgttactcaacacctctaagcatcaggctttgtaaatgagaccatactgcccacctccttgggtgtttggagactgtatccggataatatatgtgaaacaacctatcgtaaaccctggtggttaataaatgtttgccttcccctccgtctgccccctcatcagggtgcacacctcccctccttcggaggccctctgtccctcctccccatcgcccagcgtgagcgaacatcccttatcgccgtgggcttaagggttgtggccatacctgtcagaggaaagaggacagcggctcagctccggggtgggggagcaaaaactacagttcccagtcctcgctgcgccgccactggggccggagcccaggacgccaggcccctcctctggggaggagcctatgcggggggcggagctaggaggaggttggagagttaagccaagccaatgagaccagctgctaataagtgggcttggcttacaatgtaacagtggcaggaggaggcgagcgaagctattgagccagcgaggagtgaagctgagcctggcctcacacgctcctagaggaccacctcctgagagagttctttcaccccctcttctttctccaagctcccctcctgctctccctccctgcccaatacaatgcattcttgagtggcagcgtctggactccaggcagccccagagaaccgaagcaagccaaagagaggactgga

SEQ ID NO: 2801 - DNA, 2300 bp, Homo sapien
aggatgatgacagcaactctgtagaaaaggagactgggagccagtggctgagtctcagaaaatgagaatgaggctgggtgcagtggcttacactggtaatcccggcacttttggaggctgaggccagagaggactgcttgagcccaggaattccagactagcctggccaacatagcaagaccccgtctgcataaagaaacaaaagaaaatgaaaatgaaccaccaggattgctgggctgccagtactgaggaaagcaggagggtagcgcaggcaggtggcatgagccttagaggaaccatagttttccaagaggcaggatgagtaatggtgtggaaattaaaatggggaggaagggaggccatagactcaaagcggatgctgagggatgagggctgggagactaaagcctccacttgagacaccagtaagggacagtggagttcagttgaggcatactaggaagcctagtatgggggaagtttttttttattttttgagacggagtctttttctgttgtccaggctggagcgcagtggtacaatcttggctcactgcaacctctgcctcccaggttcaagtgttctcatgcctcagcctcctgagtagctggattgcaggtgcccgccaccacgtccagctatccagctaatttttgtatttttagtagagatggggtttcaccatgctggccaggctggtctcgaactcctgccctcaggtgatccgccttggcctcccaaagtgcggagattacaggcgtgagcctgggggaagttttctgatcgctcactaggtattcagggagctggatctcagagtcagagagggaggtaaggggcgtgcattgggtcaggtgaggaaagagactccgggagtaagttctgactccttccatgtgactcaggtaaaacaggagatgtggactttccgtggaggcccaaatacatgtttattgaagatgagctggaaaatctgattctgtgttgaatgacgaagtgctaagaataaataacaaccccttacatctggatgatacttgagaacttacaaagtattttattgtaccttgtcatatattttcttcattcctttcttattataaccctgggaagtgggccttatcagtggtaaactcagagtgacttgctaagtgtccaagctgggactgaaaatccactctgtgctgccttctagggcgttgatgagtgcagtgttttctgggttgctgaaaaaaaacaaaaaaaaccccaaaaaacaaaaaaccacctccttaagtctgttctttttgcatctgaccactctcctgtgcctcttttcaacattcaggaaattaatggtttctccctaagtctccacactacactttttctctagtggaggcagtaatgagttgcaggctctgttctgacatgctcagaaaaatgcaggacggcaagtcatagccaaaaacaactcgacgtactcagctggggcaacccgtcacctactgcgggaagaggcagaaccggggatgcagggaaaggacagattattcttatcctgcctctcaaacttctggctgggagccagacttcggatgaaaccaggcaatctcatctagggattcaacgctcccttactattgatgtcacccacgccgtttgcttccgaaaacctttgggccggaggctgcggctagaaaagcaatcaaaggtttctcgccgggcttaaagggccacatcttagtgacgtctcgggttataaaatctgcttgacaatgaaatatcgtgtgcgcgattctgctcctcccccgacatgacgtggccagacacgccgctcgcgtcagggctgccttacgcccccaggaagacccattcccactctggggcgcgcgcagatttgctgtggcacatgtactataacgcacaggcaaaagggcagtttccaaaacgtctccaacgtgatctcactccagagattttttttcctaaagttttagggctgcgcggaagggaacatggggttcacctcaggaaatttcagacgtcacccccctcggaggaaggtagtcgcgtccggttcctccccgggtgtcagttaagcaggccaggctgtgagcgaaggttctgggcggggctggactgttctaagtgagttcgggtgggggagcttcacgaggggaggctgctctgtgaaggaaccgcctttctctccgcgtgtctcacccttttctccccatatctgtttggacatgagctgagggcacggtcgcgggcggtcagccctgttcgcagctacggcgaggaggggcgcgattgt

SEQ ID NO: 2802 - DNA, 2300 bp, Homo sapien
tacccaactccttccccctcagagaaccaaatagcctgaggaagcaggagagttcctggttatggcagtttcttggtgatttggggcttcaagacagtaggtgagagatgctgtcaggacgtatcttcttcataccaaagtcactggtcctttctcagcctctctcgtgcttttctcctaatgaccatatttttgccaaaaattgggatatgttatctgacagaccagaatatttgaagtttgggctgtcctgaaagtctggactttggtggtaccctcctcccccagcccatctgttgcacattatactccgtgtgttcttcaactttcggcgcccttattcccctgccttcctggcttgattgaaggaaagcttgaaaaggcgcagagccctatacctcatttcctccatgataaaaggatccaagtgaggccctgtcacagcctgtgggtaggggatgcggcgggatcctcattgccatggtactcaaaggtagaagagcctggagtttgttgcttctctttgctattctttcatatcctcttgggcctggtgattaattagcaattctcattcctctcagccaaaggcctgcactgggctttatttgtctttttttattttttaagcactgcctgccagagatgggcctggggcctgatgaggaccttagcgctgctcgttctccttttctgttcatgcacacattcctccatggggtggggaaggcaggcatggggtgtggccctcggagaagttaggagtcccccagctcaagatacagtggcaaagacctagtggtcccctacccccacttctctcagttcctggcatgaggagagaagaccctgctctggtggagctgacaacctttgaggctgggaggagagcagcctctgggcatcgttcccagtgtccctcacactaaaacggcgtagatggcaaccccccacccccaccccgctgctcaactcttgtgtttgttgttctgtttgccccatttatctgttgctgtttttgtgttgtcttcccctgctccgcattttgtaaaatggcccctgggggagtgtttttgctggatctgctccctctcgctctctcactccactactttttggaacaaagtgatggcagaatgcggtggtggtgggggtcttttgtactgttggattaataaaatgattttaaaatcccagacaaggactccttgctgttgctgtgtgaaaaggctggaatgagccgctgtcactgctgggtagggtgcttaggggttgaggatatgtatgctccccagggtccctgggagtgggaatggcagatttggcccctgagctgaccctggtataagctgctgagccaagggaggcctgtgtttccccgcccatccccctgtgtctccactgtgagaaactgagtttcctttttgagcatattcctgggccaggcctggagccaggcggatttggcaccacagcctctggaagacaagtgcttgagctcttctgggtttagcaccccacccacctcccagttgtttgggttagggagcaagtgtcgctctaagggtgaggggaggggctgcttctgtcctagcaaatttcattttgggatgtttttcagatcgttcccgtcccccaaccgttttttaaagtagcaatggcatcttttaagcagtctgttttggagcagattggggagaatggcaggagggctatttccacaccctggatttgcgacctgtccctctcccttcccccatctcacagctgtctctgtctatcctggggccaacctggccccttgtcttcgtcatctcagaagacggcaccgtctgcttttctctcagtttgtgggggttccctctagaaactgtttagacactgggaaagaagggcaggaaactcaggattcggttagctgggaccccggtcgcccaccaggaggtaagcccaggtttagggccgtgtcgctagacctcccttcccctcccctggctctcaattcctgctcttattggccaaaagtttccgcccccttggggaagttgacttttcattggtcagtttctggtcacatgattttcttctcgggctgcaaacaaagggaagcctgcaacaagttaagctgaagaccgaagcaagagctggttcaggtaatgccttagctgggaaggggtccacagattcgctttgaagggggtggaataaggaaaagggaaggcggaactaatctagaaggaatgagctgcttttcatttctgggctgggggaggaaggccaggtgccgacgctaacacaac

SEQ ID NO: 2803 - DNA, 2300 bp, Homo sapien
accacatggacaatcacttgcccatcatctctgcgggcagcgaactgtgtctacagcaacctgtggagcggaaactgtgatctgccctagcgctctcttccagaagatgccctccaatcctttccaccctattccctaactctcgggacctcgtttgggagtgttctgtgggcttggccttgtgtcagagctgggagtagcatggactctgggtttcatatccagctgagtgagagggtttgagtcaaaagcctgggtgagaatcctgcctctccccaaacattaatcaccaaagtattaatgtacagagtggcccctcacctgggcctttcctgtgccaacctgatgccccttccccaagaaggtgagtgcttgtcatggaaaatgtcctgtggtgacaggcccagtggaacagtcacccttctgggcaagggggaacaaatcacacctctgggcttcagggtatcccagacccctctcaacacccgccccccccatgtttaaactttgtgcctttgaccatctcttaggtctaatgatattttatgcaaacagttcttggacccctgaattcaatgacagggatgccaacaccttcttggcttctgggacctgtgttcttgctgagcaccctctccggtttgggttgggataacagaggcaggagtggcagctgtcccctctccctggggatatgcaacccttagagattgccccagagccccactcccggccaggcgggagatggacccctcccttgctcagtgcctcctggccggggcccctcaccccaaggggtctgtatatacatttcataaggcctgccctcccatgttgcatgcctatgtactctacgccaaagtgcagcccttcctcctgaagcctctgccctgcctccctttctgggagggcggggtgggggtgactgaatttgggcctcttgtacagttaactctcccaggtggattttgtggaggtgagaaaaggggcattgagactataaagcagtagacaatccccacataccatctgtagagttggaactgcattcttttaaagttttatatgcatatattttagggctgtagacttactttcctattttcttttccattgcttattcttgagcacaaaatgataatcaattattacatttatacatcacctttttgacttttccaagcccttttacagctcttggcattttcctcgcctaggcctgtgaggtaactgggatcgcaccttttataccagagacctgaggcagatgaaatttatttccatctaggactagaaaaacttgggtctcttaccgcgagactgagaggcagaagtcagcccgaatgcctgtcagtttcatggaggggaaacgcaaaacctgcagttcctgagtaccttctacaggcccggcccagcctaggcccggggtggccacaccacagcaagccggccccccctcttttggccttgtggataagggagagttgaccgttttcatcctggcctccttttgctgtttggatgtttccacgggtctcacttataccaaagggaaaactcttcattaaagtccgtatttcttctacctctgcctcttaacccttctgggaagcctattgtgtacgccgcgggccctcagcggcagacggggaggcgggaggtcgcggccgcccagggaagctgggggtctgcagagtttgggtgcggcagagtggggcgtttcgcgccaccgtccccatggggatgtcgtgtccgcagagggggctggctccgggtgggtcgaggcgggagccgggcctgcccggcgccccagcaccggcccccgggctacctgggcctcccgggtgcgccttcggctcgcgcgcgcccctccgcggcggctccaccgcccgggatggtacggtccggcagccgggccgcgcgctgccgcccctcggtgagctggtgtgggccgccgctagcggagacgaccctttccactcgcgtggtgccgtggtaagcctcgtccctcgcccgccgcctgttttcaggcgtagcgtctcgtccggtccttgctccccctccccgcagcgctcagtggtggtggccgcgacgagttccggttccggttgctgccgccgctggcgggcggcgagtctggagagagcgcgcagtttgcgcggcggctcggcgcttccctgtcgtcgcactttgtggttgctgcagctcgggggcctgggctgcccctgacaccccttctgggcgatggtgcagcccaagggcgcctccatcccccgccgctgccgctaacccgggtcccc

SEQ ID NO: 2804 - DNA, 2300 bp, Homo sapien
tttctcacttcactgacctgtctattcctacaactgtctctttctagagaagcctcaatgatcaggattgacaggccacactctcccccaccatttttttctcctccttcaagcctcttgtctgtttcaccctcttccaccttggaggctgaggtcttatttgactcttcacctgaattgaccttcttccttcccaccctcccaggttcggactaaggatcaccgctttgaaagtgtcagtcaccttatcagctaccacatggacaatcacttgcccatcatctctgcgggcagcgaactgtgtctacagcaacctgtggagcggaaactgtgatctgccctagcgctctcttccagaagatgccctccaatcctttccaccctattccctaactctcgggacctcgtttgggagtgttctgtgggcttggccttgtgtcagagctgggagtagcatggactctgggtttcatatccagctgagtgagagggtttgagtcaaaagcctgggtgagaatcctgcctctccccaaacattaatcaccaaagtattaatgtacagagtggcccctcacctgggcctttcctgtgccaacctgatgccccttccccaagaaggtgagtgcttgtcatggaaaatgtcctgtggtgacaggcccagtggaacagtcacccttctgggcaagggggaacaaatcacacctctgggcttcagggtatcccagacccctctcaacacccgccccccccatgtttaaactttgtgcctttgaccatctcttaggtctaatgatattttatgcaaacagttcttggacccctgaattcaatgacagggatgccaacaccttcttggcttctgggacctgtgttcttgctgagcaccctctccggtttgggttgggataacagaggcaggagtggcagctgtcccctctccctggggatatgcaacccttagagattgccccagagccccactcccggccaggcgggagatggacccctcccttgctcagtgcctcctggccggggcccctcaccccaaggggtctgtatatacatttcataaggcctgccctcccatgttgcatgcctatgtactctacgccaaagtgcagcccttcctcctgaagcctctgccctgcctccctttctgggagggcggggtgggggtgactgaatttgggcctcttgtacagttaactctcccaggtggattttgtggaggtgagaaaaggggcattgagactataaagcagtagacaatccccacataccatctgtagagttggaactgcattcttttaaagttttatatgcatatattttagggctgtagacttactttcctattttcttttccattgcttattcttgagcacaaaatgataatcaattattacatttatacatcacctttttgacttttccaagcccttttacagctcttggcattttcctcgcctaggcctgtgaggtaactgggatcgcaccttttataccagagacctgaggcagatgaaatttatttccatctaggactagaaaaacttgggtctcttaccgcgagactgagaggcagaagtcagcccgaatgcctgtcagtttcatggaggggaaacgcaaaacctgcagttcctgagtaccttctacaggcccggcccagcctaggcccggggtggccacaccacagcaagccggccccccctcttttggccttgtggataagggagagttgaccgttttcatcctggcctccttttgctgtttggatgtttccacgggtctcacttataccaaagggaaaactcttcattaaagtccgtatttcttctacctctgcctcttaacccttctgggaagcctattgtgtacgccgcgggccctcagcggcagacggggaggcgggaggtcgcggccgcccagggaagctgggggtctgcagagtttgggtgcggcagagtggggcgtttcgcgccaccgtccccatggggatgtcgtgtccgcagagggggctggctccgggtgggtcgaggcgggagccgggcctgcccggcgccccagcaccggcccccgggctacctgggcctcccgggtgcgccttcggctcgcgcgcgcccctccgcggcggctccaccgcccgggatggtacggtccggcagccgggccgcgcgctgccgcccctcggtgagctggtgtgggccgccgctagcggagacgaccctttccactcgcgtggtgccgtggtaagcctcgtccctcgcccgccgcctgttttcaggcgtagcgtctcgtcc

SEQ ID NO: 2805 - DNA, 2300 bp, Homo sapien
ttcctcctggccccgtttgcccagccttccctgctggaaacattcctgaggctttcgccatttcctgccacttcccgcccctgtcccctcctcccagttgggctgcgaagccacacacagcttttcccctacacccaatcacctggacttccagtaggcaatctcctttctccctatgtaaatttcaagagtcatacgtctttcttttcttccgaacgcccacacccgttggtccttccctggctctggatactgtaggctcccacagaacatcatctctacagatgagggacatcctagtgtgtgtttgtgtgttttgggggtgtgaggctatggtggaatcctttcctcattctctctatgcccgagagctggctggaaatgaagtgataaaattccttctcaggattggctggcagagtgacaaagctcttctggaatgagcactaaggggagatgtaagagttaagcacagcatctaacacacttcaagtgttaatgttgttaatcaggataattatctatctatattttaattctctgaagtaaatctaagggtaattccaaggtgagctggggggaatacgtatttttttttttttgagacggagttttgctcttgtcacctaggctggagtgcaatggctcgatctcggctcactgcaacctccgcctcctgggttcgagcgattctcctgcctcagcctcctgagctgggattacaggtgcccgccaccacgcccagctaatttttgtatttttagtagagacagggtttcaccatgttgaccaggctggtctcgaactcctgacttcaggtgatccacccgcctcagcctcccaaagtgctggtatcacaggtgtgagccaccgcgcccggtaggaatacgtatctttgtttttttttttttggtcactttccagctttgcctgtggcattctccggaagagcagtggcaggaagccgtgggtggcaggaatgggtttgggactgttccctgtgtccagcttcaacccatcttctcctgacacccctttctcctgtacttatttttctcctgtccttattgacgcagatgtgtcttctgatctctctgtcccttcctggcctgtagtttctacttctcttggagaactgtttcttccacctcctccagccaggctccttccctggtgtgaaggatgctgtgctctttggtggggcttagggccctgtaagaggagggatgtgaattggggtggtttggagtgggagtggggacctgattgcctcattctcacccttgacagtgtgctgtgttaacaagccctgtggaaaggggagacaggacagtgcttggctatgagccatcggtcttggtgtggtagatggcatacgtagagaacaagccgtgaccagcatgtcctcttgttcccttcttgcctggtagcttcctgatgtatcatccaggttgaactttattccccttttttcaccagctttgctcttcctcttggccctgctctgcatccattgggaccacttacttcccatccccacttcgctagctccagtccacagctgctgtagcagaggatgctaatggcccaggcttactgtatggggtagcggttgggggtggcctgggctggggccagccagctttcgggcatagagagggtgggggaattcgagtgtccaaccaggacaggaagggaaatgctgagctctgagatctcctcccttttccacccccagctgcctctgtttcctccctcattcccctgtactcctgcctggcttcctgccccctttggcctgcgtgtgtccggttttgagtgacccagacctcctatctccttcctttccgtcccactcttccatccttccctcccacccccactttacttctccccagattactagttgtttgtatagggcaggggagaggggcttggatagccctaccccctgctccagttcgaggttggggcggggtgggggctcagcccctctgagcctgtgagtcagcactgtcctcacgattggtctctccccttagctccccgcccctggggaggagccagaagcgctgggtccagcctgttctcttctcagccagagaagaggctccacgttgggcggggatggggcctgaaactgtctgggtctgagctggggagcggaagccacttgtccctctccctccccaggacttctgtgactcctgggccacagaggtccaaccaggctaagggcctggggataccccctgcctggcccccttgcccaaactggcaggggggccaggctgggcagc

SEQ ID NO: 2806 - DNA, 2300 bp, Homo sapien
tgtgggagcctacagtatccagagccagggaaggaccaacgggtgtgggcgttcggaagaaaagaaagacgtatgactcttgaaatttacatagggagaaaggagattgcctactggaagtccaggtgattgggtgtaggggaaaagctgtgtgtggcttcgcagcccaactgggaggaggggacaggggcgggaagtggcaggaaatggcgaaagcctcaggaatgtttccagcagggaaggctgggcaaacggggccaggaggaatgcccagacaagaactctggttagggggaggggaagagacagagaagtagcgactgaactgtcccttaaaaaaaaaaaaatcaaacaacaaaaagagcactattatctacccccactccaaactaccgttcttctggtagtagaaaacttttgctcatgtcacacccacatgccacacaccaacaaatccatggtcttatccacttatgtctaggaaggcctagagctacttctgggatgaggttggtcctgggaagggaaagccaggaagtgaggctgggagtctgagggcaagtctctctctccctctcgtgccaaaccccacgttcagccctttcaaatagttctacccttggaggaggttaagaaagaggaaaacggggacgggcgcagtggctaacgcctgtaatcctaacacttaaggaggctgataagggtggagcacctgaggtcaggagttcgaggctagcctagccaacatggggaaaccccgtctctactaaaaatacaaaaattagccgggcgtggtggtgggcgcctgtaatcccagctactcaggaggctgaggcaggagaatcacttgaactcaggaggcggaggttgcagtgagccgagatcgcaccattgcactccagcctggacgataagagcgaaactccgtcttaaaaaaaaaaaaaaaaaaaaaaaagatagaaaggaaaacggaaaacggctgcctttaatctcactccttacagccagagatgggaactttgacttcccacctgggggagcacgagagtgctcggaaaactgatcccaaggcccaaaaagagaaaggacaggaaaatataagcaggtggagtttcagggattgacgacaaggcttttcagctgatgacccaggtcccacaaagataaagctcctaagggggcgtggtcccctaaggacgcgaacttcagacttctgggcggggaggctttctggacagtcagacgtggattacggagggggcgtggcttcggaggggcggagcttcaacaaattcgaatcgttctttgaagagcagggttttgcccttttgggagataggccttttgacaggagttagccgaggatcgttgctaggaggcggagtttcggagaatggaaggagtaacgaagggtttctcgtagtagggcttggaacgtgtcggggggtggggacttccagaaaaactgggcgacagggtggggtcggagacaaaaaataaaaatcaagtcggggttcgggggagccccctgaagttgggaggtgggacttccggggagaggggtctcaggggcgggacttataaatgaagaccggaagtggggtcccgggagaggggttccggggtgaaagagtgagtcacctaaggagaaaaaagtcaagactcaccagggcctcatggagtctccgcaccgcaccgcgggccgatttggtgccggatcacgccactgccagcttaggttaccgctccaactttctccccgggccctgcctccctggagaaactttattacactcacttccggcctcactaacccctgaccctctacctcagggtccctccttcacgcttcccactttcccgagttagccaatggcagcgcgagatcgcgcacaaaggcagtggtggccaataagacgcctacttttgacccacgctcgttcttgagaagcgtgagaactgccctccaataaggatccgaagagaagtaaatctaagccaatcggaggcttgaaagtagaggtgtcccgcctcgagccaaacggaccaataggaagtgcgggcggcgtgtttgaaagcgaggccaaagtgggtgggagcgcgtgctgttgggagttgcttggaggttggcggcgcggggctgaaggctagcaaaccgagcgatcatgtcgcacaaacaaatttactattcggacaaatacgacgacgaggagtttgagtatcggttagtgctggcgcgggagcaatagcgagggtcgtgagctttggccgctgagggcacaaggaattagtaacaggaa

SEQ ID NO: 2807 - DNA, 2300 bp, Homo sapien
aaagccctgaactaggctgggtgaagagacacaagaaaagcaagttttcattttatgttctccaactgaggagacaagatacaaaccaggaagtggtcttaattattacaattaatacagattagcataatgccaacatttgtggaatcctgtgtcttcccttattcccaatctagattatgcacttaaaatttatcaagcccgaatgccacatccagtgccaggattccatcatcaccatccttggcagatggctatccagtgtcttctaaacaatttcagtcaagaggtgcttcctcccacatacctttttcttagagtctcatctcaggctctgccctctaggaagctttccccaacattccctcttccgtttttcctctcagtattttaagtttcatgttcaagggtacatgtgcaggtttgttatataggtaaaatcctgactcgggggttcggtgtacaggttatttcatcacccaggtactaagcatagtacccgacagtttttttttttcctgaacctctacctcctcccaccctcctccctcaagcaggccccaatgtctgttgttcccctctttctgtccctgtgtttttatctccgacatataaatgaaaacacgcgtagtttactactggtttcgttttcaatggtggtgaaagagacatcacgctgaattggcccttaggacactcccccgcccccaaaccaagcccagggaagaagaccgaccgaaagtaagaggtcagcctccaaggcggtggcggggcggggggcgttctcgaagcgtgggatgggggagcgtcctggagttagcaaaagtaggggactgactttctagccccacctcaacccccgctcacagctaggaagccgcagccttcgggtcgccagttccctctccttagcaagtcttgtgtgctcccatcacaccctgtaatggctccttgcatagcgtgtgtcacctttctggtgtctgtcggtaccacccacagatttttaaatttgtgaacagcagagaccatgtgttatccttgcactttagcagaacacctgaaacctgttaagtattccgtaactgttccctttgatatttaaagggcatctattagacccatattaagtattttctcaatgctcctagccagttttattccattgcagtcccaagcgatccccttccttacacaagccagacaaccacgccccttgtctttttcacgagttaataagcaatattcaactctctcagcgctactctcctgttagggacgccaggaaacttccagctccgcttttgctacgttctcccactggattcgacaagattactgtgaaacagtctctacaaggcaagttaagtttgcccgataaagttcagagaatgatccagaaagcctcatgggtgagggtggtcagtaccctaaccacgcccacccctctctcctctctactgagaggcgactccaaattcgcaaccactttgttttacgagcgcctcccacctccgcgcatgcgccttacgccttccacaatatcacaccattgcccgttcgcacctcgtacgcatgcgccaattctatcgcctcagttcctgttactaattccttgtgccctcagcggccaaagctcacgaccctcgctattgctcccgcgccagcactaaccgatactcaaactcctcgtcgtcgtatttgtccgaatagtaaatttgtttgtgcgacatgatcgctcggtttgctagccttcagccccgcgccgccaacctccaagcaactcccaacagcacgcgctcccacccactttggcctcgctttcaaacacgccgcccgcacttcctattggtccgtttggctcgaggcgggacacctctactttcaagcctccgattggcttagatttacttctcttcggatccttattggagggcagttctcacgcttctcaagaacgagcgtgggtcaaaagtaggcgtcttattggccaccactgcctttgtgcgcgatctcgcgctgccattggctaactcgggaaagtgggaagcgtgaaggagggaccctgaggtagagggtcaggggttagtgaggccggaagtgagtgtaataaagtttctccagggaggcagggcccggggagaaagttggagcggtaacctaagctggcagtggcgtgatccggcaccaaatcggcccgcggtgcggtgcggagactccatgaggccctggtgagtcttgacttttttctccttaggtgactcactctttcaccccggaacccctctcccgggaccccactt

SEQ ID NO: 2808 - DNA, 2300 bp, Homo sapien
atcccaatactttgggaggccaaggcagggaatcacttgagcccaggagttcaagaccagcctgcgcaacatgaccaaactccgtctctactaaaaatacaaaaattagccaggcatggtggggcgcccctgtggtcccagttactctggagtctgagatgggaggatcacttgagcccaggaggtcgaggctgcagtgaacggtgcttgcgccactgcactcgagcctgggcaacagagagaccctggttcaaaaaaaaaaaagggagggggggcttattacttaaaagaatggtctagacacctgatcacctgggtccaccattcactgtgttttgtggttgtgtggcatcccttcacctttctgagcctgttcctcatctgtaaaatgagcatgatgtgtatcttacagggtattttttttctttttgatggagcctcgttctgtcgcccaggctggagtgcagtgacacaatctcggctcactgcaagctgcgcctcccgggttcacgccattctcctgcctcagcctcctgagtagctgggactacaggctcccgccaccacgcccggctaattttttgtgtttttagtagagacggggtttctccatgttgatcaggctggtctccagctcctgacctcaggtgatccgcccgcctcggcctcccaaagtgctgggattacaggcgtgagtcaccgcgcccggcctttttttctttttttcaattgagagaactcaagcaatcctccctcctcagactcccaaagtgctgcgcccgaccaagggttttgaagagtaaaatttggcaaggtgtggtttaccagtcctacaaagaatgaattcggcccggcgcggtggctcacgcctgtaatcacagcactttgggaggccgaggcgggcggatcacgaggtcaggagatcgagaccatgctggctaacacagtgaaaccccgtctctactaaaaaaaaaatgaaaataaaaaaatttttaaaaaaaagccgggcatggtggcgggcgcctgtagtcccagctactcgggaggctgaggcaggagaatggcgtgaacccgggaggcggagcttgcagtgagccgagatcgcgccactgcactccagcctgggtgacagagggagactccgtctcaaaaaaacaaagaatgaattcgggcccttaccattcaaaatgtagtccatagagcagtgggatcaccatcacatgggaactagctaaatgcagatctcaggccccacccaaacctactgaatcaatctgcatatgaaaagatccccagattattgttggaaaaaagtttaagatgtacttttagaacaaaggcaactgaaatgggggtaagctcggatgatgtgaggatccagagtaaacatgtaaggcactccctattcgctgcctcatttgcacctacaagaccaattactgggaaaggtcatttgaactaagcaccatctggagcaaggtggaggaagagagggtttttggactctttcttgtcaaagagatttaagtaattcgttttgtctactatactagagataaattaaggttccacacatcaaaagctcacctactccagggtcttcatatccgacagacagtggtaataatctttctcggtgtccctccaacttccttctgctataaataagatgctttctcactccagtaaaagcccttagcctagtgttagagtcacggtgaatgaaaacagcttaaaccatggctaactgacccattaaacaaaacaaaacaaagcaacacatgcataacaattatttgaatccagcaccagaaactccccgagggccttacagcacctttaactacggctcctttcccgccctaaactcccgaggtcccgcccccgaccgtgggctaaggtccggcccccgtatttccgggcgagaagtgaccacgtggttgtcgcctataacaatccggccctgctcccatccactggctaaagcctgagagcgacagttgaatacaccaatgggaccctggaagagtctaagcgacagccaaaatcaccattcaatgtcagctaggtgcaaggcgggactttaagtacggaagctgccccgggacatgaggaaaggaacaagggaaagagccggtgaaggggcagaacaggcaggtgagagtctaagagggctcagtaatctgaagcttggtgggaagaagggattctgggctagaaagggtgcagaagcctgaagtagaaagagacgggattttggtccggggtggagagcgaatgcattgaaaagggccaaggcc

SEQ ID NO: 2809 - DNA, 2300 bp, Homo sapien
ctcaggtgatccacccgcttcagcctcccaaagtgctgggaggcatgagccactgcgcccggctgtgtgtgtgtgtgtgtgtgtgtgtgtgtgtgtgtgtgacggagtttcgctcctgctgctcacgctggagcgcaaatggcgcaatctcagctcactgcaacctctgcctcctaggttcaggcaattatctcacctcagtctcccgagtagctgagattacaggcacccgccaccacgcctggctaatttttgtggggtttttgtttgtttgttttgagacggagtctcgctctgtcacccaggctggagtgcagtggcgcggtctcggctcactgcaagctccgcctcccgggttcacgccattctcctgcctcagcctcccgagtagctgggactacaggcgcccgccaccacgactggctaattttttgtatttttagtagagacagagtttcaccattttggccaggctggtgacccctatattttaagtgcctactagagtctggtagtgtcctatacatcacatatatgtgattttactaatcttcacaacaaccccacacaaaaatcccacgaagttggcactttttttcttctttaaaattttatttttctgtgtgcatttgttttataaacggggttctcgctatgttaaacaggccagcctcaagcaattctcccacatcagcctcccaaagtgatgggattacaggcatgagcaaccttgcccagccccccacccttttttttttttttttttttttgagacaaagtctcactgtcgcctaggctagagctaattttttgtatttttttgtagagacagggtttcaccatgttgcccaggctggtctcaaactcctaggctcaagcaatcctcccacctcagcctccaaaaatgctgggattacaggcgtgagccaccacacctggtcggcaaaaaatcccaattgatgaaactgggggtcagagaggttgagaaacctgcccagggttacatacctaggaagttgtagagatgggattccagcctaatgcctgatgctcccttactccaaaacacagacccttttttttttttcctttggtgacagggtccctgtcacccaggctggagtacagtggcatgatctcggctcactgcagtctctgcctcccaggctcaagcagcccacccacttcagcctcccaagtagctgggactacaggcatgcgccaccacgccccgctaatttttgtatttttttgtagagatggggttttaccatactgtgccggttggtctcgaacttctgagctcaagcgagccaccccactccacctcccaaagggctggaattacaggcatgagccaccatgcccggccatcagaacacagacccttaaccactaaaccctttgtagacaattagagggagatggggctggaaaagaagatagggtatacgccacagacagccccaaatactctgcaaaggaatttgaactttcttctgtatacagttggaaacaacaaatggcttttgagtccaagagtgatgcaatcacagtgacgcattaaaacggttactccggagacatcagagcactgtggctggaggctgggagcctggccaggaagctgtcgccattgtccaggtgaaaggtgctaaggacctgcttggtggcagtggggacagaaagaagaaagcaggccaggcgtggtggctcacacctataattccagcactttgggaggctgaggcaggaggatcacttgagaccaggaattcaacaccagcctgggcaacatggcaagaccccatttctacaaaaaaaatttaaaatgagctgaatgtggtggcacgcgcctgtagtcccagctactcggaaggctggggtggcccttgaagccaggaggttgaggctgcagtgaactgtgactgagccactatactccagcctgggtgacagagacccagctttaaaaccaaacaaatggattttcccactcttgtgtccagtccaggcccctcagcagcctgaggtggtgtccttcaaagagcagagcactgcatcatcaggtggatgcagccatcatcttcaacccctccccttcatccctacagtactgatggcctcatcttccccttcaacccccagggacacactcaggacaccaacaccttctttctgtgccggacactgcgctccctaggggtccaggtttgccgagtctcagttgtacctgatgaggtagccaccattgcagctgaggtcacttctttctccaaccgcttcacccatgtcctcac

SEQ ID NO: 2810 - DNA, 2300 bp, Homo sapien
cagaggttgcagtgagccaagatggcaccactatactccagcctgagcaacagagtgagactccgtccaaacaaacaaaaaaaaaatacagttattcagttgtactagccacatttcaaatgaccaccatattagacagtagagatacagaacatttccatcatcacaggaagttctggccaggcacagtggctcacacctgtaaccccagcactctgggaggccgaggtgggctgatcaatgcctgtagtcccagctactcaggctgaggcgggaagatcgcttgagccagggaagtcgaggctgtagtgagccatgatcatgccagtgcactccagcctgggcaacagtaaaggccctgtctaaaaaaaatagggctgggcacggtggcacacgcctgtaatcccagcactttgggaggccgaggcaggcacatcacgaggtcaggatttcaagaccagcctgaccaacatggtgaaaccccatctctactaaaaaaatacaaaaattagccggctgtggtggcgcatgcctgtaatcccagctactcaggaggctgaggcaggagaattgcttaaatctgggaagcggaggttgcagtgagccaagatcgcgccactgcactccagcctgggtgacagagcaagactccgtctcaaaaaaaaaaaaaaaaatagggccgggcatggtggcacacgcctgtaatcccagcactttgggaggccgtggcgggcggatcatgaagtcaggagatggagaccatcctggctacacagtgaaatcccgtctctactaaaaatacaaaaaattagctgggcacagtggtgggcgcctgtagtgccagctactcgggaggctgaggcaggagaatggcatgaacccgggaggcagaggttgcagtgagccaagaccacgccactgcactccagcctgggcgacagagccagactccgtctcaaaaaaaaaatagacggtttctccctgtcctcaagctccacccttgcactagagggtggttcaagaatggaaagcagagagtggagaagatgaagtccttctctttctctttgcatacatagagcaagctataccagagaatcagatagcaagccctccctcagaggccaagggagcagaagagccatggatgggccccttcccaggacagcaggggtagaagtgggaaaggtgagcatttgtgactattctattactctgacctcccaggactggacctacagagacatctgggattttctgcgtcagctgtttgtcccatactgtatcctgtatgaccgagggtaagggtattaggggaagggaatgggtaagggagtttttagggtgctgggatagggagggccaataggatcgcccaccctaccacatgcttgccctccaccctccctgctccagatacacatcactggggagtcgggagaataccgtgcggaacccggccctgaagtgcctgagcccaggaggacaccccacataccgtccagcctatctactggagaacgaagaagaggagcggaactcccgcacatgacctcccaccctaggagggagggaaggacaccgtcctagggtataacctggcaataaaccgtgcctctcactgtgcctgttgctctagctgtgtcttcctgctccagaggatgggagaagcagaagtgggtcaaatgctgccagctctgactggctgtgctcactctaaggggcccaggggcagggcagaacaggctggaaaggagctctcactgatggttctcaatgtcagcctcagcaggagcccaccagagggcgaaagcaggagttgtgccaaccactgggaaaagggcaatcaggcagggcaccacctgggctggaagaggggaagctgccttggcctagctgtggaggatgaaagatggagtggccaggccctccctcccactaaccccaccctcccatccctgtctagaggggctgactcagcctgttcccaggcctagaaccttccctttgctagaccctggatcctttgtctctgtagtcatgaggctgaagggggtggggacagtgttgataaaaggcactagaggcagctcccacacccttcctcggaactgttgcccacatgcagccccggacacagcccctagcccaaaccctacccttcttcctcggaggggcccctcgagacactgggctgcgggtgcctgtcattaagatgggcacagggtgggagggcttccagcggaccctgaaggaagtcgcctacatcctcctctgctgctggtgtatcaaggaactgc

SEQ ID NO: 2811 - DNA, 2300 bp, Homo sapien
gtttctgtacccaaaggctggtgccagggagcccgcccttctattgcctctggaagccctggctctgccctccccgggccacgttcccaccccccccgccccccgccccctgccccccgccccctttccttggctatcctccttcctccccaaagcagccccctctccatttcacttgtggcactgccgcctagcccctagcacagcccttcaccaggcctgcacgacccagacggctggagtaggaaggggaaaaccccggcctggacggctccgggcccctccggaccaggatctgtccggcggggctgagaagaaaacccggagcagtgatcagcctcgcgacccaagggggtcagggacgataggaaaacccggagcggattactcgagccagagcgccccatgcctgccgctacctcctccttcctatagcccccctaattctccagtgagataatgtctggggtggggggctgtttggtttggcctgagccctcaggggcgcctcacactttccgcccctggctggggcgcagggcagcggccccgaggctgagtcacggcccggcgcggagagggagagagggagaaagagggagggagggacctggactccgcccctcgtgcgcggggatcccgggtcagcccgggtgagggccagggcccccctggcgccgcccattgtggtccaacaggttgagctggtgtcccgagaagccacctgctggaaagggagggaggccccctgcggaggggggttgggaggggaaagcgagtccgacccggttcggcctggcttgtcgcaggggagccaaacctggccctaggtagccggatttgattccatttgacactagtgggaggggccctttggggtacgcagctccgcaggctcagtcagaaacatccttcacccgctacctttctcagttgggggactcctaagtatttatcccggtcctccccaaaacctacacataccacacatcccaaaacatccaggcacccctcgccacctgggtctctcagcgaattcatgtcaagctatccctcctcggtggagactcagtttctccacttagggaacccgcgggatggaggtggggagcaaaagcgtcggcgcgccccctcccccttcgcagactgggcccctcccctccgacaatgccaaggccgcagcgggcactggcgacagcacagaggctgcttgcctggggcgcccttccctccccgcggggcaccgtcacgcgtggggagggacgcagggcgcccgcaggctcaactccccggctccctccgagagggggtggggcgtaggggccggagccgaaggcctggtggctccccctccccctcccttctaggtccctgacctgattacagcccctcacgggaccccctccctcaagaccctaagtccccaattcacccccacccagcctatccctaacctctcatacccttccctcctgaggtcctgaccctacagaagcccctcttgaaggagagggagcccctgtagggggtgctcgattccctggccgctgcggacactgccccctcccccctcctctccaggttccaggccagcccctcggctccgccccctccctggacgaacgcaaggcgagacctactggagatgagcgggtattcaggccaatgagcggacagggcggtggcgtgcagggggcgggcagagcagcagcaaagggctggatgggggccgggggcggagtttgagttaaggtggactgggagagataggggcaggagaaaggggggggagagagggaccgcggcaggtgaagggagacagagagaaggaaagaaggagggaaaggaggagggtgggaaaggctaggagagctaagtaagagtttggagaagggggcaaaaaaggagggagggacccatctgcgctctgcagggactggctggacgaaggggttgaagtttatgtccttattgggcggagggagggggcctgggggggcgggtgaaaaaccaggaagtgacagagggtgtttctaagtgttggggggggggagtttggggggtggcaggggcggggggagggaggggagggatggggggaaagcaagctggaggacaggtgagacagcaggacaggtgaggcgggccctgaggggggggcgggtgggagccaggtgaatgtacggctcttggcggccgagggggggcgggcggcaggaggaggcagagggcggcggaggaggagccccccagcagcgagcggcgagcaactgaccgcggccttctgaccaggaccggag

SEQ ID NO: 2812 - DNA, 2300 bp, Homo sapien
gccccacccatcccccttaggagggacaggatccacttgggcccaggagggtgcctactgctgcttaagtagctgcagccactgttgctgctgctcctcctgctgctgctgctgcccacctggtttttgtttgttcccaagtctgggggccatttgccacttgtaccatttgtaaagtacaggcaggaggattaaagggagcagggagagctcccagatggcttggttcctagggagagaagtggtttgcggacttacggtgggaacaggtgagctatctaagggtgcctagaggtggcttacaagcaaagaaggacatgcgggtgctgctcacccaaggtttctgtgcaggagccctggccttgcaatgaagagggcaggcagggaggcagacacagagaatgcacttcttgtgtcctaaagaggaaatttgtggcttgactcccccattcacccccccacccaaaaaaaaaaaaaacctttccccatcaatggccaggtctgaacagctgctggagtggcagaggggacactgacaaaatgtcagtgggacttgccttagggatcatctgggccagtctttaatattacatatgaggaacaggcttcctcaggaaaggaagtgacttgtccaaagtcatgtagctagtagtagcttggttccctcagggtgatttgagggagggaggcagacctgtccccaagtagttttcttaacagaggccatctgtatagtggaatctgaccccaggctaggccaaggccagaacatttatcgaatccctactgcatatcaggcattgtgccatatttggtctcatttaaccctcaccacaaccctaggagtcaggtggaattatcctatgttacagatgaggaaggcggctcagagattaaatcacttgtttaaggtcatggagctaactggtggcagagacaggattcaaactcaagcctggctgactccagagcccagttctttccaagccccagcactgtctccagttgctccagacccacaaaatgtcagggctgaaggtctgagccattggggccactacttccaccccctccttgcacagctgaggaaatggaagcacagagagaaatgactttcccaaggtcattcagcaagacagtagcagagccaggatttaaagcaggtctcacccccttccaggccccaacccctgccgacacctctgccagccttggtgctctgcacccacctcctggctgctctgcacccacctcctgtggctgggccttggagggtaaaggatagagagcaggaccaaggccttctggagacggggctctcctggaatagggagggaggggtggcagtagctgagggggaggtggggggtgggactggaacttggcctattggcagtgggggagggggcgggggcgatgcttatctgtgcggggcaggaagcacccgcgccagccagtgacaccccagcaaagggtggctgctccttggccccatgggggaggggaggatgtggggggagggatgctgggagctgtgtttcccgtttggcctggagaagtgggggatctagaaggggagatgaacttttggtagccaggggaggggcaagaggaggaagaggatgatgcttggaagctgccttctcttgtttgcatatgttttacagtgtcctaaccgctttggagagcgataacttgagttaaagcacctgtctgtgcctggcctccagcagatcttggtccagtgtgagtctgaactctctcattggcctctccccaggttatgaggaggttcattacaaagactgttacctcacttttcaaatgactgaggccagctgccagtaccacccccggtccttcagccaattctttatgaagcctgaaccgggacccaggcatcctatctcccagtccactgctccttccaaagagatggggaatggggcaggtgacatagatggacctccatgaaagggccagaaaggcagggctcctgctgccacagaggcagagtagaatagtatagtggttaggaacaaggaccgggcccactccctgagtttgaacactgttctgcacttaacttggaaaatcacttcacctgtctgaacctcagtttccttgtctgtgaaacagatgatgatcatacttcagagggttctggaagatgaaatgagtgtaaagtactcagaagggtgactggcatgcagtcatccctcaataagtattggctaaagttggtcctctttccccagacccctgtgggctgagcgctcttaatctcccctctacttgac

SEQ ID NO: 2813 - DNA, 2300 bp, Homo sapien
ggctggggtcttggttctaacaaagctgtcgcccccagggcagggccggacactactgttggtggctgcttttgggttggtgcttcaagggccttgtgccaacactctacgcaacttcacccgggccagcgaggctgtagcctgtggggcagagctggccctgaaccagaccgccgaagtgctacagagggccaagcaacctcttgtcagtaagtcccccacctctaccactgtctcccacgggcccccctcgcccccctcatcctgcatgttctacagtcctttggcctccttctctgctggtgctaatcgcggagcatctgggcctggaagggactctgggcacagctaaaccctctctccttgctctctggcctcctccactcccagattaacgatctcccaggccccagaatccaggcttcccgcctctggaaatggtggcctcctctctactccctgcttaaggggcaatggtgagaaccagcccctagaggagaagactccaaagtgcctctgtccctcacccatcaggtgccctgaacaagattaaagctattgcccggaagaccaaagaggtggctgaccgggtccgcaagttctttcggtcaatcatggatggtgtgaaacacataggtaagcacattagcatgtctatcccggggactcaaaatgcacccagtcctggccgggtgcggtggctcatgcctgtaatcccagcactttgcgaggccgaggtgggagaatcacttgagcccaggagtttgagaccagccttggcaacatggcgagaccctgtctctataaaaaataaaaaaatagaaaataaataaaactagccagatgtaatgacacatgtctgtagtcccagctactggggaggctatggtggaaggatctcttgaacccaggggtttgaggctgcagtgagctatgatcgtgccactgtactccaatccagcctgggtgacagtgtgagactccatctctaaagaaaaaaaaaagcgggggggccaggtgcggtggctcacacctgtaatcccagcactttgggaggctgaggcggtggatcaggaggtcaggagatcaagaccatcctggctgacatcgtgaaaccccgtctctactaaaaatacaaaaagttagccgggcgtggtggcacgcagctgtagtcccagctactcaggaggctgaggcaggagaatctcttgaacccaggaggcggaggttgcaatgagccgagatcactccactgcactctagcctgggcaacaagagcgaaactccatctcaaaacaaaacaaaacaaaacaaacaaacagaaacaaaaaaattcagtctcctcacctgtaccctgtccagggttttttgggccccttctgggcgctggctagtgttcactggacacagcacagccaggtccctgaccacaggcctctccagccctggatactgtggtattgttccccaaaaccctgagaagaggctgtaggattccagccctgggtgccaaccctgcagctgtccccagccagggctctccggaatgtgtggcagtggctcctgcacatcggcgatgtgtgcaactcggaactgggcaacccttacctgaagtgtgcacgggttttcgatgatgccaaggacagctgcatgatggtcataccacaagcctaccacctgtgttacgtgctcatgcccttcaaactggcgctctgtggacttgccagccgtgagaaaaccagggtctgccagcggggaggagccgatgtggggtggggtggggtgggaatgtgggggtcagttgggagggcaggctcaggaggacgattagagggcaacagagaggaaccaataagcttggtaggaccagtattgggggtgggggtgggcagtagggagggactggtgttgggagagaagggcgacagggaggtgctacaaggttttgagcaaatgtggaggccaataggaaaatcgaaaagaggccctgtgagaagaggtctccagaggtcgggggcaggcctggctgtgcccctccttccgacactcagccgactccgcccctcagtggtccaggtgttctgcgtcatccctaagtacattcaacccttcttgcgccagaccatcggcacccgtgagtgaccccctcctgccacatatggtgctccctagtggtctccctccctcatcccggtgtggccatggccagcccccagtgctcccagcccataaaggagaatgtaagagaaagaaaggggctcaagtgatcacccaggcccatatccatgctgtacagatca

SEQ ID NO: 2814 - DNA, 2300 bp, Homo sapien
catcgccgatgtgcaggagccactgccacacattccggagagccctggctggggacagctgcagggttggcacccagggctggaatcctacagcctcttctcagggttttggggaacaataccacagtatccagggctggagaggcctgtggtcagggacctggctgtgctgtgtccagtgaacactagccagcgcccagaaggggcccaaaaaaccctggacagggtacaggtgaggagactgaatttttttgtttctgtttgtttgttttgttttgttttgttttgagatggagtttcgctcttgttgcccaggctagagtgcagtggagtgatctcggctcattgcaacctccgcctcctgggttcaagagattctcctgcctcagcctcctgagtagctgggactacagctgcgtgccaccacgcccggctaactttttgtatttttagtagagacggggtttcacgatgtcagccaggatggtcttgatctcctgacctcctgatccaccgcctcagcctcccaaagtgctgggattacaggtgtgagccaccgcacctggcccccccgcttttttttttctttagagatggagtctcacactgtcacccaggctggattggagtacagtggcacgatcatagctcactgcagcctcaaacccctgggttcaagagatccttccaccatagcctccccagtagctgggactacagacatgtgtcattacatctggctagttttatttattttctatttttttattttttatagagacagggtctcgccatgttgccaaggctggtctcaaactcctgggctcaagtgattctcccacctcggcctcgcaaagtgctgggattacaggcatgagccaccgcacccggccaggactgggtgcattttgagtccccgggatagacatgctaatgtgcttacctatgtgtttcacaccatccatgattgaccgaaagaacttgcggacccggtcagccacctctttggtcttccgggcaatagctttaatcttgttcagggcacctgatgggtgagggacagaggcactttggagtcttctcctctaggggctggttctcaccattgccccttaagcagggagtagagaggaggccaccatttccagaggcgggaagcctggattctggggcctgggagatcgttaatctgggagtggaggaggccagagagcaaggagagagggtttagctgtgcccagagtcccttccaggcccagatgctccgcgattagcaccagcagagaaggaggccaaaggactgtagaacatgcaggatgaggggggcgaggggggcccgtgggagacagtggtagaggtgggggacttactgacaagaggttgcttggccctctgtagcacttcggcggtctggttcagggccagctctgccccacaggctacagcctcgctggcccgggtgaagttgcgtagagtgttggcacaaggcccttgaagcaccaacccaaaagcagccaccaacagtagtgtccggccctgccctgggggcgacagctttgttagaaccaagaccccagccccaaacatggcagcaagtcccttacataagccttcagaatatttcccttaacccctgcctctcctccagcatctcttctgccccagcaccagccccaggacctgccccctagccctgggtgccaagctcactggagaaggcctgaggcagcagcaggaggacagtggctcggacctggcgagagaatcccatgcccaggctaaggaaggcagccaaagtgagggtgcccaccaggcaaccccaggggctgtggccttccaccagtagctccagaagcccgtaggccgtggctaaagacaagcccagggtaaaacctcccacgctgcgaaccacagctctcgccatgctaggctcctctccccccaaggggtgcacaacatccttcatgactttgggcatggctgctgagaccaaatgtctgcctgtctccaggagatgcccgctgacttctgtgctcctggaatttctcaccgtattctaaggttccaaagggctttcactgcatatgtcttggaatccttgacccagttccgaggactggagaggggataggtaggtctctaatctccttccccacttctcggagcagaaggattaaaaggcccagagctcaggcctaggcttcccatgaagcggaagagacaggcagcacctctcttctctcaccagaaccttgtgtccaaggaggtccttcaggagacctgggatgagtggtgcttcc

SEQ ID NO: 2815 - DNA, 2300 bp, Homo sapien
ccttcctgggcatgcaggacggcgctgtgttccacaggccgcttgagtgttcctggcttttgcccagcactaacccaccaagctgtacaagaacataatcttctgttcttcgtagatgttcatggggttcaccaggagctgaaagagacctaagggcacaaggtcaagccaaaggccaaaagatgggtcctagccctggtccagcctctgcccaccccgaactttctgcttccacactcacctatggccaggagccccccagcgcctgcccccagcaggagagcagtgacaggaaactcgcccggctggcgccacaggaaccagctacaggagactggcagcccccaggtcaggagcctctgcaccgctaagagggggacagggtagctcaacagcccactcttctgcctgggatggggctcattaggattcagggcttgcaggtggatagaggctggggaaacctggcatgtgaaacagtaggaacttaggggaccctggaggaggatgagggagcctgaggaagtggtatgggtgtaagggacagcaaaggcaagggctgggctgggaggcgggaggcactagaccagagaggtggtggaggcgcggacaccgagttgggggatagtgtgcaggagttccaggaggagagatgggatgagagtggaggtcaagggatactgggtctctgctgagtgactcactggtatgaggctgttttcttctttgccctcttgtgccattctgatgatgtttaatgtccatgagtctgttttggggaagcaccactcatcccaggtctcctgaaggacctccttggacacaaggttctggtgagagaagagaggtgctgcctgtctcttccgcttcatgggaagcctaggcctgagctctgggccttttaatccttctgctccgagaagtggggaaggagattagagacctacctatcccctctccagtcctcggaactgggtcaaggattccaagacatatgcagtgaaagccctttggaaccttagaatacggtgagaaattccaggagcacagaagtcagcgggcatctcctggagacaggcagacatttggtctcagcagccatgcccaaagtcatgaaggatgttgtgcaccccttggggggagaggagcctagcatggcgagagctgtggttcgcagcgtgggaggttttaccctgggcttgtctttagccacggcctacgggcttctggagctactggtggaaggccacagcccctggggttgcctggtgggcaccctcactttggctgccttccttagcctgggcatgggattctctcgccaggtccgagccactgtcctcctgctgctgcctcaggccttctccagtgagcttggcacccagggctagggggcaggtcctggggctggtgctggggcagaagagatgctggaggagaggcaggggttaagggaaatattctgaaggcttatgtaagggacttgctgccatgtttggggctggggtcttggttctaacaaagctgtcgcccccagggcagggccggacactactgttggtggctgcttttgggttggtgcttcaagggccttgtgccaacactctacgcaacttcacccgggccagcgaggctgtagcctgtggggcagagctggccctgaaccagaccgccgaagtgctacagagggccaagcaacctcttgtcagtaagtcccccacctctaccactgtctcccacgggcccccctcgcccccctcatcctgcatgttctacagtcctttggcctccttctctgctggtgctaatcgcggagcatctgggcctggaagggactctgggcacagctaaaccctctctccttgctctctggcctcctccactcccagattaacgatctcccaggccccagaatccaggcttcccgcctctggaaatggtggcctcctctctactccctgcttaaggggcaatggtgagaaccagcccctagaggagaagactccaaagtgcctctgtccctcacccatcaggtgccctgaacaagattaaagctattgcccggaagaccaaagaggtggctgaccgggtccgcaagttctttcggtcaatcatggatggtgtgaaacacataggtaagcacattagcatgtctatcccggggactcaaaatgcacccagtcctggccgggtgcggtggctcatgcctgtaatcccagcactttgcgaggccgaggtgggagaatcacttgagcccaggagtttgagaccagccttggcaacatggcgagaccctgtct

SEQ ID NO: 2816 - DNA, 2300 bp, Homo sapien
ctccactcactgcaatctctgcctcctgggttcaagcaagcctcctgcctcagcctcccaagaagctgggactacaggtgtgcaccaccacatccggctaatttttgtatttttagtggagacagggtttcaccatgttggccaggctggtctcaaactcctgacctcaggtgatccacccgcctcagcctcccaaagtgctgggattacaggcgtgagccattgtgcctggcctgtttcttcctctttttttatttttttctgatctttgatattattgtatgaagatgtgatgccagagttgctgcagctatcttgtgacctgaagagaagtggtcaatagactgaagatggcagagaaaagacagaaggaacctgagtccttctcgaagctactgagctgttaaattatccaaactgggctgggcacggtggcttacacctgtaatcccagaactttgggaggccgaggcaggtagatcttttgaggtcagaagttcgagacctgcctggccaacatacagaaaccccgtctctactaaaaatacaaaaattagctgggcatggtgatgggtgcctgtaatcccagctacttgggaggctgagcaggagaatggcttgaacctgggaggtggaggttgcagtgagctgagattgagccactgcactccagcctgggcaacagagcgagactccgtctcaaaacgaaaacaaaaacatacaaacaaaaccaaagcaaaacggctggatgcttgtcatccttgtttactgctaaatcctcagcagattctcagtaagtgctgagtgaatgaatgaatgaatgaatgaatttaatttcttaggaggatcagaaaacgaggtcagacaggtcaggagagatgagagttatgaagggttatggggttggactatatcatgtgggtgatggggagtccctcggaatggagagactccctcagggcaaggacggtgtcttccttcttaaattggcagcctcttccctctggacctccccgtaaagcccaggaggaggcggaagccacaggggatgtatgggtacagaagaaacaagtcccgactccttcctgggcatgcaggacggcgctgtgttccacaggccgcttgagtgttcctggcttttgcccagcactaacccaccaagctgtacaagaacataatcttctgttcttcgtagatgttcatggggttcaccaggagctgaaagagacctaagggcacaaggtcaagccaaaggccaaaagatgggtcctagccctggtccagcctctgcccaccccgaactttctgcttccacactcacctatggccaggagccccccagcgcctgcccccagcaggagagcagtgacaggaaactcgcccggctggcgccacaggaaccagctacaggagactggcagcccccaggtcaggagcctctgcaccgctaagagggggacagggtagctcaacagcccactcttctgcctgggatggggctcattaggattcagggcttgcaggtggatagaggctggggaaacctggcatgtgaaacagtaggaacttaggggaccctggaggaggatgagggagcctgaggaagtggtatgggtgtaagggacagcaaaggcaagggctgggctgggaggcgggaggcactagaccagagaggtggtggaggcgcggacaccgagttgggggatagtgtgcaggagttccaggaggagagatgggatgagagtggaggtcaagggatactgggtctctgctgagtgactcactggtatgaggctgttttcttctttgccctcttgtgccattctgatgatgtttaatgtccatgagtctgttttggggaagcaccactcatcccaggtctcctgaaggacctccttggacacaaggttctggtgagagaagagaggtgctgcctgtctcttccgcttcatgggaagcctaggcctgagctctgggccttttaatccttctgctccgagaagtggggaaggagattagagacctacctatcccctctccagtcctcggaactgggtcaaggattccaagacatatgcagtgaaagccctttggaaccttagaatacggtgagaaattccaggagcacagaagtcagcgggcatctcctggagacaggcagacatttggtctcagcagccatgcccaaagtcatgaaggatgttgtgcaccccttggggggagaggagcctagcatggcgagagctgtggttcgcagcgtgggaggttttaccctgggcttgtctttagccacggcctac

SEQ ID NO: 2817 - DNA, 2300 bp, Homo sapien
aagctcagtgcagttcaagggacaggaggaggcaggtgggctgggagtcaggaaggcctcatgcaggggcacatggtaaggcacatggaatctgaggaagcagactccagtccatactccctcattaagttgtgtcaccttggccaaggtcttcactgagcctcagtttctccctctgaagaatggcaagactggagagatctgtaaggcctgctcactggagatcagcctagagtggtggtcaggtgtgggactccggtgccagagggcctaagtgtgtatcccggctccttccctcattactatgacaacggtgtgaccttgagcacatgacttaactgctgtgcctgggcttttgccttccataaaatggggttaactactccatctggttgttttaaggattaaatgagttgtacttacatggtgctggcatgcagcaagttccatatgcatgcatgttatcattgggtgaccctgggcagtgatcacatctccaagcatcagttttctcacctgaaaaaaaggagatgataataacactatctgccttacatgacaattgaattgaatttttttttttttttgagactaagtctcactctgtcgcccaggctggagtgcagtggcgtgatcttggctcactgcaacctccacctccccagttcaagcgattctcgtgcctcagcttcccgagtagctgggattacaggcacacactaccacgcccggctaatttagaattgaaataatttatgtacagtatcttagtacaggacctgacattataaacaatgagtggcagccattcttatttaatcagtcctaacaaagttcataaaagtgagactgtgtttgcttagctttttccctagggcctggatacccccagcccccatgacacacaataggggccaaatgaatgtgttgtgaaaaaatgaaaaacaaaaaacaaaaaagaacatgctgggattccttgacagggtcgtgaagcaaactgaatgtgaatgcacagatggaaatgtgccagacagtcattccaagcagaatgtgcaaagactcagtccacagggaatgcgaagtgccagggctagtctcaggagaaactggctcagaagagacagctctcagggagggctaaagtaggaaagaggctagaaagggaccaggtgagggaaggctctgaaggccaagcccaagagttctgcctgtctggcaggcagcagggcctctggagtttcttgggcaaagagtggctgcttcctgggtaaggtggcctgtggaaaatccctgacaactgtgtagagacatgtcgtgagggatggcagggagcatagtgaactaggtttgtggtttggaatcagggcccctggggtccagccaagttggattgtttactatctgtgtgactttgagagtcacttcacctttctcaactgtaaagtggggatagcaacagtgatagtcgatctggcctgctcacttctcagcctcactgtgagaaccaaataagatgatttacaggaaagtgcaaatgagagttgtggctgatatccgcttggagagagcctggagggtgcatcctcccattctccatcacagagttggggagggaggcaccctcgccctccaggggtttcctttgtccaacccagcctcctccaacacgcgggaattgtcaggcctggcgacttcagacaggaaacgctgtccagttccccttctttcccgcctcgctcccgggctggcgctaacgcccacctcccaacagcgccacccgctggcggatatcctgcaccgcggctgcccgctcctgcgccgctggctgtgccggcgctgcgtggtgtgccaggcacccgagacgcccgagtcctacgtgtgccggacgctggactgcgaggccgtgtactgctggtcgtgctgggacgacatgcggcagcggtgcccggtctgcacgccccgcgaagagctctcttcctccgcctttagtgacagcaacgacgacactgcctacgcggggtgaagaggcgtcctgctcgctcttccgcaccgtccttcccggttaataaaatgccctgtacgcttcacgtgggtcggggactggggtgagccgcgcactgcctcgcctgcagtcgggaaagcctgcccgcccgacctctccgagccaggccgcgcacaggaggcagggaggccgcgaagctactagggaggggtccggacctggcgccgggtgaaggcgcgccgcccaagccggtcggaccgggcaccggctcccactccgcacagttgcggggaagcgg

SEQ ID NO: 2818 - DNA, 2300 bp, Homo sapien
tggagcattgttctggggggttgtgtgcggaggtcaaggaaggtatctgagccaccccttctcggcttcctgcccagagaggaagcaccgtgtaggacccagcacaagccccagcccttcctctgactcagctttagaatggggtgggggggggggggtttggtaaggtcctgactctttccaaatccccccactgagaaaaccgacaacatgagatgaagaaagcaagtttggcttcacaatttccccagtggagatggatgggttgggtggggctgaggcagacagatacacgtgtgtgcagagggagagggagataagtgaagccaggtgctggggtgtggtgggagaggcagctgggcctgggatagacccactacagtgagctctacccaccagctcctcagccaagctttggctttgagacacctggctataccggggcgtgtgtggattcgtttatttattagaggggagtgagagctcacctgaagcacctttttgaggctaattgggagatcgtcctgaaggacctggggctccaagggctccctcggggccttctctgactctgcctgctgctcctcagtgccacctgcaggtcccaggacaccccaagacagtactgagggaatcgacagcagggctgggggtgacaggtgccctcagatccaccagctcccagcccatcaagacccttaggtacctgaggggcttccacattgcatgctgagacttaaagaagaatactggaaggagagggtgtctctctaatttatggctttccacccaccaacccattcacaagtccccaagaaagactttcggcttgcgcagcctgtggccctccttgtccccttccggccaatcccaggttctcacaggaccctccccggttcccactccctcccaatcactctccccccacttcaggaacgccccctctcgagactgagctaagccttgtggccgggtgcccgctcaccctccccttcgctcacatcggagatgccaggaacgcccatttctgggtgagcagtgcaaacacccccacctccctaaacaccctcatgcccagtcaggcacacccgctgcctacagcctctgcttcctcctcgagcaccccccacccccccaacacacaatggccctctctcctccggacactccacccgcgcctgccctctcggtcccggcccaagacagcagcgggaagtgaaagttccaaggaggagttggtgtcccagcctctttcctggccaattctcccttctcctggctcatctcgggcccctcccgctcggccaggcactggtggcaacagcaccagggtgaggagtgcctggcggccccaggcctggaatagaggctagagagaatcctcttcactaaaccctacaagccatgcccgctcagcgccctggcaccgggtcgaacggttagctaggccccagagcagcgaagatgccagtcctggggagcagcgaccctctcatcacgatcttgaagtggcgctggacaggcccctcggtacctggtacctgagcctgaaagtgtccgcagggaccgcgcagaggatgaccaggcaggaggcagggggcgccggcatcccccctccttctcttttcaccccatcgccaagtcaccgggccctaggcccaggacagcggaccagggcgggccgcgctctggctgggctctcccagggtctccgtccggccccattaccctaatgccttccgactttcctgcacctccctcccagtccgccccccgacccactccaggcggaggactcacctatatttgggagcggccaggaaggcagagggctgcccgcgcccaggagccccagggcccagagcagcgccagccgcatggcagcggcgctccgggccgggcgagggcagcaagtgcggaacagcgcgcggaggagcggccggcggccaggtcgcctcggagaacccagcagcgccgcgcggccaccaggccccgccccggcccgccccctcccacccggccccaagccaagctccgcccccggcaaagcccgccccgctgcgcgccgggtgcctcgggagcggggacaccgcccactacgcccgcgctgctcagcgctaccgcttccccgcaactgtgcggagtgggagccggtgcccggtccgaccggcttgggcggcgcgccttcacccggcgccaggtccggacccctccctagtagcttcgcggcctccctgcctcctgtgcgcggcctggctcggagaggtcgggcgggcaggctttcccgactgcaggcgagg

SEQ ID NO: 2819 - DNA, 2300 bp, Homo sapien
gcagcaaagggtgagcctcctgccttggtttctaccaccatctggtggtcaatggcgggactgcagtcggccagggactgcggttgacctacaccttcctcccctgagacatcagctggcatgcctccaagccctctgcgcatgccctcattctctcctgccccctggctgactttgcatgttgacttgaacccctctggggaatctctgtgcatgtccacagcccctggttatgctctcacagccactgcccctctctctgttcaggctgagctggctgaccgacccaatccccctacccgccctctgcccgctgacccggtggtgagaagcccgaaggtaacggtggggggagagaagggcacggcctctccccccacctagggctgtggtgctggtagccatgacggtggtggccgtggcgagatgccccctcagtgcatgagggcacatatcccggtggtgcctttaatggtgacaggtttgtttgcagacaagggtgaccgctggtgctgcccccaagctggtgttccccagcaccagtgcgttgggggtgggcaacatgacacccccccacctaagccggcctcctgccttctctccctcagtctcaggggccagccaagcccccacccccaaggaagccactgcctgccgacccccagggccggtgcccatcgggtgacctgcccggcccaggggctggaatcccgcccctagtggtaccctccaggtaggaggagccctgggcatgggtgggcggggcgagtgacctgggggaaaggggcctctgactcttttttcttggcttcccgcaatccagaccagcgccaccgcctccgacagtgtcctcgctctacctctgacctctccggaggttccgctgcctccaagccggacttagggcttcaagaggcgggcgtgccctctggagtcccctaccatgactgaaggcgccagagactggcggtgtcttaagactccgggcaccgccacgcgctgtcaagcaacactctgcggacctgccggcgtagttgcagcgggggcttggggaggggctgggggttggacgggattgaggaaggtccgcacagcctgtctctgctcagttgcaataaacgtgacatcttgggagcgttccccagagtttgtctgcttctagaacccgggtcgctcctgctgcggttccaggtttggccgccagaagacgctgccgcctcagacgagggcgggctgtgtggggcgggagtaccagaaagggtcggcgtgtgtccccgggatgctcgcagcttccctctgcccagactggggtggctttcggcgcaatctgtcaagctgttggacctgccgtccccactctgaccattggctgggaaaagtggatctggctgatgctcccagagcccaggagccagggcggagcggggcggcggctgctcccacgatcccaaggccgcgcacctgcctcctccccctccgccgccgccacctgagggatcgggaacaaaggtgctttgtacaggccgcaaccacctcattacttcgtcttagggactggggccgcgtgggcccccagcccggaacgaaggtgtggagcggcaagggacagacgccaatcctaaagtgagcatctagcgcgccacctaaggctctttagggaaggtggtcccagagctgtgttgtcccttccgcttgcactgtccctagatgtgcaaagaaaacggggcagtgcatgaaggtggttggacaggcttcatggatcctcgcccgcgcctcactttcccctatctgggcaaaggttatgtacccttatttaaaatcttccaaacttctaataaggcagtctaccctgcactaaagcagacacgaaagagatgacctccctaaaaatactgctgttggaatacgtccttccttcccgccccctcgcagtgcggtgcagcctcagtggaagctttggcgaacctggcgcgcgctgcggtgcacagagggttaactggagttggcgctgggtggagaggaggagacgcgctcccattggcggaaagttattcaggggcggggtcagtgaatctccgtaccccactcccctttccgcaacttccctcttcactttgtacctttctctcctcgactgtgaagcgggccgggacctgccaggccagaccaaaccggacctcgggggcgatgcggctgctgcccctgctgcggactgtcctctgggccgcgttcctcggctcccctctgcgcgggggctccagcctccgccacgtagtctactggaactccagtaaccccag

SEQ ID NO: 2820 - DNA, 2300 bp, Homo sapien
caaaggcccaaatcagctagcagccctatggatagaggcccaggtagacaaagcactagatcccacggacacaggcctagctaggccctataaagagtatctcaacttcaaaaccagaggcttcgactccatagagagagctgcttaaatcctgtagagagggctccggattctaagagaagggctcagttattattggagggtgggtgtgggggtgccagattctaaagagtacccaggccctatagaaaaaggcccaaattcttaagcagaacctagattcgataaacagggatatatcttttctaaaatggaatttaaagtcctagaccaaaccagcaagttcctgttcactatcaatatgagcagcgtctctgccaactgtgggcccctacagagagaagctgcccttgtggagcagggaatatgatttgagtggagggggctgggatttgtggcacctggagtaagcaggttagcatcatttgggtgaaacaaatctctctggggatgaggagcctgcagggagggagagctgtttgcagagtcccccactcccatcccaaggggcctaatttatttgctggctcctgagaaggaagaagagatctcctggggtggagaggagcccagagaaaacagagactactctcacctggcagcagtcagacactgaacctattctggatagcaccgcccctgcccccagcctagcacctgaggctgacttgtggtcaagactctgtcctgccacagataagcagatagggaggtgcctgcatgttccctctcctgaaggatagaagcaaagtagcagcatgcctgtctccctggacacaggtggttggcttgcgttctgagaacccagtcaggcctggttccgcctggtctgggcctctccaaaagagaagagataagggacagatagccctaggtctggtttctgaacccttttcctgaacttctacttcctagaaagagagaagaggagagcaaggaactgtgtgtgtcaggatgcatgtgggtttgtgtgtgtgttgtgtgtggatggatataggtgtgtgcttgggtgtctctgtgcctgatctctagcagtctgatagtaccctttcctatgtgtgtctggaaggtgtacctgtgtgtccatatgtctgtgtcaggcacctgtgtctctatgttctctgcctttgggtgactgtgccttttttcctgaatgtgtgtgtgtgatgtgtgtgcttgggtgtcactgtgaggacaatgactgtggtgagagctggaacacaaggtgctctgccctctgactcaggatcagcgtctctgagagtaggagtgagaatccctggggacaaccctggctgccccgggaggggccctgcctaagtgccagtgaggaatcctttgtaggtgtccagggaaccctgctttgccccagctgactctctccttgaccccctcctgcgccttgggttctggaccactgaagactcttacagctcccagtattgacattctcaggggctgagctcttttactctgcctccaagataaacaagcctcatgctcagctgggggcttcaggtcaccagctgtcaaagccttggtgccagctgaggacttctccaccacccttctgtgcccacctgagtcctcatgcacacgggaaaagggggcatggacgcagcagagggccacagttttcagaagggaaggggtccagccctacttactaagaggtcctggatccccaacttcttctcaagtcttctccttcccctcattcccagagatgattgggcttccctgagatcgagatccttatcttgggttcccaaatccttctgggaaattcagcctggggagcaaaagacccaggaccagttgtagcaaactgaactcaagaaggagagacgaggcacgcgctggtctttcccgagggggcagtacggtccccacctcccacgcgtcgcgcgctcccgaccggagcgggacggggcctgtcgggggcgcgccaggggcggggcttcgggggcgcgcccaggagggcggagggaagggctgggggcgtggcctaaggctgggggccgacggcggcggcagcagggagctgggaagcggagaagccgggagcgcggggctcagtcggggggcggcggcggcggcggctccggggatggcggcggctccgctgctgctgctgctgctgctcgtgcccgtgccgctgctgccgctgctggcccaagggcccggaggggcgctgggaaaccggcatgcggtgtactggaacagctccaaccagcagt

SEQ ID NO: 2821 - DNA, 2300 bp, Homo sapien
atcgacccccatatggataggggagtggatagagagtgatgggatcaatgccctaagtgagatgagaatactggggacagcaccaaagcagggaaagagggctccgggtcctgtcggtgcgcagaatttccatgcacgcttctgcacccagcttgctccagacctagacgcaggcaagagctgacgtggccccgccagactgggcccagcgagcccgaacctgcctggcccaagcagctgcagcgtgggacttcacacgtccccgcccagtcccagtggtcagagaaaccagggaatccggcccaaagctgtctcctccaggaggcaacccgggccacctgctctaaagagctaccagcatccctcccctcttcaacccccctgctggctccttttcagaacagttatgtccagcagaagttaagttccttcactgaacagtgagtgatttcactcactccacagatatttactgaccatctactgtatgtgctagatgctgtgccaggtgctggcagtaagataatgaacaaaacaaaaacccatgtcctcctggagctttgactctatggaatgcccgaactgggaggcagtactctcgccggggccacgtgggaggtcgacacccaggtgtcctcctaggtgagcaaaaggcgcgtgaggtgccgccctgggagcagtcggcgggtggacttcgtcctgggcgagaggagcgggccgcacctcggacaaacgcttggctgggcacgtcgcctggggcaggtgcccgagggagaggggggtggcgctggccgtgcgcaaaacccggccctgacccggccacggggttagaggccgttggtactctatgtttattgtaaacgcagcgaatacggcctccagcggcctcagcgcacgtggtggtgcagtggggagccggctgggccctccccagctccaggctcctccccggcggggtcagcgccagacttgctgcggcgtccgggccccgcgtaattacaggggctgtagccaggcctggccgtaaaataggaggatgaaacggcctgggaactggagaagctgggccggagctggccaggggccccgggtccgtggcttcccgcgatgcgcagccgcagggaagggccggctgaggatgcgcacacacactcacaacaccaacctggcgcgcacacagccacacaaccacacacgtaaaccaccaaacgcacgcagacacacagcattcggctctcccactccaggctcactcgtgagcctaatcaaacacctgcccgccctctccaccccaggagctgacacccgcccgccaagccctctccagacggcagcagatccaggcggggagaagagccccgagaggcaaattccagtgggtttgtttacacagcgcgggggagggggcctgagccgggtactggggcccgactgactgggagccccagctcagactgggccagctccagctgtgcagcctgaggactgcgcacaaacgcccctccgttccaccccacccccgctgcacgccggtacgcgtctcccctcctcttcacacgctgttcacaaacattagcatacgtctgtcaaagagtttcacacgcttccacacacgcggctgtgatactactcacaaatgctttcatgctagcgcgccatcacacgtatttcatgtgtggttacagtttgtcacccttcatgcccagattctcacagtccatattcaagagcctgttcgcacggtgtacgcgtgtgttgttacatatactcaggttattagcgctctttgacttatctaaaataagaacggccccctctcgagcccagggtcccgcgtgtcgctcctgcgggcaggcactgatgtgatggacagaggcgtccttagccccggccgcacacgttacacactcgatcacacaaagcgttgcactttattcccggcatctaggcgatgacacaatctccagaacaaagacaacattgacaaacccaacaaaaacaaacagccgcgtgtgtgtggggaggggcagtcaagcgcagagtccgggaaggggatgggggaggaggagagtgtgggaacgcgggcgcccgagcctgggcatgcgaggctcagaaaggtgcggggcatgtcaacaacctcgcaccctgcaaggtccgcgcgcggagcagcaaagccgtgtcccgcacccccgcgttcgcagactcgcacttgcgagttcttcccttctcccgcacgcgactgcgcccagggacgcaagcccaccaccgggacaggctcacaaagctccacgcagacccac

SEQ ID NO: 2822 - DNA, 2300 bp, Homo sapien
gacaatccacaggagaagagacttgcagcaggtgggtagctggagcaaactgggcctggggcacaggaaggggtctgcttgaagaggttgggtacaggaggtggctcctttaccaggctgaggctgagggaatcctgttgggctgagagccagtacaaatagtggagccactcacactggtggcctttgccctctcaccttgcagatgacccagaggtgcgggttctacatagcatcggtcacagtgctgccccacgcctcttcccacttgcctggactgtgctgctccttccacttctgctgctgcaaaccccgtgaaggtgtatgccacacctggccttaaagagggacaggctgaagagagggacaggcactccaaacctgtcttggggccactttcagagcccccagccctgggaaccactcccaccacaggcataagctatcacctagcagcctcaaaacgggtcagtattaaggttttcaaccggaaggaggccaaccagcccgacagtgccatccccaccttcacctcggagggatggagaaagaagtggagacagtcctttcccaccattcctgcctttaagccaaagaaacaagctgtgcaggcatggtcccttaaggcacagtgggagctgagctggaaggggccacgtggatgggcaaagcttgtcaaagatgccccctccaggagagagccaggatgcccagatgaactgactgaaggaaaagcaagaaacagtttcttgcttggaagccaggtacaggagaggcagcatgcttgggctgacccagcatctcccagcaagacctcatctgtggagctgccacagagaagtttgtagccaggtactgcattctctcccatcctggggcagcactccccagagctgtgccagcaggggggctgtgccaacctgttcttagagtgtagctgtaagggcagtgcccatgtgtacattctgcctagagtgtagcctaaagggcagggcccacgtgtatagtatctgtatataagttgctgtgtgtctgtcctgatttctacaactggagtttttttatacaatgttctttgtctcaaaataaagcaatgtgttttttcggacatgcttttctgccactccatattaaaacatatgaccattgagtccctgctaagtgcgaggctctctgtgctacaacagtagcaactgggtttgaatttctttctctccaaagaatgtgtgcccctcacgaggccaaaagggtgggatgtttcctcctctgagggctgtccaggaccggagtgctcctgacagctgtctctcgggttctgagctgcactccactctggaagttcttcctatccgacctctaccccactcccactccgtcaccgcagggctttggcatactaccattcaggtactcacgctgtttcggtgagtcagggaagctgggaacgccagctgaggcatgcggccccgccccacagccacactagcagagacgtgtgggaggctgggagggaaagttcccagtaacaagtgggttggaccgggggtcagtgatagaggcgtcagtggattggccacgtcatgtaaagttgacccgagagggagggcaaaagaggaaggcttggtgattcctggtaatgtgttattttgagaaaaagcttcggcagcacactccagaaaaaaacttcccaaaccctgggcaactgaggttctgatgtggagctctggatggaaagcgtgctgaagtcttgttaaactagcaagcttttgtttggaggtccaccgccgaaggcgcacaggcctgtgggaacacgagcgttgagactgggggcgtctagatgatccaaggggtaggcagagtgtgagcagcggcaggtatcggggacacacccgcggagccctaggaaggggactgaccgggacatggaagaggtctggaccagggtactgggaaggcgctcggaggagaggggcgcgagttccggttcggcgtcggagggagggtggggcttcggcgcagtttccggagggacggcccgagcgtgcgggggcggagccgagtgcgcggggcggggctccagagccgcaggtctgggctgcagtaggtcccggcaaccgcaggctcgcggcgggcgctgggcgcgggatccgactctagtcgtaatggaggcgggcggctttctggactcgctcatttacggagcatgcgtggtcttcacccttggcatgttctccgccggcctgtgagagtgcggccgggctgggttggggaggactaggcagtcaggaaaggagagagag

SEQ ID NO: 2823 - DNA, 2300 bp, Homo sapien
taaaaactgcttttgttaattaacatccaggacatacggctgagaaacttcattttctaaaatcatagtcacaaactttgctatttgaaatcagtcagtgcgaatggaacatcctactcttgccagaagttctgagccacgtggattactttggcctcccaaagtgttgggattacaggcacgagccactgtgcccagcctagatagtgggtttttggacactatattctatatttatcttgactttgtaatttccaagtggtccctcagcttggacttcttgatcccttcacttaaagttatgcttacctcgaaccgatcaaaacactgtttcatttaaattttagctagcctatagtatcagccacttgggaggctgaggcaggaggatcacttgagcccagaagtttgagcttcgcctgggcaacataccgagacttcaactctaaataaataagtaaataaattttaaaatataaattttaaagtcaagcctttcccatatcctgttgtattagttcattttcacattactgataaagacatacccgaaactgcaaacaaaaagaggtttaattggacttacagttccacattgctggggaggcctcagaatcatggcgggagacaaaggcacttcttacatggcggtggcaagagaaaaatgaggaagaagcaaaagcagaaacccctgatgaactcatcagatcttgtgagacttattcactatcatgaaaatagcacgggaaagtctggcccccgtgattcaattacctccccttaggtccctcgcacgtgggaattctgggagatacacatcaacttgaaatttgggtggggacacagccaaaccatatcatctgaatgaccatatttcttcctttttaatgagttgccccacagttcttctagtgtgtgatctctctgttgtggcaagttaataaacctaactgtcaaactacagatgtggtctttataagacaggcttatcaattgtctttcctttcttatataactctttgtttcctctgaagttgataattgcctaaccttttctcttactttgttctctctctctctttctctctatacataataaattcatccccaaaactgttctaaagaattatactctttctttcaatgccttcaccacttcaggtaattcttctggtctttcttttcttttctttttttttgaaacccagactcctggagcccttcttcctctggctccaagttatattggttgttgtccttgtaaaaatatgactacctctgttctaacaataatctcaagccttcatggttagttgtcaatgcaactgcttcactgactcctgctttccccctccacctgaaaggggtcgagtctcttgacatctctgtatctccaaagtctatcatggtaatcaagaaatgttctggccgggcgctgtggctcatgcctgtaatcctagcactttggaaggctgaggtgggccagtcacttgaggtcaggagtttgagaccagcctggccaacatagtgaaatccccgttctctgctaaaaataaaaaaattagcccggcgtggtggcgcgcgcctgtaatcccagctgctcgggagacagaggttgcagtgagctgagatcgagccactgtactccagcatgggcaacagagcgagactttgtctcaaaaaaaaaaaaaaaaaaaaaaaaaaaaaaaaggagttctgtcccgcctaggcactatagagagaccctgtcaagaatggaaagaaagaaatcttcgaatgaatgaactagtgaatgaaggaatggatttcagcgctggagaattgagtttaaggggaatggtattatattcccatcttgttgcaacatttaaggatgtcctcaagccccacgccagcctggagcgtagcccaaggtgggaaagcagcgccgaggcctctccagacccggcctgctccccgtttgcggagcacagcccactgtacccccgcctagattgaggcgctggccaggagtacaccaggcgccgccatgtgaactacaactcccagaaggccgcgcggaagcggaacgtgaaccagggaggacttccggacgccaacatccgggccgcgcggggaaggggagacgtggggtagaggtaagtgtaggttgaaggctgaatggggagggcgagagatggggagtgggtctcaaatatagagggggtagcaaggtggaaggggcccttccaccttttgtgggcactcaagttcggacctctgggatcggcgattcccctctggccagggctggttttaat

SEQ ID NO: 2824 - DNA, 2300 bp, Homo sapien
agaccaggtcaaggcttcagtgatcacatccctgcactccagcctaggcgacagagtaaagccttgtctcaaaaaaaaaaaaaaaaaaaaaagagaaaagattaagggcaaccatgatagatctttgttttaccacatgagggttttacatgagattgcatctgctgtgaatttctgagcacgtggcattccttaagtaatctggccttgacacttaatttgctttataaacttaattctccataaataactgaatcatcaattcttgattacatgagcaattgaacaagaattattccaaacaggaaataatctaacagttattctgatttggtcaggattcctgctgccatagatatttggtgcctctagtatttaggctcttcacaattccctcaaataagtagaattctctaatattgagttaacttcacatcagaactccatagtgaacttggtcctgctgcttcttctggtgggaacaaggaccgcctcccagcgaatagatgcaaaacatcagcccaaatttgcctgttcccctcaaaccttccctgggagctggccagaaggtaccaaagtttcttgctttcaaaggccttctcttccagctccaactccaggagctatacaaggtgcagaatcgaaaagcgtcatctgtcttcagacagcttcagtaaatatatttctccttaacaacctttcacctaagcatctggaaattcaatatcatgtttcaggaggttaaagaggagaaagttcaaatactcaagctccaatattcacttactctcagggaagatctttgcttggaatcctttgccaaagacaagattctccagattattgaaggcctggttgagggagttaaggagtagggtgtgcaacggggacagagctgtgtggggaaggggaagggcacatgcctacgtggcccgccccctccaactgcagggaggatacagtgagcgagaacacgaagagacccgaaccaagcaggccgccctggatggtgagccactcggtggaggccagctgacggctgtacatctgcatcccagcaaagagcagcagggacaggagggaggagagcgccagcgaggtgcccgtacccaccactggaggggatgggagaagggacggagagtcaggctccgccctccctccggcaagctacgggcagatcagccggtccggaagctcggtgggccgaccccctccaagaactcccgggactgcagccacacgccccaactccccacaccgcgcggcaacccctacgtattccccagccccggacaccccgaaccctcccgtccggtggaaatgcccgctcccggtggaacccaggacacgtcagctctgtcgggagaggacgaggaaagcttgtccacccaaaccccgaccccctctaggacttcctggggaccccaccggtcctgttacccatcatgccccgcccgtgagtccaaccggcgcctctggccaagaaaggcgagctgaaccgggtgcggttagctatgcgcatgcgtcagcgcttaccgcggacttgctactcctcgcgttctcctctttcttcctctcagtgcctggacgcagcgccctcttgcgacagggaggaaataatgcgtcgagggggcatcctcggccaccgccctggtcctcaggctttcctcgtacctggtgcgtctgctgccactctgtacaaggtgcacttatctctttaagtcattgggcccatgcctgtggcatctatcccatctctgtcttctttgccatttctttcatctctagtgcacgttcctcaaacctccctgccccatgcctcaacatctcccaacctaaaatttagtgctcccaaccaggaactcattttcctccgaaactaatcccccgctttatatgagtaaaattaggagccaatgaaaaatgagaatgtaagaaatggctcccccgtcaaatacctttccatattccccaaccccccgaccggctttcgagaaccacgtggggagaactatttcccaccccctaccccgacgggcgctgttcgaggctggtcccgggagcatgcgcagtgacacctcaacccccagccctcctcacacccccactgggctcctgcattaagcccggggttcgcagccgcagccgggatcgggcacccaggggcgggcgggcacggtagggccatggcagagggtgaggatatgcagaccttcacttccatcatggacgcactggtccgcatcagtgtgagttaaggtggggtcgagggaaggggagggggcgtatagggttct

SEQ ID NO: 2825 - DNA, 2300 bp, Homo sapien
atatcatgtttcaggaggttaaagaggagaaagttcaaatactcaagctccaatattcacttactctcagggaagatctttgcttggaatcctttgccaaagacaagattctccagattattgaaggcctggttgagggagttaaggagtagggtgtgcaacggggacagagctgtgtggggaaggggaagggcacatgcctacgtggcccgccccctccaactgcagggaggatacagtgagcgagaacacgaagagacccgaaccaagcaggccgccctggatggtgagccactcggtggaggccagctgacggctgtacatctgcatcccagcaaagagcagcagggacaggagggaggagagcgccagcgaggtgcccgtacccaccactggaggggatgggagaagggacggagagtcaggctccgccctccctccggcaagctacgggcagatcagccggtccggaagctcggtgggccgaccccctccaagaactcccgggactgcagccacacgccccaactccccacaccgcgcggcaacccctacgtattccccagccccggacaccccgaaccctcccgtccggtggaaatgcccgctcccggtggaacccaggacacgtcagctctgtcgggagaggacgaggaaagcttgtccacccaaaccccgaccccctctaggacttcctggggaccccaccggtcctgttacccatcatgccccgcccgtgagtccaaccggcgcctctggccaagaaaggcgagctgaaccgggtgcggttagctatgcgcatgcgtcagcgcttaccgcggacttgctactcctcgcgttctcctctttcttcctctcagtgcctggacgcagcgccctcttgcgacagggaggaaataatgcgtcgagggggcatcctcggccaccgccctggtcctcaggctttcctcgtacctggtgcgtctgctgccactctgtacaaggtgcacttatctctttaagtcattgggcccatgcctgtggcatctatcccatctctgtcttctttgccatttctttcatctctagtgcacgttcctcaaacctccctgccccatgcctcaacatctcccaacctaaaatttagtgctcccaaccaggaactcattttcctccgaaactaatcccccgctttatatgagtaaaattaggagccaatgaaaaatgagaatgtaagaaatggctcccccgtcaaatacctttccatattccccaaccccccgaccggctttcgagaaccacgtggggagaactatttcccaccccctaccccgacgggcgctgttcgaggctggtcccgggagcatgcgcagtgacacctcaacccccagccctcctcacacccccactgggctcctgcattaagcccggggttcgcagccgcagccgggatcgggcacccaggggcgggcgggcacggtagggccatggcagagggtgaggatatgcagaccttcacttccatcatggacgcactggtccgcatcagtgtgagttaaggtggggtcgagggaaggggagggggcgtatagggttctggggcaagctgggacctggaacaggtggggatccaggaagatgctgggatgtagacagggggctagcgatggcagaaacggctgggagggtcgggatgcaggtatgagagggtaatcccgggagcagcccggaggtgagtgccgtgaaggcgtcggtgtgctggagcgtgaggaggagctaggagcagcccagacgcagcgggtgggctggggtggcctccagcagtgcaccggggctggggcttcaggggaaaggccctgttatgagaagagggacgtgtgagcttggatattttccaagaaaactgaggacaggtgggggatgatgtaggagccgccccacagtgcagttcccaatttggacccctccccaagaccccaccccacgcacccccactcagggctgcttccgagcctgcggttgtcatggcaacccgtgcctggctctcccaggggcggtgccaaccgtgttcccccccaccacttcctccccccctccttgttcctccctcctttgtgtcagctgcgcccctgaccgggatggctgcgaagagagggaccaaggtgaggtgtgggggtggggcatagcctgaggacccccactctcgccaccaagagggggaggggacttccggtggggagggggcgagtaggcggggctcttgattcccccgctagttcggagaagggggtgccgctgaccgggttgcgctgcgggagagg

SEQ ID NO: 2826 - DNA, 2300 bp, Homo sapien
gtgtgcaacggggacagagctgtgtggggaaggggaagggcacatgcctacgtggcccgccccctccaactgcagggaggatacagtgagcgagaacacgaagagacccgaaccaagcaggccgccctggatggtgagccactcggtggaggccagctgacggctgtacatctgcatcccagcaaagagcagcagggacaggagggaggagagcgccagcgaggtgcccgtacccaccactggaggggatgggagaagggacggagagtcaggctccgccctccctccggcaagctacgggcagatcagccggtccggaagctcggtgggccgaccccctccaagaactcccgggactgcagccacacgccccaactccccacaccgcgcggcaacccctacgtattccccagccccggacaccccgaaccctcccgtccggtggaaatgcccgctcccggtggaacccaggacacgtcagctctgtcgggagaggacgaggaaagcttgtccacccaaaccccgaccccctctaggacttcctggggaccccaccggtcctgttacccatcatgccccgcccgtgagtccaaccggcgcctctggccaagaaaggcgagctgaaccgggtgcggttagctatgcgcatgcgtcagcgcttaccgcggacttgctactcctcgcgttctcctctttcttcctctcagtgcctggacgcagcgccctcttgcgacagggaggaaataatgcgtcgagggggcatcctcggccaccgccctggtcctcaggctttcctcgtacctggtgcgtctgctgccactctgtacaaggtgcacttatctctttaagtcattgggcccatgcctgtggcatctatcccatctctgtcttctttgccatttctttcatctctagtgcacgttcctcaaacctccctgccccatgcctcaacatctcccaacctaaaatttagtgctcccaaccaggaactcattttcctccgaaactaatcccccgctttatatgagtaaaattaggagccaatgaaaaatgagaatgtaagaaatggctcccccgtcaaatacctttccatattccccaaccccccgaccggctttcgagaaccacgtggggagaactatttcccaccccctaccccgacgggcgctgttcgaggctggtcccgggagcatgcgcagtgacacctcaacccccagccctcctcacacccccactgggctcctgcattaagcccggggttcgcagccgcagccgggatcgggcacccaggggcgggcgggcacggtagggccatggcagagggtgaggatatgcagaccttcacttccatcatggacgcactggtccgcatcagtgtgagttaaggtggggtcgagggaaggggagggggcgtatagggttctggggcaagctgggacctggaacaggtggggatccaggaagatgctgggatgtagacagggggctagcgatggcagaaacggctgggagggtcgggatgcaggtatgagagggtaatcccgggagcagcccggaggtgagtgccgtgaaggcgtcggtgtgctggagcgtgaggaggagctaggagcagcccagacgcagcgggtgggctggggtggcctccagcagtgcaccggggctggggcttcaggggaaaggccctgttatgagaagagggacgtgtgagcttggatattttccaagaaaactgaggacaggtgggggatgatgtaggagccgccccacagtgcagttcccaatttggacccctccccaagaccccaccccacgcacccccactcagggctgcttccgagcctgcggttgtcatggcaacccgtgcctggctctcccaggggcggtgccaaccgtgttcccccccaccacttcctccccccctccttgttcctccctcctttgtgtcagctgcgcccctgaccgggatggctgcgaagagagggaccaaggtgaggtgtgggggtggggcatagcctgaggacccccactctcgccaccaagagggggaggggacttccggtggggagggggcgagtaggcggggctcttgattcccccgctagttcggagaagggggtgccgctgaccgggttgcgctgcgggagagggcgggagggcctgatgggggcgaaggggaatgggttggtaagaccgatggggaagtgaaggatggggaatggaggctggagtggccgcaggccggagctgcggcaggaggacgtatggagcgagcaggatggagtgccaacctcgcctggcta

SEQ ID NO: 2827 - DNA, 2300 bp, Homo sapien
ttgacacactgggcacagcagttccttctccatgttcttcatgctggtctgtggagggaccaggaggctaggtcagcgcttggacacttaggcatacctcagcagccccttggctgcccttggataccctaggggtctgaggaaggagcaagacaagctacctgcagcttttccagagcacctgccttgggctggttcacagaccttcccagacctctgtcccttgcttctctttccccgctgcagagctaaaggcccagaggagggacggttggagcttgtgcctgctccagcctcaagcccaatccccatttctccagctgcagtagccccagctggcagccccctcacctgcctccatcccccatctctgggcagcttgcccctggcatttttctcaaggacaccgcccattctgcagctccatgcagacccccactcccttctctagcagcacccccatgccgtgattcctcccgatagccaggcgaggttggcactccatcctgctcgctccatacgtcctcctgccgcagctccggcctgcggccactccagcctccattccccatccttcacttccccatcggtcttaccaacccattccccttcgcccccatcaggccctcccgccctctcccgcagcgcaacccggtcagcggcacccccttctccgaactagcgggggaatcaagagccccgcctactcgccccctccccaccggaagtcccctccccctcttggtggcgagagtgggggtcctcaggctatgccccacccccacacctcaccttggtccctctcttcgcagccatcccggtcaggggcgcagctgacacaaaggagggaggaacaaggagggggggaggaagtggtgggggggaacacggttggcaccgcccctgggagagccaggcacgggttgccatgacaaccgcaggctcggaagcagccctgagtgggggtgcgtggggtggggtcttggggaggggtccaaattgggaactgcactgtggggcggctcctacatcatcccccacctgtcctcagttttcttggaaaatatccaagctcacacgtccctcttctcataacagggcctttcccctgaagccccagccccggtgcactgctggaggccaccccagcccacccgctgcgtctgggctgctcctagctcctcctcacgctccagcacaccgacgccttcacggcactcacctccgggctgctcccgggattaccctctcatacctgcatcccgaccctcccagccgtttctgccatcgctagccccctgtctacatcccagcatcttcctggatccccacctgttccaggtcccagcttgccccagaaccctatacgccccctccccttccctcgaccccaccttaactcacactgatgcggaccagtgcgtccatgatggaagtgaaggtctgcatatcctcaccctctgccatggccctaccgtgcccgcccgcccctgggtgcccgatcccggctgcggctgcgaaccccgggcttaatgcaggagcccagtgggggtgtgaggagggctgggggttgaggtgtcactgcgcatgctcccgggaccagcctcgaacagcgcccgtcggggtagggggtgggaaatagttctccccacgtggttctcgaaagccggtcggggggttggggaatatggaaaggtatttgacgggggagccatttcttacattctcatttttcattggctcctaattttactcatataaagcgggggattagtttcggaggaaaatgagttcctggttgggagcactaaattttaggttgggagatgttgaggcatggggcagggaggtttgaggaacgtgcactagagatgaaagaaatggcaaagaagacagagatgggatagatgccacaggcatgggcccaatgacttaaagagataagtgcaccttgtacagagtggcagcagacgcaccaggtacgaggaaagcctgaggaccagggcggtggccgaggatgccccctcgacgcattatttcctccctgtcgcaagagggcgctgcgtccaggcactgagaggaagaaagaggagaacgcgaggagtagcaagtccgcggtaagcgctgacgcatgcgcatagctaaccgcacccggttcagctcgcctttcttggccagaggcgccggttggactcacgggcggggcatgatgggtaacaggaccggtggggtccccaggaagtcctagagggggtcggggtttgggtggacaagctttcctcgtcctctcccgacagagc

SEQ ID NO: 2828 - DNA, 2300 bp, Homo sapien
tttgagaccagcctggccaacatggtgaaaccccgtctctactaggaatacaaaacttagccaggcgtggtggtgcgtgcctacaattccagctactcgggaggctgaggtaggagaatcgcttgaacctgggaggcggaggttgcagtgagctgagatcgcgccactggactccagcctggacaacagagcaagactccgacgtctcggaaaaataaataaataaataaataaataaaggccaggcaaggtggctcacacctgtaatcccagcactttgggaggccaaggtgggtggatcccctgaggttgggagtttgagaccagcctgaccaacatggagaaaccccatctctactaaaaatacaacattagctgggtgtggtggcgcatgcctgtaatcccagctacttgggaggctgaggcaggagaattgcttgaacccaggaggcggaggttgcggtgagccgagatcgcgccattgcacttcagcctgagcaacaagagtgaaactctgtctcaataaataagtaaataaaatacgtaaaaaataaattatttttggctgggcacagtggctcacgcctgtaatcccagcactttgggaggccgaggtggatggatcacgaggtcaggcgttcaagaccagcctggccaacatagtgaaaccccgtctctactaaaaatgaaaatgaaaataattagctgggtgtggttgcaggcgcctgtaatcccagctacttggaaggctgaggcaggagaatggcttgaacctgggaggcaggggttgcagtgagccaagattgcgccactgcactccagcctggggaacagtgtgagactccgtctcaaaaacatatatatatttttaaaaaatgataatgcttacctcatagagttgcaagaattcaactggtttgagacgatcaatgggagtctgagtacagtgtccggctcatggttagggctcaagaatgttactaaagtgactagaaaatagttcggactccagggggtgggcataagagggaagccttgccacccaaataggggctgggtataagggccaggtgtgaacccagagtatgggctggaaggcacagattgatggtgatgggaatgtcaccaggtggaacagaatagtgggaactgtccatggggctggccacaagtaaggggttcgagggagccccatgagtcagccaggtccggagcactgacttctgtgcccactgccatcacaaaaactctctggggtcccacgcccatttggaatgcccccttcttttttcctcatgccccccattccagtttcccatgtcctgttctcctgaaccccctgcctgttcctggtgactgaacccccttgcaacgcgttccctgttctgcagtctcacagcccccagtgccagtgtttgtccctgaagttcttgctccatctcaaccctctccctccttccagtcctgcacttcttcctcgatagccgctggggcgcaagccgagagcggctggctatcagcaaggaccagcgagcagtacggagtgttccagggctgcccctgctgctggctgctgaccggctgctgaccggctgccacctgagtgtggatgtggtcctgggcgacgtggctgtgacccagggccgcagctactgggcctgcgccgtagacccagcctcctacttggtcaaggtgggcgtcgggctggagagcaagcttcaagaaagtttccagggtgcccccgatgtgatcagccccaggtcagacccctctggaagggatggggtgtgggggtcctggtgggagtgaggggcacagaaggggtggcaagtggagcacagacttgctagggtggggctgggaggggattaggaggaagtagtaggagcctggaagccaggctgggaggcctgtgtccaggagacgcatgggctcagcaaaagggcttttgaggactgattttcagagcatgtcgtgtggtcagggaaagggatgatagaagagggagccatctctgcttccttccaaccatctgtcactctggatcaacacaccatctctccaagcatctgtgtcctttcttcctaacactccatttccaacataccttctccataaaacctttgctctccaagacctccttcacccgtatcttaaaattcttcccttagccggatgcggtggctcacgcctgtaatcccagcactttgggaggctgaggcaggcaaatcactggaggtcgagagttcgagaccagcttgaccaacatggagtgaccccatctctactaaaaatacaaa

SEQ ID NO: 2829 - DNA, 2300 bp, Homo sapien
aaggccgctttccgacgcccgggcgttgcgcgcgcttgctctttaagtactcagactgcgcggcgcggagccgtcgccatggtgacgcgtgtcccagcaaccgaactgaatggctgttgcttggcaatgccgggagttgaggtttggggccgcccacctagctactcgtgttttctccggcctgcgagttggggggctccccgcctccccggcccgcgctcccgggcgcgctgacgtcagatgtccccaccccgcccagcgcctgccccagggtctcgccgcacacaaagctgcgcctcgggcgccgcgcggcgcgcgggcgagagcggtggtctctcgcctgctgatctgatgcgctccaatcccgtgcctcgccgaagtgtttttaaagtgttctttccaacctgtgtctttggggctgagaactgttttctgaatacaggcggaactgcttccgtcggcctagagcgcagcctgcgactgcgggacccaagttccacgtgctgccgcggcctgggatagcttcctcccctcgtgcactgctgccgcacacacctcttggctgtcgcgcattacgcacctcacgtgtgcttttgccccccgctacgtgcctacctgtccccaataccactctgctccccaaaggatagttctgtgtccgtaaatcccattctgtcaccccacctactctctgccccccccttttttgttttgagacggagtcttgctctgtcgcccaggctggagtgcaatggcgcgatctcggctcactgcaacctccgcctcccgggttcaagcgattctcctgcctcagcctcctgagtagctggggttacagcgcccgccaccacgctcggctaatttttgtagtttttagtagagacgaggtttcaccatcttggccaggctggtcttgaacccctgaccttgtgatccactcgcctcggccttccaaagtgttgggattacgggcgtgagccaccgtgccacgcccgatctgcctcttaagtacataacggcccacacagaacgtgtccaactcccccgcccacgttccaacgtcctctcccacatacctcggtgccccttccacatacctcaggaccccacccgcttagctccatttcctccagacgccaccaccacgcgtcccggagtgccccctcctaaagctcccagccgtccaccatgctgtgcgttcctccctccctggccacggcagtgacccttctctcccgggccctgcttccctctcgcgggctctcgctgcctcacttaggcagcgctgcccttactcctctccgcccggtccgagcggcccctcagcttgcgcggcccagccccgcaaggctcccggtgaccactagagggcgggaggagctcctggccagtggtggagagtggcaaggaaggaccctagggttcatcggagcccaggtttactcccttaagtggaaatttcttcccccactccctccttggctttctccaaggagggaacccaggctgctggaaagtccggctggggcggggactgtgggtttcagggtagaactgcgtgtggaacgggacagggagcggttagaagggtggggctattccgggaagtggtggggggagggagcccaaaactagcacctagtccactcattatccagccctcttatttctcggccccgctctgcttcagtggacccggggagggcggggaagtggagtgggagacctaggggtgggcttcccgaccttgctgtacaggacctcgacctagctggctttgttccccatccccacgttagttgttgccctgaggctaaaactagagcccaggggccccaagttccagactgcccctcccccctcccccggagccagggagtggttggtgaaagggggaggccagctggagaacaaacgggtagtcagggggttgagcgattagagcccttgtaccctacccaggaatggttggggaggaggaggaagaggtaggaggtaggggagggggcggggttttgtcacctgtcacctgctccggctgtgcctagggcgggcgggcggggagtggggggaccggtataaagcggtaggcgcctgtgcccgctccacctctcaagcagccagcgcctgcctgaatctgttctgccccctccccacccatttcaccaccaccatgacaccgggcacccagtctcctttcttcctgctgctgctcctcacagtgcttacaggtgaggggcacgaggtggggagtgggctgccctgcttaggtggtcttcgtggtctttctgtgggttttg

SEQ ID NO: 2830 - DNA, 2300 bp, Homo sapien
ccacctgggcaaaggcaacaccagtctaacgtgctctgggtccgcaggcttaccatctgagtccttctgattgggattgggtaccaggcggcagttatcgggaccaggaggcacataatctgggatgccatcattgtcatcatccccatcacactcatctccaagtccatcgttatcagagtccagctgggagctatttggcagctgtgggcagttgtccttggtgtcctgatgcccatccccatcgctaatcagaagaacaggtaccaaataaaggatttaaaggtactccttgtccttcccttcgcttctgcctgggagtctctggagcctgctctccatacaatcagacccctggcagtcagccaggtgaggtgaaggtctggcagtaggaatggagggatgactgtaagaataaattcctgctgaatagcaatagagaattaaggctaaatcatagaaggaatttagaatatactatggcctgggcacagtggctcatgcctgtattcccagtactttgggaggccaaggcgggcagatcacctgaggtcaggagttcgagaccagcctggccaacacgatgaaaccctgtctctactaaaaacacaaaaattagctgagcttggtagcacgcgcctgtaatcccagctactcgggaggctgaggcaggaaaatcgcttgaaccctggaggtggaggtcgcagtgagccgatatcactgcactccagcttgagtgacagagcaagactccatctcaaaaaaaaaaaggaggccgggcacggtggctcacgcctgtaatcccagcactttgggaggctgaggcaggcaaatcacgagatcaggagatcgagaccatcctggttaacacagtgaaaccccgtctctactaaaaacacaaaaaattagccgggcgtggtggcaggcgcctgtagtcccagctacttgggaggctgaggcagaagaatggcgtgaactcgggaggtggagcttgcagtgagccgagatcatgccactgtactccagcctgggcgacagagcaagactccgtctcaaaaaaaaaaaaaaaaggatatactagaggaaagtaaaatatcccctataagaccttgcatttcgctggcacagtggctcacacctgtaatcacagcactttgggaggcagaggctggcggatcacctgaggtaaggagttcgagaccagcctggccaacatggtgaaaccctgtctctactgaaaatacaagaattagctgggcttggtagcacatgcctgtaatcctagccactcagggaggttgaggcatgagaatcacttgaccctgggagacggaggttgcagtgagccaagatcgtgccactgtactccagcctaggtgacagagcaagactccgtctcagaaagacaaaaaaaagaaagaccttgcgtctcttgaccaagaccttacctgtcttcattagtatcacagacatcccccaccaggtcgctgtctgcatctgtctgagagagagggacctgttctcaccatctcctcttgataactctgaagagggtgatctgaccactttccatccaaagggctggggcttcatccatcagtaccctcatccctcccctgtccttaccatctccctgtacctgggtaggattgctcatttcagggcagctgtcgcaagcatctcccaccccgtcctcatccctgtctgtctgtagtgggttggggactttagggcaattgtccaatccattggggatgcctagaagacatgggtagcacaaggttgttactagaacatgccatattctctcttctaggttggtgaaagtcccgaactttgtctccccacccagaggacaactggccaggaaatctgcctgtttcttgtctcaccctctagtccacactctgcctaacactacgccctacctcacattcctattgacatctgctgcaggtaatctctcctcacccaggccaacgtccacaagcctgcctccctatttcacagagacttcctagcttccctgcttcatccccacctgatccaaattctcacaggtcccccagccaccccttcagccccaggcctgcaccatccccatccacgtcgttgtcacaggcatctccttccccattgccatctgtgtccttctggtcattgttgggaacgttggggcaattgtcacaggcatcaccaaatgaatctgtatctgagttctgctggtctttgttggggaacagccggcagttgtcctgggcagaggggtgggaggggaagggtcaggtctcccctaaatc

SEQ ID NO: 2831 - DNA, 2300 bp, Homo sapien
gcgggtgtggtggctcacacctgtaatcccagcactttgggaggctgaggtgggctgatccctcaaggtccggagttcaagaccagcctggccaacactgtgaaacctcctctctactaaaaaatacaaaaaattagctgggcatggtggtgggcacctgtagtcccagctacttgggaggcggaggcaggagagttgcttgaacccaggaggtggaggttgtggtgagcagagatcacgccactgcattccagcctgggaaacagagcaagactccgactcaaaaaaaaaaaaaatggggatatactggggccctggccctgctttgggtccatcccttctgccactaccatgcctaggaaccaggaggatttgggttctaacttcctgtgaagcaactcccttagagggccttttgccccatagaaggagctggcactgcttgtctgccagctctgccctcccagcatccagcaccccatctttattctggggctccagccctgtccctgtcctcaccttccttcctccttctcaccaaccaggcctctcttcacttcacctcacccctctgactatgttttcttctcctctccagtgaccaatgcactgcactccattctaggtgagtaggccacactgaagcggaagcggggagcggggaggaggccccaggctctggcagctgcctgaaactaagtcctcttcagtcaggaatgtagtaggtttaaaggcaggggtgggcagccgtggcaggtactggcttattgcccatggagggcccaggactggtgctccagtactgaacccctcacaccctgggtcccgacaggggagcagaccaaggcgctggtcacccaactcaccctcttcaaccagatcctggtggagctgcgggatgatatacgagaccaggtttgggtgggctggcgaagggtggcactgattctggggtagggtggcagatgtcaagtgctgactcctccccatccttctccaggtgaaggaaatgtccctgatccgaaacaccattatggagtgtcaggtgtgcggtgagtgggagagcaggggaggctccacatgaccgtgccacgttccccacccaatggctttggctttcccttctggtggcttaaatagtgaccaccgggtagctctgactgtgtccacccctcaggcttccatgagcagcgttcccactgcagccccaatccctgcttccgaggtgtggactgcatggaagtgtacgagtacccaggctaccgctgtgggccctgcccccctggcctgcagggcaacggcacccactgcagtgacatcaatgaggtgagggaggtcagagcccagaagggtacagaaaactggggtgaggatgtcaggaggcacccaagagggtgggataaatgctggtccggaggagaggaatctggagtttaggagaggtcagaggcaagagaaatgcaagatgggagagacagaaggcctggggcaaagactgaaggccatacagggaaggagctggggaaactgcaggggaggcttgagatggcgaccagtggcatggggagggagagagggaaccccgagggaagtggggtggggaccaggagcacaaggcagttgtgtggggagagctgcacaaaggggagacctggagcaatggttcctggatcacaggcagggacctgagtttcccagagggcggcctgacctctgccttctcatctggtccccagtgtgctcacgctgacccctgtttcccgggctccagctgcatcaacaccatgcccggcttccactgtgaggcctgtcctcgagggtacaagggcacacaggtgtctggtgtgggcattgactatgcccgggccagcaaacaggtcagactgggtagtgtgtgtggacaagggatcttggccttgtagaggccaggggcttctgggttggacatgggacccttgtgatgaatgggacatggatggctttgcatcggctttgggtctgggcttaatgttgatgttcacagataaggccataccagtgtcctctgctgtatctgaggagacccaccataggtctggttccacccaaagtctgccccttcaggtctgcaatgacatcgatgaatgcaacgatggcaacaatggtggctgtgacccaaactccatctgcaccaacactgtggtgagctgaatatcctgagtgtattctggggtggtgggaatggtaaaaccccaacccccgccccttcttaccttcaaatttcctgctgcctttcctcctccccagggcactacacagat

SEQ ID NO: 2832 - DNA, 2300 bp, Homo sapien
gcacagcatctcctttgcgccacctggtgggggcatctcaaatttgtggggtgctgtttctgtgtttccaagtgagtctcaaacctgcaggttcctggaaggtagtaataggcaataatggggaaaggaaggcacagtgcctctgtcctctgagagcaacaagggttgaggtttttttttgttttcgttttgtctttttgagatggagtttcactcttgttgcccaggctggagtgcaatggcgcgatctcggctcactgcaacctccacctctcaggttcaagcgagtctcctgcctcagcctcctgagtagctgggattacaggtgcccgccaccacgcccggctaggtggtttttttttcttttttgttgttgtttttgtatttttagtagacacggggtttcaccgtgttggccaggctggtctcgaactcctgaccttaggcgatccacctgcctcaacctcccaaggtgttgggattacaggtgcgagccaccatgcccagccaagggttgaattttgaggtgactaacgctgcctggtggtgggggtagggggtgatgtgggctcgggggagggcataccttagcatttgatcccattctctaaccttgataacccctgcctgaccagtaattgacctgctgactgtgggcgagtctcggcagatggtagctgtggcagagaagatccggacagccttgctcactgctggggacatctacctcttatccaccttccgcctgccccccaagcagggtggtgtcctctttggcctctattctcgccaagacaacactcgatggctggaggcctctgttgtaggcaagatcaacaaaggtgactggtgggcatctcctttcttgcaatggtgacctccttaagcactctccctcatccctacttcccaagtgcttcctcattctccttggcctccattagggaccaaggtcccatcaggctgtgcccagacatcaggggcacctggtatggggtgcttataaggtgctttaggagcccatgtaccaaacaatagggtgaggcttgagtcctgatatttatagggatgggaggttgtacttggggatgcctggaaggagggtgaggcatgtctctgtgcctcagcggtgatacagaaaggtctttcagatccctggaacaggtcagtggccacaaaaccagctgtcaccctaggagaggatacagtcatctgataccaatgaagactaagaaagtatttgtctctaaaccaattatttttttaaatggagtcttgctttgtcacctaggctggagtgcagtggtacaatctcagctcactgcaacctctgcctcctgggttcaagcaattctcctatctcagcctcctgagtagctgggactacaggtgcccaccaccatgcctggctaacttttgtatttttagtagaaacagggttttgccatgttgaccaggctgttctcgaacttctgacctcaagtgatctgcccaccttggccttctaaagtgctgggattacaggtgtgagccaccgtgcctggcctctaaagcaatttcaaaaacatttattgtgtacctattaaatacaaggtgttgagagccacatagtagaattagggataggggccctagagatgtggtatctagcagagttgatccaaggctcagctgggaggcagggggtgggggatagcgcccatactgatctcccctcctgggcagtactggtgcgataccagcgggaggatggcaaagtccacgccgtgaacctacagcaagcgggcctggctgatgggcgcacacacacagttctcctgcgactccgaggtccctccagacccagccctgccctacatctctacgtggactgcaaactgggtgaccaacatgcaggccttccagcactggcccccattcctccagcggaggtcgatgggctggagattaggactggacagaaggcgtatttgaggatgcaggtgagccgggaggagcctctgagttctgtggaaatagagtttgcaccagctggggaaggggttggtagaccttcccaccttactctgctgctatccccccagggctttgtggaatctatgaaaattattctgggtgggtccatggcccgggtaggagccctgagtgagtgtccattccaaggggacgagtccatccacagtgcaggtaacacagagacttgtttgctgacattggaccacggatcctgtggcctttggtgactcctgtcttcttgatctccctctcccttaaaacccattcctttggctcacctgttc

SEQ ID NO: 2833 - DNA, 2300 bp, Homo sapien
aaggtcaggagttcgagaccagcctggccaacacggtgaaaccccgtgtctactaaaaatacaaaaacaacaacaaaaaagaaaaaaaaaccacctagccgggcgtggtggcgggcacctgtaatcccagctactcaggaggctgaggcaggagactcgcttgaacctgagaggtggaggttgcagtgagccgagatcgcgccattgcactccagcctgggcaacaagagtgaaactccatctcaaaaagacaaaacgaaaacaaaaaaaaacctcaacccttgttgctctcagaggacagaggcactgtgccttcctttccccattattgcctattactaccttccaggaacctgcaggtttgagactcacttggaaacacagaaacagcaccccacaaatttgagatgcccccaccaggtggcgcaaaggagatgctgtgctgatcccccacaggagtggcacctggtgtccacaacgtagaaatggaaggcagcttctctttccactcctgggtttggctcgttccacaccctagttcccctcctcccatcctaggggcgcagcacactcgctctggataagaacagctgcccactgaggactctaaccctcccaccatctgggctatctcccacgggaatgtaggacccagctcctctgcctcctgtgtcctggccaatctgtggttttccctccagccagtaaagaatctatgcctgtgtcatctgctccagctacctctcccacatccatcggcccatcccaccaccagacctccgggagagcccaggcttcttggtccccacccccgccctgtccttgggcagccaggagcccagggggacgaagcccagggacctacagtacgcccaccttcaggctgctctcccagaccctagggtgcctacagatgctcaggaaccaccccagccaggcagcctgagcatccagttcctgagtcctctgccctggcctcatgcctgaccctgtcctgttccagctcccccactactctccggtgcccactcctctccaccaggccataatttcaccaactctaggcagtcttaagttttcctctggctcaatttctggactcttcccctctccccttgcccacatgttctctgctacttgggctgagggcaaatggggaagaagcagagagcggtctaagaggatggagacaggcttaccctgcagatcctgactggcagatgtgaaaaagcaaaggaggagaagagccagggccccccgaagttcctgcgtctccatgcctctcagccggctcactacccctggcaggcaggcagctgggaggggaaaaggctaggcggagagagcaggagccggggggcggagggacagaattggagggggggccagcaggcgggtgagggggggctgaaacaaagagctgccaatcaccctggaggcatcatcagctctgggaaccaggggcactgggaaagaatcctggaggcctccctgctttctacctctccctaatgatcctcccccaggtgcctccctctccgcagtcatcattgttgggggtctcggcacacagcgctaccgaatgccactgttttctggaagccacgattgtggaaggcaagaacccctggcaggggcagtgctagacagtgggcattattccacagctggcaggaaaggatgccaagggagtggccgcaactagcttgctatagtgcccagggatgcccacatggcatgaattttgctgttctggcggagcaagtgctctttattagggtggggggtcccctgacaagtgcctgtttctccattttccctcattcgtaggaaagcttgggagtctggaagcgtctgacgggaactgaagggagaatctaaagcagtggtcagtgaggtcagagtgaagaaaccaaaaaagaggaaagggacaccagggacaggcgcagaagaccaggggtacaggcgaggagccaaggaccagactgtggaacactgtgggtactagcggacgggccgtgacccggatgaagcagaggggcgcctgagttcccgtcacctaagcgacagcctgcgagcctctcttcccctcccccacccaagccccagcccggcctccgctccggccgccgccaccgcccctgttttgtttccatggcgacaggcggcgcagggcccgctccaaacataacgcgctgtggaaaacatgctgctcgggggacccccccgcagtccccgctcggggacgagccccaaggggccctggagcagtacaggccacgtgcagtttggcaagagcc

SEQ ID NO: 2834 - DNA, 2300 bp, Homo sapien
tcctaggggcgcagcacactcgctctggataagaacagctgcccactgaggactctaaccctcccaccatctgggctatctcccacgggaatgtaggacccagctcctctgcctcctgtgtcctggccaatctgtggttttccctccagccagtaaagaatctatgcctgtgtcatctgctccagctacctctcccacatccatcggcccatcccaccaccagacctccgggagagcccaggcttcttggtccccacccccgccctgtccttgggcagccaggagcccagggggacgaagcccagggacctacagtacgcccaccttcaggctgctctcccagaccctagggtgcctacagatgctcaggaaccaccccagccaggcagcctgagcatccagttcctgagtcctctgccctggcctcatgcctgaccctgtcctgttccagctcccccactactctccggtgcccactcctctccaccaggccataatttcaccaactctaggcagtcttaagttttcctctggctcaatttctggactcttcccctctccccttgcccacatgttctctgctacttgggctgagggcaaatggggaagaagcagagagcggtctaagaggatggagacaggcttaccctgcagatcctgactggcagatgtgaaaaagcaaaggaggagaagagccagggccccccgaagttcctgcgtctccatgcctctcagccggctcactacccctggcaggcaggcagctgggaggggaaaaggctaggcggagagagcaggagccggggggcggagggacagaattggagggggggccagcaggcgggtgagggggggctgaaacaaagagctgccaatcaccctggaggcatcatcagctctgggaaccaggggcactgggaaagaatcctggaggcctccctgctttctacctctccctaatgatcctcccccaggtgcctccctctccgcagtcatcattgttgggggtctcggcacacagcgctaccgaatgccactgttttctggaagccacgattgtggaaggcaagaacccctggcaggggcagtgctagacagtgggcattattccacagctggcaggaaaggatgccaagggagtggccgcaactagcttgctatagtgcccagggatgcccacatggcatgaattttgctgttctggcggagcaagtgctctttattagggtggggggtcccctgacaagtgcctgtttctccattttccctcattcgtaggaaagcttgggagtctggaagcgtctgacgggaactgaagggagaatctaaagcagtggtcagtgaggtcagagtgaagaaaccaaaaaagaggaaagggacaccagggacaggcgcagaagaccaggggtacaggcgaggagccaaggaccagactgtggaacactgtgggtactagcggacgggccgtgacccggatgaagcagaggggcgcctgagttcccgtcacctaagcgacagcctgcgagcctctcttcccctcccccacccaagccccagcccggcctccgctccggccgccgccaccgcccctgttttgtttccatggcgacaggcggcgcagggcccgctccaaacataacgcgctgtggaaaacatgctgctcgggggacccccccgcagtccccgctcggggacgagccccaaggggccctggagcagtacaggccacgtgcagtttggcaagagcccccagacctggcccaggcgcacaagaccccgctctccagagcctgccgcgccttcaggggttcggggctccacttggacgaggcgccgtgacactccgaggcgcgccgggccgacagcgctgtcccgctacgtgggccacctctggatgggccggcggccgccctcccccgaggcccgcggcccagtcccccgcagttcagctgccagtcgggccagaagaagcctcgcctccccggggatctccccaggccccctgaccgcaacgatcggaggggcggtggcggggggcgggcccaggcaggggagggcagaagcacacaaggaagtgtttccgggacagagggtgggcaagatggcggcgcccatggagctgttctgctggtcagggggctgggggctgccgtcagtggacctggacagcctggccgtgctggtgaggggtggcgccggcgccctctgctgtgccctgatgactggggagggggccgaactagccaagcatccaaaccttgccagggctactcagcacgggcgcagtgggggaaactgag

SEQ ID NO: 2835 - DNA, 2300 bp, Homo sapien
ggtctgttcctactttaacttatatgtgaatattttattatatttatttgcttacctatctgcctttctgtaaactcgaagggaggaaccaaattttattcatctttgcctggcaatgtttaatatttggaagaaatctaatagatcctctttaaagcaaggagtcaatgaataaatgaagcaaaggaagtctgattgctaagctctttatacaaagcctggctgtgagtcgtttggtctaacaaacaatagcctcagtaaatgctgttaagtgaggaggaagaggagaagggggctgaggagaaggcaggaattccaagctagagtaggtccctgagacagtccagcctagtaaacctccgaatggagaaaaaaaatgcccaaagagaaaggatctccgcaaggtcacacagccagtgaatggatgagcaaggactagaacccatcacctgaactcccaaccaggcgtcttttcattgctgcattaagcctagaaaactacagcatagggcactgaggccatatcggccacgtacgctctttgactgcctcagtttcccccactgcgcccgtgctgagtagccctggcaaggtttggatgcttggctagttcggccccctccccagtcatcagggcacagcagagggcgccggcgccacccctcaccagcacggccaggctgtccaggtccactgacggcagcccccagccccctgaccagcagaacagctccatgggcgccgccatcttgcccaccctctgtcccggaaacacttccttgtgtgcttctgccctcccctgcctgggcccgccccccgccaccgcccctccgatcgttgcggtcagggggcctggggagatccccggggaggcgaggcttcttctggcccgactggcagctgaactgcgggggactgggccgcgggcctcgggggagggcggccgccggcccatccagaggtggcccacgtagcgggacagcgctgtcggcccggcgcgcctcggagtgtcacggcgcctcgtccaagtggagccccgaacccctgaaggcgcggcaggctctggagagcggggtcttgtgcgcctgggccaggtctgggggctcttgccaaactgcacgtggcctgtactgctccagggccccttggggctcgtccccgagcggggactgcgggggggtcccccgagcagcatgttttccacagcgcgttatgtttggagcgggccctgcgccgcctgtcgccatggaaacaaaacaggggcggtggcggcggccggagcggaggccgggctggggcttgggtgggggaggggaagagaggctcgcaggctgtcgcttaggtgacgggaactcaggcgcccctctgcttcatccgggtcacggcccgtccgctagtacccacagtgttccacagtctggtccttggctcctcgcctgtacccctggtcttctgcgcctgtccctggtgtccctttcctcttttttggtttcttcactctgacctcactgaccactgctttagattctcccttcagttcccgtcagacgcttccagactcccaagctttcctacgaatgagggaaaatggagaaacaggcacttgtcaggggaccccccaccctaataaagagcacttgctccgccagaacagcaaaattcatgccatgtgggcatccctgggcactatagcaagctagttgcggccactcccttggcatcctttcctgccagctgtggaataatgcccactgtctagcactgcccctgccaggggttcttgccttccacaatcgtggcttccagaaaacagtggcattcggtagcgctgtgtgccgagacccccaacaatgatgactgcggagagggaggcacctgggggaggatcattagggagaggtagaaagcagggaggcctccaggattctttcccagtgcccctggttcccagagctgatgatgcctccagggtgattggcagctctttgtttcagccccccctcacccgcctgctggccccccctccaattctgtccctccgccccccggctcctgctctctccgcctagccttttcccctcccagctgcctgcctgccaggggtagtgagccggctgagaggcatggagacgcaggaacttcggggggccctggctcttctcctcctttgctttttcacatctgccagtcaggatctgcagggtaagcctgtctccatcctcttagaccgctctctgcttcttccccatttgccctcagcccaagtagcagagaacatgtgggcaaggggagaggggaag

SEQ ID NO: 2836 - DNA, 2300 bp, Homo sapien
gtggtggcaggcgcctgtagtcccagctactcaggaggctgaggcaggagaatggcgtgaatccgggaggcggagcttgcagtgagccgagatcgtgccactgcactccagcctgggagacagagcaagactccgtctcaaaaaaaaaaaaattttgctcagtacctggccaaaaaagaagcagctcactccctgtacacagagggtaagagaaaggagatggttgaacttctaaactcgctaaagcaggagaggcaaatgtggaatgtgctcaggaaatatctgtgagatgaatgaatttgagggaagtaaggtactagataattacctgccctacccagaacaaatcctgtgcaacgtttccttgaagagcaggaagtcaggccgggtgctgtggctcacgcctgtaatcccagccctttgggaggccaaagtgtgcgaatcacctgaggtcaggagattgagaccagtctggctaacatggtgaaaccccatctctactaaaatacaaaaattagccgggcgtggtggtgcgtgcctgtagtcccaactacttgggaggctgaggcaggagaattgcttgaacctgggaggcagaggttgcggtgagctgagatcggccactgcactccagactgggtgacagagtgagacaacatctcaaaaaaacaaaaaaaaaagagaaaagcaggaagtctggaaggggtggctactgacatagtgaagcaactagttcaattctacaacttgacaactacccctgtgccaggctgtctacaaggatatttagaatgtgtaagacattccttcaaggaactccaggaacagaggcctgacatgttgcaatgtttagtgtcaagcagtgtactagagacacattatcacactcaaacctcacaacagttctatgaggtaggagttatcactccccttttatagatgaaatagaggcttagagtgattgatttactgaaggtcaaacagccagtaaatggtgtagcaaggattccaaccttgccgtctcactaaaactgtacaaaaaaagatacaaacaacagacaaatagttcccaggcgcctcccaagttgccaggcactgcatttacctcactgacccctttgaggttgtggcattgcctccattttctaggtgaggaaataggctgagagctggggttagtctggtcatgactgtgtgtgccactcccaccaaatctcatttgatgtggttcatgaggcaaatggcatggacaacttccttcacatgtccactaagcatatggccttttacaacactttctggtttctgaactactttaaaacctcactgtcctgtgaggaaggaagaacagttattacaatctgcatctggaagccaattgccctttagagatatggctgcaattgcctcactgcctgtgtcatgtgactctccgaggcccttaatgagtaaatgaggggtgctgcaggggagccaagctgaccactcccctccctccagtcctgccaccccactgccagtgtcccaccctccttgcgccctacacttcactggctaataacccccctcactttttcctgtgttgaaggcatcctggataattccccacccacgaatggtccctcctcatctcagagagctctccatgcacacctgttactgtttctgtttttacctgtaaatatctgtgtctgacttccatgcttcatgcacctctatagggcaaagactgtgtcttaaacatcacggtagcctcagcatgttgtgcaatgaaggtttttttgtttttgttctttgttttttttttggtattagctttatttgtatcattttgaaatttttatcaaaaaagcagcgtgcctgctgtggttcccatcctctgggatttaggaatctttacccgattctccatccaagtctgtctttcgtattctaggctcttcctaaagttgtcattcacatataccctccagaattttatagggtgtataatctgtaacaactcggaggaagccaattgccctttagaaatatggctgcaattgcctcacttcctgtgtcatgtgactctcctagtcatcacatgacccatccacattgggaagccagaattacttgcaggagtaacctagtgcctatagctatggcaggtacctgcatccttgtttttgtttagtggatcctctatccttcagagactctggaacccctgtgctcttctcctcatctagtgaccctgaggtgatggagttttcaagtccttccagagaggtaagagagagagctcccaatcagcattg

SEQ ID NO: 2837 - DNA, 2300 bp, Homo sapien
ccagccttgacctctcttgagcgccatccaactcagcatatctggttggatgtctaatgagtatttcaaattcaacatggccacaactgaactaactgaactcttttttttttttaggcagagttttgctcttgttgcccaggctggagtgcaatggcgagatcttggctcactgcaacctctgcctccagggttcaagcgattctcctgcctcagcctcccgagtagatgggattataggccccgctacccggctaatgtttttgtatttttagtagagacagggtgttgccatattgaccaggctggtctgcaaatcctgacctcaggtgatccccctgcctcggcctcccaaagtgctggaattacaggcgtgagtcactgcgcccggccacacaactgagctcttcattcccaccccagcaccggttatttttccactgttcccatctcaatggcacctccattacccatttgcacattccaaaagcccaggaaccatggtgacttcttttcccatatccaacacaaccaatcctatcttgaattcatccacgtcccaccacctccccagctacctagttccagccaccctctctccacaacctctgaatcaatctttcacttttcccagcaatccattctccactcagcaaaatgatgataaagcacgtcacatcaaggctctgcctcaatttaatggcttcccattgtatttagaatcatctccaagctctcagagactatggtcagctacaatctggcccaccttctgttccagccaaatttcctcacagcacaaggacgtttgcacctgctattttccaagcacgaaaccctcgggcagatatatctggtgctgtcacctaatttcaggttttaactccactctcaccatttcagtgaggacctaatccccatcgcagtcattctatcacatagctttattttattttattttatttttttttgagatacagtctggctctctcacccaggctggagtgcagtggtgtgatctgggctcactgcaaacttccatctcctgcgttcaagcgattctcctgcctcagcttcccgagtagctgggattacaggtgtctgccatcacgcctgactaagttttgtattttcagtagagacggggttttgccatgttagccaggctggtctcgaactccttgacctcaagtgatccacctgcctcagcctcccacaatgttggatttacaggcgtgagccactgctcccggccacatagccatgttttaagcatgtatcactatctaaaattattttttgtttatacgtttgtgtcgtcctgtagaatgtaaggtcacaagatcagggacttgctcattgcactgggtctaacacacagtgcttcctcaacaaacactcgttaagatactaacgtggcagagtggggccttgtaaacagtttcaggaccctgtgcttgtaagagcaacgtggtgccctcccaaggaagacagggaggatgcaggagcactgcccagagatggcgtcaggctgcaagacatcttgaataattcaccatcgtaacaacccagcctcaggaagagatggggcaaggccagaacgaaacattaggtaagaggcggtggacaatgggattcccacagggcagcttttgggcactggacgttccctaacctgaggctctctgaagaggaaggttaggaatcctctcagcttcggtgggctggactcactgtgggaattcaatcgcccccccccacccactaagggtgtgctggcgggaaagcgctgagacgcatgcgtagttctcgcgtctggcacccgctccctttccaatacgcttgcgccccgtctgtgctacggatggtcagggagagttgtccgtcttcaaatggaccaatgagacttgtggaggggctctgagtcccgcctctggatgagtgaccgtctcttttccaagtgaggccccgccccgcctccccagggctgcttttctcgcggcacgggtggtggggctgcttcttgacttccgcgcctagtgcgcagggccccattctccagtcccgcccacgcgcctttggaggctgcggtgggatttccttttgccttcggttggggctgctgtttctcttcgccgacggtaggcattataaatatttcgccctttgaattttagctctcccctcccggcgttcgcacttagcctttttcatcattatcattatttttaatggtaaggatggtcaaattttactaatgaagcgattataaaatcttcaagtctttgtatccacttgct

SEQ ID NO: 2838 - DNA, 2300 bp, Homo sapien
attcgtggttggaaagtgtgtcttgaaagtttcttttttcttaaaagtttcttgtgcaccatatagcacaagatcagcaacccctggcagagcccttcaggtacccagtatcccttgggggtgaggaagggtgtgtacaagaggagaagcaggagataggcaggaatgtgttgcaactacgtatggataggcagctaaggtcctggttggtatacttttctctcagtatcaggaaccctgcctgccctttggaccagtcatggagaggtcacctcagtaccacacaagatcatcacccaccttcaaaaagaggtgggtgatttggatagagggggctgccagtgagagaagttcagtcaattccgtacaatacacatttattgagcactagatatatgccatgctagatgcaggtgacccagagcatcaaggagcaatagtctggtggcagagacacacacaatgtcactgtgatgtattaaagcagtcggcaagagatgcagctcagggcactgtggggatatccagaggcacggtaccttctgcctgtcagtcagggagggagaggagcacaggctgaaggagactggaagacagcagttggcctctgatagtgggactggagagagatttctaagggccacttcttgttttcagggactaggttgggctagatatggggctcaggatggacaaggcttagagccaggttggagaagatgaaagagcattactagaggagtggggaggcctaggctatgctctttactctgccattgactgcgtgatcttgggcaggccatgtaacctctcagggctgtgcactcccttatttgtaaaactagagggctgggccagcatgttttccaagggttcttctagcattgacggtcaggttccaagagggaacacagtgtcagaagtgggacactcttcctaatttctaatttcccaaaggttaaggacctggggaattaattgagaggcctggaaagaggatccagataaaagcctaagttcctggcaaggccagggccactgccctgattgcttaggtgtgaacagagctttttgtttccgaagtattctaaattatttcctaacacaggggcattcagagaaagagattcttacccccattccacaggggagaaactgaggcttagggagatttaaggatcatgctgaagaggttatctggggacaaagcttactcaggatgtggtgggggatgctgaggaacagggactggagcctgggaaggtagggcaggctgagacctgggggtatggatggaatgtgtatgtggtaatggtgtctgggcgatggaatgaagtgaaagaaatagccaagagctgggcactgagggaacaagctggggggccctgggcgtgggttccctggatccagggagtgtgaggatggctttccctggttcctgaggcatggaccgagtcctagcctgcatctgagctccgttgtgctagctttgtggtgtctgggtcgggaaagttactgttagaaagttgctgtcagcaggcattgttccagctttccatggaaattctgggagctgctcctagtttgcggcccaacctttcttccttcttctcaatgggcccaggaccttgacggccagcgggctccaaggcccaggctttttgccaacagcaacaggctactggctgggcccaggcaagggggccttggcaggaaaagttccttgctgtacctccactgcactcagaggccagtgaggggggtaccagacaggactccttcctccctggtgaagtgcccttgcagctccccagcgtccacgccatggatatttcctccacagaagtacaatgctgattatgatctgtcagctcagcaaggggcagacaccctggccttcatgtctctcctggaggagaagttgatcccggtgctggtgagtgtgcccagacctcccagcatccatggccagccggggaggggacgggaacacacagacccacacagagactcaggagagcatggaggtcagaagcccaccttgaatcagacaggtgcactggctcagacctgcctgtttcttcctgcccacccaatccaggtacatactttttggatagacaccaagaactacgtagaagtgacccggaagtggtatgcagaggctatgccctttcccctcaacttcttcctgcctggccgcatgcagcggcagtacatggaacggctacagctgctgactggggagcacaggcctgaggacgaggaagagctggagaaggaggtagctctgagaccgg

SEQ ID NO: 2839 - DNA, 2300 bp, Homo sapien
aatgtgctcaggaaatatctgtgagatgaatgaacttgagggaagtaaggtactagatattacctgccctacccagaacaaatcctgtgcaatgtttccttgaaaagtgagaagtctggaaggggtggctactgacatagtgaagcaactagttcaattctacaacttgacagctacccctgtgccaggctatctacgaggatacttagaatgcataagacattccttcaaggaactccaggaacagaggcctgacatgttgcaatgtttagtgtcaagcagtgtactagagacacattatcacactcaaacctcacaacaattctgtgaggtaggagttatcactccccttttatagatgaaacagaggcttagagtgattgatttattgaaagtcaaacagccagtaaatggtgtagccaggattccaaacttgctgtctcactgagactgtacttaattactggagggaccgggtgtggtggctcattgctataatcccaacaccttgggaggctgaggctggtggatcacctgaggtcaggggttcgagaccagcctggccaacatggtgaaaccccatctctactaaaaatacaaaaattagctgggcatggtggtgggctcctgtaatcccagctactcaggaggctgaggcagggcaattgcttgagccgagatcacactgcactccagcctgggcaacagggcaagactctgtctcaaaaccaaaaaaaaaaaaattactggaggaacctagaagaagaaatgatcaattttgcttggagtgtatctagaaagacttcactgagatcatttaaagaacaaaaaggatggctggggtccagcgcagtggctcatgcctgtaatcccagcactttcggataccaaggcagcagatcacctgaggtccagagtttcagaccagcctggccaacatagtgaaaccccatctctactaaaaataaaaaaattagctgagcatgttggagggcacctgtaatcccagctacttgggaggctgaggcaggagaatcactcgaacccaggaggtggaggttgcagtgagccaagatcacgccactgcactccagcctgggcaacagagtgagactctgtctcaaaaaacaacaacaacaaaaaatacaaacaagagacaagtagttcccaggtgcctaccaagtggtcaggcactgcacttacctcactgactgcagtaaccaccctttgaggttgtggcattgcctccattttccaggcaaggaaatgggctgagagctgggattagtcaggtcatgactgtgtgtgccactcccgctaaatctcatttgatgtggttcatgaggccacaccatggacagcttcctccttgtgtccactgaggatatggctttgtacaacactttggtttttgaacgactttacaaacctccctgtcttgtgaggaaggaagaacagttattaccatctgcatctgatgatgaaacaagggacgctgcagaggagccgcactgaccactccctccctccagtcctgtcatcccactgccagtgtcccaccctcttgtgccctgcacttcactggctaataacccccctcactttttcctctgtgaagccatcctggataattccccacccacgaatggtccctcctcatctcagagagctctccatgcacacctgttaccgtttctgtctttatctgtaaatatctgtgtgtctgacttccatgcctcacacacctctatagggcaaagactgtcttaaacatcttggtagtgtcagtattttgcacagtgaagtttttttttttaaattatatcagctttatttgtacctttttgacatttctatcaaaaaagaagtgtgcctgctgtggttcccatcctctgggatttaggagcctctaccccattctccatgcaaatctgtgttctaggctcttcctaaagttgtcacccatacatgccctccagagttttatagggcatataatctgtaacagatgagaggaagccaattgccctttagaaatatggctgtgattgcctcacttcctgtgtcatgtgacgctcctagtcatcacatgacccatccacatcgggaagccggaattacttgcagggctaacctagtgcctatagctaaggcaggtacctgcatccttgtttttgtttagtggatcctctatccttcagagactctggaacccctgtggtcttctcttcatctaatgaccctgaggggatggagttttcaagtccttccagagaggtaagagagagagctcccaatca

SEQ ID NO: 2840 - DNA, 2300 bp, Homo sapien
tcctccttttcacagcaataggttttctttttcttccctccactgttaaacatccattctctcctcacccacccccatcagactccttcccctatctttccacagccactgctctgaccaaactttccagtgaccacagtggtgtcagacccagtgaccatttctctgcctgcatctcacttgacctcgaggcagcaattaatacccataatcagcatcttcttgaatttgtccctttgaaaagggaaatattggctcttctactttgtcctgctgaactgcttaacattggagggccccagggccctcacctaagccctctttcctacctccactctttctataggtggccctactactaaagtccatggctttaaataccatctttctatgtgttaatccataactccagccttgacctcccatgagcgccatccaactcagcatgtctgcttggatgtctaatgggcatttcagattcaacatggccacaactgaactcttgattcccaccccagcaccggttatttttccactgttcccatctcaatggcacctccattacccatttgcacattccaaaagctcaggaaccatggtgacttcttttcccatatccaacacaaccaatcctatcctgaattcatccacatcccaccacctccccagctacctagctccagccatcctctctccacaacctctgaatcagtctttcacttttcccagcaatccattctccactcagcaaaatgatgataaagcacgtcacatcaaggctctgcctcaatttaatggcttcccattgtatttagaatcatctccaaactcccagagactatggtcagctacaatctggcccaccttctgttccagccaaatttcctcacagcacaaggacgtttgcacctgctgttttccaagcatgaaacccttggcccctatatctggtgctatcacctaatatcaggttttagctccattctcaccatttcagtgagcacccaatccccatcgcagtcattctatcacatagccatgtttttttttgtttgtttgtttcattttgtctttttttgagacagggtcttgctttgttacccaggctggagtgcagtggtgtgatttgggctcactgcaaccttccacctcctgggttcaagcaattctcctgcctcagcctcccgagtagctgggattacaggcgcccgtccccatgcccgcccagctaaattttgtatttttagaagagatagggtttcaccatgttggccaggcgggtctcaaactcctgacctcaagtaatccgcctgcctcggtctcccaaagtgctgggattacaggtgtgactcaccgcgcctggccacatacccatggtttcagcatgtatcactatctaaaattattatttttgtttatatatctgtgtcgtcccatagaatgttaaggtcccaagatcagaaacttgctcattgcagtgggtctaacactcagtaggtcctcaacaaacattcgttaagatactaaagtggcagggtggggccctgtaaacagcttcaggaccctgtgcttgtaggggcaacgtggtgccctccaaggaagacagggaggtgggaggagcactgcccagagatggcgtcaggctgcaagacttcttgaataattcagcatcataacaacccagcctcaggaagggatagggcacggccaggacgaaacattaggaggcgatggacaatgggattcccacggggcagcttctgcgcactggacgttccctaacctgaggctctctaaagaggaaggttaggaatcctctgagcttcggtgggctggactcactgtgggaattcaatcgcccccatccaccaacagtgtgctggcgggaaaacgccgacacgcatgcgtagttctcgcgccggctcctctctctctctctctctctctcgctcgctctctcgctctctcgctctctctcgctcgctctctcgctctcgctctctctctctctccggctcgccagcgacacttgttcgttcaacttgaccaatgagacttgaggaagggctctgagtcccgcctctgcatgagtgaccgtctcttttccaatccaggtcccgccccgactccccagggctgcttttctcgcggctgcgggtggtcgggctgcatcctgccttcagagtcttactgcgcggggccccagtctccagtcccgcccaggcgcctttgcaggctgcggtgggatttcgttttgcctccggttggggctgctgtttctcttcgccgacggtaggcgt

SEQ ID NO: 2841 - DNA, 2300 bp, Homo sapien
attagccaagtgtggtggcgggtgcctgtaatcccagctacttgggagtctgaggcaggaaaattgcttgaaccggggagacagaggctgcagtgagctgagatggtgccactgcattccagcctgggcgacaagagcaagactccgtctcaaaaaaaaaaaaaaaaaaaaaaaaaatatatatatatatatatatatatatatatatacacacaaaattacaaaaattaggctgggctccgtggctcatgcctgtaatcccagcactttgggaggccaaggcaggaggatcaccagatatcaggagtttgacaccagcctggccaacatggcgaaaccctatctctactaaaaatacaaaaattatccgggtgtggtggcgggtgcctgtaatcccagctactcggaagactgaggctggagaatcgcttgaacctgggaggcagaggttgcagtgagctgagatgtagccattgtactccagcctgggcgacaagagtgaaacttcgtctcgaaataataataataataataattagctgggcatggttgcacacccttataattccagctactcaggaggatgaggcatgggaattgcttgatcttgggaggtgggggttgcagtgagctgagatcgcgccactgcactccagcaacagagtcagactctgtctcaaaaaaaaaaagaaggtcctagatggaggtgaggctaaagggtggacattcctgtgaagacacagaatgtgtggagcttctggatggaggtggggccataaagaggaatttgtgggtgggcagggccagagctagaggtacagggtgagcgtggggttaaggagagctgattttgggtgagggaggggccagaacaagagcttctctcaggggatagggccagaaaaaataatgtagatgagagaggagtttgggggcccaggaggagctgtattcccagaatccagacttgctgacctgctcgcttccccagcagctggcccctgagcggtcagtctcaggcccactgggacctctgggctgcacgtccccgcccccagcccctctcctacacaccatgctggacctggaggaatttgtcccgcctgtgcccccaccgccctactatcccccagagtatacctgcagctcagaaacagatgcacagaggtaaggcctggtggggtcttgctgggggagctaaggaaggggactggggctgggcctggattgctggagagagggatctttgtggagggggaattatttctcctacattgaccctcttcctcatctgccagcatcacgtacaatggctccatggacagcccagtgcccttgtaccctaccgattgccccccttcttatgaggcagtcatgggactacgaggagacagccaggtgagagcacagcacggcttggggcgggctggggagccgggttgtagcctggaaagctgaacaggctgtagcctctggataaagatagtaacagtggtcaaggtctttacagcaccagcatgcccactgttgcctttgatcttccctagagcctggtgaggtgagtgggttggaagctatcatttctgccatacagacgtggaagctgaggctgcacaattaagtgacttgtacaaagggacaaggctggtctggaatctaagtctccagagctctgtctagcacatgggggtgttcagtgtgtagggctgaacccttgaccctgtgtcttctgcaggccactctctttgaccctcagcttcacgatggctcgtgcatctgtgaacgagtggcctccattgtagacggtgagcagggcgtaatgaggggtggacaagggcggggctgccagggatagctggggtgggtagagacaatagaaggggaaaacaaggcggagttggtggtttggggacataggagggctgtggcaacttggaaccctggacttatttttctcctctgagataaagctggaggcacagtggcccctagaggctgggcttgggagaagaggaactgcctgggcagggctaggccaggccaggctggtgctacacagcgccccctgccgcccacagtgtccatggacagcgggtctctggtgctgtcagccattggtgacctccctgggggctctagcccgtcggaggactcgtgcctgctggagctgcagggctccgtgcgctccgtggactacgttctctttcgctccatccagcgcagccgtgccggctactgcctcagcctggactgtggcctgcggggccccttcgaggaaagccccctgccacggcgccccc

SEQ ID NO: 2842 - DNA, 2300 bp, Homo sapien
ggcttcctggaggaggcatagaaccatggttgaaaggaggaagaagaatccccagatgagtgcctggaagagcttggagagctcagggctaatggttcagaaactggaattaaactatgaagagattagatacagtttgggattgtggtgcttggaatgctgctcgattgacagggagccactgctgatgggaagggtaggaacaggggatgctggtgacataaccagtggagaagctgaggagcccctcttcactggtacatccttccctttacagtggctggatctctgctctggtggtgccgaagggcaacacagcagtatccgtgctcatgctgctggtcgccctgctcttcactggcattgctgtgctaggaattgtcatgctgaaacgggtgagggctgtgtcgaaggtggggccgggatggtgagatcatgggtccccaggggcgtgggtggaacattcaggagcaactggcacaggtcaggctgctgggttgttctcagctaatggacctctggggtgtgtgtttctgtgtgtgagtgtgtgtgctgggcagcaggctgctgagtggtagtgatgctgttaggctggggtggggaaccagtggctggaatgggcggtaatgtctttgtcctctacttgcagatccactccttataccgccgcacaggtgccagctttcagaaggcccagcaagaatttgctgctggtgtcttctccaaccctgcggtgcgaaccgcagctgccaatgcagccgctggggctgctgaaaatgccttccgggccccgtgacccctgactgggatgccctggccctgctacttgagggagctgacttagctcccgtccctaaggtctctgggacttggagagacatcactaactgatggctcctccgtagtgctcccaatcctatggccatgactgctgaacctgacaggcgtgtggggagttcactgtgacctagtccccccatcaggccacactgctgccacctctcacacgccccaacccagcttccctctgctgtgccacggctgttgcttcggttatttaaataaaaagaaagtggaactggaactgacatccccgtttcctgaatcttcattgggaattaggccttatgaaagagaaaggagagtgtggagtgaggtgggaaggtcggacccggctttagtgtaaactgggagatatgaggggcggggcggtggagcccgagtggctggcgcaggaaggaggtgggaagtccacggaaacgcgaaacccggagacgccagggagccctgctccccacccctctccattaatgacggggaagagccaccgcctctgccgggaacgccaaggaatacgcgggcctggagcctgaaaagctggatggggctcaagtggaggcccaaaggatcactagcagcctagccagggtccagagcgaggcagggactggaggagcgcttatccgactgcctcgccctgccgcgggatcccccaaccccgacagggtctcagtcccgaactacaactcccggggtgcaccgcgccggccctcgccgccatgcccctccttcccgcaccatccccattcccatcccccttctctagtccccgacctgcggcagccggagctcggggagcggagcgtggtggggaggggagcgggacaggcgacacaggagacagcggcgccgcggcctctccccaccaggcggccccggatcctactggacgccctgagggcacaccgaccgcgcctctagagtcaccccacgccgacccctcccctcttctctagacttatttccatccttcccgcttttaccctccccacccctccctgggctccaggccgccgccccctcctcactcctggaccggcccttctcggtgcccctcttccctagggagatgcgatgagccggtgcccccgcgtcctcatcgtcgccccgggcacggtgcccgtccagtgcccgtggtggggagggagcactccgcggtccctccgtgacgcccctcgcttggccccccccacagctggcgtccctcggccatgccccaggggacccagccagggggtgggctctagagcgagtggggtggagaggagaaaggacggggccttgggcgcctctgagatgctcccaagtgccagggagggccgagcgaggcgcaggcaaccgggcagcaggcatgatgccctcgcctagtgactccagccgctcgctgaccagccggcccagcaccaggggccttacccacctccgcctccaccgaccctggctgcaggccctgcttacgc

SEQ ID NO: 2843 - DNA, 2300 bp, Homo sapien
ggctttgggctttctatcctctgggtcctccttttcactccctgctcctttgtctgctggtaccgccccatgtataaggctttccggtaagtgtgttagtggtgggagagtgatggagacctgggatgggccccacgtctgcccatccttcagctctaattcttctcccaccctccccatttttttcctctttgtaggagtgacagttcattcaatttcttcgttttcttcttcattttcttcgtccaggatgtgctctttgtcctccaggccattggtatcccaggttggggattcaggtttgtgaggctgttatccaccctcacctttccctctagatccagccagcactgggtgctgggataggagttgttcagaaaaaggaaatgtggttttaatccttgggaggtactagtttaatgagatacaagacatacttccaggatagagcgcagacagcactcttgacacatatagattgaagggaagaatgctgcatttggccaatctaaggtggcttcctggaggaggcatagaaccatggttgaaaggaggaagaagaatccccagatgagtgcctggaagagcttggagagctcagggctaatggttcagaaactggaattaaactatgaagagattagatacagtttgggattgtggtgcttggaatgctgctcgattgacagggagccactgctgatgggaagggtaggaacaggggatgctggtgacataaccagtggagaagctgaggagcccctcttcactggtacatccttccctttacagtggctggatctctgctctggtggtgccgaagggcaacacagcagtatccgtgctcatgctgctggtcgccctgctcttcactggcattgctgtgctaggaattgtcatgctgaaacgggtgagggctgtgtcgaaggtggggccgggatggtgagatcatgggtccccaggggcgtgggtggaacattcaggagcaactggcacaggtcaggctgctgggttgttctcagctaatggacctctggggtgtgtgtttctgtgtgtgagtgtgtgtgctgggcagcaggctgctgagtggtagtgatgctgttaggctggggtggggaaccagtggctggaatgggcggtaatgtctttgtcctctacttgcagatccactccttataccgccgcacaggtgccagctttcagaaggcccagcaagaatttgctgctggtgtcttctccaaccctgcggtgcgaaccgcagctgccaatgcagccgctggggctgctgaaaatgccttccgggccccgtgacccctgactgggatgccctggccctgctacttgagggagctgacttagctcccgtccctaaggtctctgggacttggagagacatcactaactgatggctcctccgtagtgctcccaatcctatggccatgactgctgaacctgacaggcgtgtggggagttcactgtgacctagtccccccatcaggccacactgctgccacctctcacacgccccaacccagcttccctctgctgtgccacggctgttgcttcggttatttaaataaaaagaaagtggaactggaactgacatccccgtttcctgaatcttcattgggaattaggccttatgaaagagaaaggagagtgtggagtgaggtgggaaggtcggacccggctttagtgtaaactgggagatatgaggggcggggcggtggagcccgagtggctggcgcaggaaggaggtgggaagtccacggaaacgcgaaacccggagacgccagggagccctgctccccacccctctccattaatgacggggaagagccaccgcctctgccgggaacgccaaggaatacgcgggcctggagcctgaaaagctggatggggctcaagtggaggcccaaaggatcactagcagcctagccagggtccagagcgaggcagggactggaggagcgcttatccgactgcctcgccctgccgcgggatcccccaaccccgacagggtctcagtcccgaactacaactcccggggtgcaccgcgccggccctcgccgccatgcccctccttcccgcaccatccccattcccatcccccttctctagtccccgacctgcggcagccggagctcggggagcggagcgtggtggggaggggagcgggacaggcgacacaggagacagcggcgccgcggcctctccccaccaggcggccccggatcctactggacgccctgagggcacaccgaccgcgcctctagagtcaccccacgccgacccctccc

SEQ ID NO: 2844 - DNA, 2300 bp, Homo sapien
catctttgaatactatgtgggattcaccctcttccaggtaagtgatgggatgtcttacttgactgcctggcattcttctacctggttcctttgttttctgctgaggacctgcctactcagttctccacattgcctgccttcctggcagctgatccttagcatgcccttttcagtcccatgctcagttctgtttttgtttcccagacccatgacaacagagagcatctagccatgatggaaaggatcttgggtcctatcccttcccggatgatccgaaagacaaggtgaaccttgagggggcactagttaactcttttccttttctctccacagaattggtctatttcacatcattttcttttttctttgatacctcctctccccccagttactttcagatggggaaataagggaattgtaacaagggtgaccttctgattcctcaacctccccttcccctctagaaagcagaaatatttttaccggggtcgcctggattgggatgagaacacatcagctgggcgctatgttcgtgagaactgcaaaccgctgcgggtgagctgggctcgggataaatagtgcccaccgtccagaagtcacttccttcttagggtggtttgccccctggaatgctcttcacaagcagagggttaggaaaggaggggaggaaagctgaaagaagacatctttggtcaacagaggaaacataagagggagtggttttgtggagggaaggaggttagacagcctaaccttgagacaaccagagatcaaagcaatgtcctggattctttaggtcagacagaaaagaataaactacctttgaagagcttacattttaatgaggaactaaagaagattcatgaagttgacaaggatatacaagtagaaagaactttcaaagattatggagtaattgtgctagtgggaaggtaggttgagctataatatcagaaacgttggtcctggtgtggtcgtggttaggtagccttcaaattggttgcaagcagagccttggttctccaagaatgaaaggtagggtcttgaagaaggcagggtttgtaaggcatcctgcctcacctttttcctgccctcctccaccagcggtatctgacctcagaggcagaggaacaccaccagctcttcgatctgattgaaagcatgctagagtatgaaccagctaagcggctgaccttgggtgaagcccttcagcatcctttcttcgcccgccttcgggctgagccgcccaacaagttgtgggactccagtcgggatatcagtcggtgacgatcaggccctgggcccccctgcatcttttatagcagtgggtgtccagtccaggacactggtgcttttttatacaagagaacgagccagagttcactccttcctcctggctctctatatacctgtgaatatgtgaaatagtgtaaatatgaaagaacttgtacctatcacttcaacccctgccttgtacataatactattccatccacacagtttccaccctcacctgccccctcatacggagttggatgggggccgagtgaggtaaccaggtggcatctaccccatgttttataaggaattttgtacagtctttgtgaaataaaataacgtgcttcatttgacccccatccctggagttggaggtttgggaatgctggggtggagggatgaaactattggcaaactttctgagtttgggtatgaagggagtcctccttaccctccaaaatgaagcacagccaggctaccagtttatttcccctgtccaccttatcatatgggagggtagtgatgggtggggcagcatttctttcagattaaaacagagaagtgttatgaggtggcacttctcggatgtggaattatgagagttgggaaagatctgactcctagagtcattaggccgcggcccagtatagagccagaaactcaggttgaaaacgtgctcaacctggctcctaggggggattgccacgaccggtcagaaggctcccgtcgtccatctcgggagactaggaaggccggattcctacgcgaggcctgctgggaagtgtagttcgttagtggaaggaagtcacatggaagaggggcggtagttggttgtgggcactgggttagaggtatcacgtgggggcactttcgtcttagcttttggacaagacgcaggcgcaacccacggctgctgcggggatccttgtggcccttccggtcggtggaaccaatccgtgcacagagaagcggggcgaactgaggcgagtgaagtggactctgagggctaccgctaccgccac

SEQ ID NO: 2845 - DNA, 2300 bp, Homo sapien
ggtaactaataagctaacagataagacaaagttagatctttgtgtttttaattttttaaaaattttaaaatatcatttatttatttttgagacagagtttcactctgttgcccaggctggagtgcagtggcaagatctcagctcactgcaaactctatggccccaggttcaagcgattcttgtgcctcagcctcccaagtacctgggactacaggcatgcgccatcatgcctggctaattttttttttttttttttgtatttttagtagagacaggatttcaccatgttggcctcaaactcctgacctcaagtgctccacctgccttggcctcccaaagtgctgggattacaggcgtgagccactgtgcccggcccagttttaatattttagtggtatgttcagtggaaagaatgggttaaggatggtttagagcaaggggggatttcattcaggaaagcttgagaaaaaaatggctctttgtttctttgtatcactgcagcgggaaaaaggccccaatagggagtggttctgcagatgccttttcagaggttttggtgacatggcagatgtgcttgttacctcacttctctggtcccttggtcctctcagtgactcaacaagtgtctgagaacagttttctagcattactctttgtcctcactaaggcaggaccttgtcacagggtatggtagggaatgtgatctgaacagatacacctcattggtatttgttatccaacagcagttatgatgatcgttcgtccgaccggagggtgtatgaccggcgatactgtggcagctacagacgcaacgattatagccgggatcggggagatgcctactatgacacagactatcggcattcctatgaatatcagcgggagaacagcagttaccgcagccagcgcagcagccggaggaagcacagacggcggaggaggcgcagccggacatttagccgctcatcttcggtgagtgccagcccaggcccttcctctccccactcttctgcaggccctctaggactctggtaagtgagcagtatccttgttctcagctgaacattggggcatgaacactgaggtgggcactgagtttgcctactttcttggaagctctccgactcttgaagggccctggatctgctttggagatggatgggcacggagcatttgtgacccccagtgctctccctggcatgttgggcttattgtgttgggagcagcttctccgccccagcggcctccactctttaatggggaccttgcttgtgaactgcctttttcccccaagccctgggctctgtagcccccttggcaggcgggcttgggtgggggcaaggggagatctgtgtctgcccggaagggcattgtgtagagcatggggttgtgggtgacattggcaacaacaccacttctctgctctgcccatgcctctccctgttcctgttttgggtttggggacttgggattatgcgccgctctctcttctcacaccgatccaccttactgcatctgacgtgttcccttccactgtcccccatcatcgtctgtcccccctggctgggcgcctgtgaccggtgacccctctaccacccaccccgcctccctccggcccccgctccgacacctggcttgctccgaccccccctgccccccgacagcagcacagcagccggagagccaagagtgtagaggacgacgctgagggccacctcatctaccacgtcggggactggctacaagagcgatgtacaagccaaatcgtaacaatcctatagcctgtaatggtcccatagccatcctaacgtcccaagccaacctgagtcacagcctcttgccttttctcagtggtgttgtttatctgggtggtttgagttgctgttgagaattgacctctgttgtccactcccagctctcacggcccctgggttaaaggtggtgggaatcacgcaggggttttcttcccctgtgaccatctgtatctgttccccttccttcatctccaccccaggttgctgtccccttttttcttccaactcagctcattccccaccttctctccctccctctccccgaccctgctctctttcatttcagatgaaatcgttagcaccttaggagaggggaccttcggccgagttgtacaatgtgttgaccatcgcaggtaactgtcagtccctccctactatgtggggctaaagagatggttggggttatatggggcttttttgctaattaacctgaggtagaatttcttagtccccctacagccctgttcattttgagacattcttgag

SEQ ID NO: 2846 - DNA, 2300 bp, Homo sapien
tcacgaggtcaggagtttgagaccatcctggccaacatggtgaaaccccgtctctactaaaaatataaaaattagccaggagtggtggtgcgtgcctgtaatcccagctacacaggaggctgaggcaggagagttgcttgaacctgggaagtggaggttgcagtgagccgagattgtgccactgcactccagcctggccacacagcgagactctgtctcaagaataaaataagaacacttgaactgaggggtgggtaatgagggatgggtttgggggctttctagagtttcagccagagttagtaggtggctgtactccaataaggaggaattgtaagtacagaggaagactgaggaagttgtgcctggtaaaaagaggcagaaataagaggggaaagcagcttagcatctttggagcagccagtccttggaggagatttctgaaaactcgaaactttcctatttccgctttcccttgccttccagatgccgcatcctcgaaggtaccactcctcagagcgaggcagccgggggagttaccgtgaacactatcggagccgaaagcataagcgacgaagaagtcgctcctggtcaagtagtagtgaccggacacgacggcgtcggcgagaggacagctaccatgtccgttctcgaaggtgaggcctcaggaagagatactcaaacacagggtcactcgctcattcctttgttcaacaaatacttattggttatatgctaaaaccattgccttaagtagctggctgaaggtaatgtcgggatagataaccaaagaagccatttgggctgcagtgttaagtgttagaatacataatgaggaactgaggacgtacccagtgcgtttggttggagtggggcaggatgttaattcagataaaacattgcagagaaagcaacatctgtatatgtctggaggacaagtagagtcaggtgggggaagtgtctttgggcagagggaaagcatgtgcaaaggactgggagctacaggtaactaataagctaacagataagacaaagttagatctttgtgtttttaattttttaaaaattttaaaatatcatttatttatttttgagacagagtttcactctgttgcccaggctggagtgcagtggcaagatctcagctcactgcaaactctatggccccaggttcaagcgattcttgtgcctcagcctcccaagtacctgggactacaggcatgcgccatcatgcctggctaattttttttttttttttttgtatttttagtagagacaggatttcaccatgttggcctcaaactcctgacctcaagtgctccacctgccttggcctcccaaagtgctgggattacaggcgtgagccactgtgcccggcccagttttaatattttagtggtatgttcagtggaaagaatgggttaaggatggtttagagcaaggggggatttcattcaggaaagcttgagaaaaaaatggctctttgtttctttgtatcactgcagcgggaaaaaggccccaatagggagtggttctgcagatgccttttcagaggttttggtgacatggcagatgtgcttgttacctcacttctctggtcccttggtcctctcagtgactcaacaagtgtctgagaacagttttctagcattactctttgtcctcactaaggcaggaccttgtcacagggtatggtagggaatgtgatctgaacagatacacctcattggtatttgttatccaacagcagttatgatgatcgttcgtccgaccggagggtgtatgaccggcgatactgtggcagctacagacgcaacgattatagccgggatcggggagatgcctactatgacacagactatcggcattcctatgaatatcagcgggagaacagcagttaccgcagccagcgcagcagccggaggaagcacagacggcggaggaggcgcagccggacatttagccgctcatcttcggtgagtgccagcccaggcccttcctctccccactcttctgcaggccctctaggactctggtaagtgagcagtatccttgttctcagctgaacattggggcatgaacactgaggtgggcactgagtttgcctactttcttggaagctctccgactcttgaagggccctggatctgctttggagatggatgggcacggagcatttgtgacccccagtgctctccctggcatgttgggcttattgtgttgggagcagcttctccgccccagcggcctccactctttaatggggaccttgcttgtgaactgcctttttcccccaagcc

SEQ ID NO: 2847 - DNA, 2300 bp, Homo sapien
ttatttctctttcaattgacctttctgaccacttctcaattccttctgtaaagtctctaactctttctctttctcattttctttttttcttttcttttcttttttttttttttttttttttgagatagagtctcactctgtcgcccaagctggagtgcagtggcacgatcacgggtcactacagcctcaacctccccaggctcaggtgatcctcccacctcagcctcccgagtagctgggactacaggtgggagacaccatgaatggctaatttttattttttattttattttattttagacacagtctcactctgtcgcccaggctggagtgcaatggcaccatctcggctcactgcaacctccaccttctggattcaagcgattctcgtgcctcagccttccaaatagctgggattacaggcacctgccatcacacccggctaatttttgtatttttagtagagacagggtttcaccaggttggccaggctggtctcgaactcctgtgctcaagtgatccaccttcctgggcctccaaaactgttgggattacaggcatgagccaccgcgcttggcctaatttttgtatttttttttttttttttttttttttttttgagacggagtctcgctgtcgcccaggctggagtgcagtggcgcaatctcggctcactgcaggctccgccccctggggttcacgccattctcctgcctcagcctcccgagtagctgggactacaggcgcccgccacctcgcccggctaattttttgtatttttagtagagacggggtttcaccgtgttagccaggatggtctcgatctcctgacctcgtgatccgcccgccttggcctcccaaagtgctgggattacaggcgtgagccaccgcgcccggccttgtatttttttaagagtctgggttttgccctgttgcccaggctgtctcaaactcctatgcttaagtgatccacccacgttggcctcccaaagtgttggtattacaggcgtgagccacctcgcccagccttcctgttcttttttaagatttagtaaactggccaagcgccgtggctgatgcttgtaatcccagcactttgggaggccgatgggggaggattgcttgagctcaggggttcaagactagcctgggtaacaaagtgaggcactatctctacaagaaaaaaaaaaatagctgggcgtggtgatgcgcgcttttttttttttttttttttttttttgagacagagtctcgctctgtcacccaggctgcagtgcaatggcccgatctcggctcactgcaacctccgcctcccgggttcaagcgattctcctacctcagcctcctgagtagctgggattacaggcgcccgccaccatgcccggctaatttttgtatttttagtagagacgggatttcaccatgttgatcaggctaatctcgaactcctgacctcgtgatccgcccgcctcggcttcccaaagtgttgggattataggcgagagccaccgcgcccggccctagtaaacttgtatttctcacacattatgtaagccaccttaggatacagttctcaagtaagtcccccttttcggcacccgattctccaaccctccattgctcaaacctttcctccatggctgtgtccccaccccgagtcgtgcataacttttgttgatgacaaaaggtggcagacttttgtcctggggataggtaggtgaagtgttttaagaaatggttattttcaggctatgcagaagaatgagacttcaccatcaagcctcactacagtcaggcttgcagagcagcgacactgtattgacaatgacaatcctttcttttaaactccaaacctaactaagccacacgtctccatgcaaagggtaaaagattgaagacggagtgggaaaggacaggaggcggggcatagcgggcctggaaggcttccagcttgtccctgtggaccctcctcgcccctatgaacttccgcccccagtacctccgaggctctgacaggcggatgcctgccaactacgtgagcacgtggtggcgcgcgcggtcctgggggcggagcccagggggtagctgggaagcgacgcaggacgtcggtccgtgcgtacgtgctcgctcacggcggcggcggcggagcggagaggccagagccggagaccgagctgggatcgggccccgggcgggggcggtgcgagcggcgccaagcagatcttaggggcggggacggagccggggcgggcgggactgaagcggagcccgggaacggggcgggaggtcccagggtcccg

SEQ ID NO: 2848 - DNA, 2300 bp, Homo sapien
gagactctatctcaaaaaaaaaaaaaaaaaaaaaagaaaagaaaagaaaaaaagaaaatgagaaagagaaagagttagagactttacagaaggaattgagaagtggtcagaaaggtcaattgaaagagaaataatataatctgagaataacgatattaaagtcagggagctgagcaaggtggctcacacctgtagtcccagctactcaggaaactgaggtgggaagattgctttgaggctgcagtgggtcatgatcacaccactgcactccagcttgagcaacagagcaagaccctgactctagaatgagtaaataaataaagtcaggaaatattagagaggagctggatgaaggatggtcagatggaggttagatcagataaccagacatagtttagagaagttccctggaatagaacatggagagcaatcaatgaaggagtcggggagagagaagtaaagatttcacttccacctcctggaacattttcctagattattaattcattcaacaagcatttactgaatgtccactatgtgtccagaattatgccaggtgcaaggttcctgtttctcagagtttcacaatctaacaggagagaaaatctgtaaataaataatgagaccatgctcatgcctgtaatcctagcactttgggaagccaaggcaggaagatcacttgagctctgagttcaaaaccagcctgggcaacatagtgtgacctcatctctaaaataataataataatggtagccctgtgacatgagttgctcaaaacagtggtgccctggctgctgtaaaaaagctctagaatagaccctacctgaggaaaggagagttggaaatgtgttcctaggtttcctagagaaagcaagatctgaaccaactgttcgaaagtgaattggaggagaataccaggcagagaaaatatttgcaaaagcatagagacaaggcagcacaaagtctttcagcatgattggggctgtggctttcaagagagggactgtcagaagagagactgttgaaactaggtccaaattttttgggcctggtacaccatgctaagcagcttaaatgtacccctgtagaagatgggaaagcttgatgggcttcaagcaagtgacacagccatagttggattttaggaaggtaactggcagggaatggaagaagaattggcctggaagaggttgaagactcttttagaggtttccgaagtaatttaagtgaaaaaatgctgagggcttgaaatgaggcagtggtaataagaattggagatgaaggggagaatttgagatatttaggaatttgtagcacttcgcatagcactgcaatttacctgtctgtcgttgggcacagatgagcagtggctttatggctaggcctttgtttttgttttgttttgtgttgttttccattactacatggagatgctaagactaggacttttgtattcatttttgtttcctcagcatccactcaatgacaggcagagttgcacttggtgaaggctgacagaatgaattaggaaattaaatactaggggaagcagttcggaggagaccaaaagacaagaatatgcctaggacagtgttgagagaagacgggagcaggacagaagtccctgggcgagagtggagaagaatcccaaaagccatttccacttcttccattggtccccaatccctctccctcccaagtccttcaagctacaaacccgcgtccgattttcccgccactgcagggggctcctcctccctggttctcagtggatgaaaggccaacgctaggccacgccctctccctggctcaggctgcgctccccgccttctttgctaagccacgcccctctcggagttcctccaggatcccggcgtcccagccccgcccggtcttggcgcggccctcgccagggggcgccgcgcagcccgcccgccgcccgccagtctagcacacaccccctccgccccgcgcgccggcgattccgagcctacgacgcctccgctagagcccgcggggctgcgccgactcctgctctggaggggttgcgggtacctgatggccacagagggctctaggaggccgagcgtgtaagcggggtgggcgccatggaggcagagcagcggccggcggcgggggccagcgaaggggcgacccctggactggaggcggtgcctcccgttgctcccccgcctgcgaccgcggcctcaggtccgatccccaaatctgggcctgagcctaagaggaggcaccttgggacgctgctccagcctacggtcaacaagttctcccttcgggtg

SEQ ID NO: 2849 - DNA, 2300 bp, Homo sapien
tgttagccaggatggtctcaatctcctgaccttgtgatctgcccaccttggcctcccaaagtgctgggattacaggcgtgagccaccacgcccagctatttttttttttttttttttttttttttttttttgagacagagtttcactcttgttgcccaggctggagtgcaatggcgcaatctcggctcatggcaacctccacctcccaggttcaagcgattctcctgcctcagcctcctgagtagctgggatcacaggcatgtgccaccactcccagctaattttgtatttttagtagagatgaggtttctccatgttggtcaggctggtctcgaactcccagcctcaggcgatccgcccaccttggcctctcaaagtgctgggattacagatatgagccaccgcacccagcgcctggctaatttttaatttttttttttttttttttgagatggagtctcgctctgtcacccaggctggagtacagtggcgtgatctctgttcactgcagcctccgcctcccgggttcaagtgattctcctgcctcagcctcccgagtagctgggactacaggtgtgcaccaccatgcccagctaatttttatatttttcgtacagacggggtttcaccatgttggccaggatggtctcgagctcttgaccttgtgatctgcccatcttggcctcccaaagtgctgggattacaggcgtgagccaccacacctggccttcttctttttttctttgaggcagagtctcactgttgtcacccaggttggagagcagtggtgcgatctcggctcactgcaacctctgccttccgggttcatgccattctcctgcctcagcctcctgagtagctggggttacaggctctcgccaccatgcccagctaatttttgtattttttgtagagacgaggttttgccatgttggccagattggtctcaaactcctgacctcaggtgatccgccagtctcagcctcccaaagtgctgggattacaggcatgagtcaccaggcctggcctaatttttaacttttgtagagataggatcttactatgttgcccaggctggtcttgaactcctggactcaagtgatcccactttggcctcccaaagcgctgggattacaggcgtgagccatagcttttcttttgagacagggtctcgctctgtcagtcaggctggagtacacctcagcctcctgagtagctgggactttaggtgtgcaccacctggcctggctaattttttttatttgttgttgagatgaggtctcactatgttgcccaggctgtttcttgcttcttttgctcagcattgcatttgtgaaattcatccatagggctgaatgtagctgtagttgggtaatttcacagctgtatggtatgccagcccataaatagtgtatttatctacttatctgtctacatttttctacacaaggacatgtgtgttgttctcaaatttaatgctgctataaacattcctatgtgtatctcctggagcgcatattttccttggatgtgtctatacgtaggaatgggattgctgagttgcagggaatgcaaatgtttaacttcactagataatgctgaactattttcccaaatggtggtcccaacttatactcccaacagctgtaaacagtcattctgttattgtgtatctttgcccattcttggccatgtcagcctatcttctgtcagtctagtggctggtgaaatatcctcatggtcttactcctcatctcactcccaccttaggttttactgggacctgatcatgctgctgctgatggtggggaacctcatcgtcctgcctgtgggcatcaccttcttcaaggaggagaactccccgccttggatcgtcttcaacgtattgtctgatactttcttcctactggatctggtgctcaacttccgaacgggcatcgtggtggaggagggtgctgagatcctgctggcaccgcgggccatccgcacgcgctacctgcgcacctggttcctggttgacctcatctcttctatccctgtggattacatcttcctagtggtggagctggagccacggttggacgctgaggtctacaaaacggcacgggccctacgcatcgttcgcttcaccaagatcctaagcctgctgaggctgctccgcctctcccgcctcatccgctacatacaccagtgggaggaggtggggtggggagatggcgggcggggcagtgggtgggggatgttgggggagaagggggcggggcggctggtggacttctctaggaagatgctatgggtgg

SEQ ID NO: 2850 - DNA, 2300 bp, Homo sapien
atctggtgctcaacttccgaacgggcatcgtggtggaggagggtgctgagatcctgctggcaccgcgggccatccgcacgcgctacctgcgcacctggttcctggttgacctcatctcttctatccctgtggattacatcttcctagtggtggagctggagccacggttggacgctgaggtctacaaaacggcacgggccctacgcatcgttcgcttcaccaagatcctaagcctgctgaggctgctccgcctctcccgcctcatccgctacatacaccagtgggaggaggtggggtggggagatggcgggcggggcagtgggtgggggatgttgggggagaagggggcggggcggctggtggacttctctaggaagatgctatgggtggggctcctggtgaccttatagtgtggggaagatgggtggggcttccgtgcgtgagctctctccaaaactggtgggggagaagcaggaacagaatgagggttcgggggatggggcctggggtgaagatggtggcacaggagggtggagcacagctgccggacacactttagagttagctggatgctgggcggaggatgaggtgtggaagaagctggagcttcagcttcagagcagcagagtttagtggttcagactgtgggctctgcagtctcattgtctttggtcagatcccagttttattgtttactataggagacttggttttctgttctataaaatgagagtgttaaatacacttacctgtgataagactgttaggattaaaggaattaatacatgcaaatcacttagaaaggtgtctagcacatactaagttctcagtgaagccactattatatattattattattattatttttattatactttaagttttagggtacatgtgcacattgtgcaggttagttacatatgtatacatgtgctatgctggtgcgctgcacccactaactcgtcacctagcattaggtatatctcccaatgctatccctcccccctccccccacccattatatattattatgactggaaaggagagggctgctggattaattcttacacatatgccctggagacattacactgtgaaatgccctctctcttttctaggctacacctgggcagcttgtgcaatagatttgtttgattctctgctgtgacacttactatgtggttctgggcacatgactgacctcagctttcctatctataagatgagagaaataagaaactgctttgcattagctatacatgtgtgccacaaaactccacacaaatgaataatagttgtattttttaattcatgggggctggggctagggagtagttcagaagagaatttgccaggctgggaatggaggaggacaagcagggaggggttcctgtccacagcagctcctcctcggactcctcagatctttcacatgacctatgacctggccagtgctgtggttcgcatcttcaacctcattgggatgatgctgctgctatgtcactgggatggctgtctgcagttcctggtgcccatgctgcaggacttccctcccgactgctgggtctccatcaaccacatggtggtgagaagtccccacagctctgcctttcctgggccttcttagggctcttctgcctgagtagcagggatggccacagggagcaggaggtgggagatgatcacaacagaaaataggagcgaggaggtggggaggagggaggaaaggggaaggagacccagaagaagtgctcgtgtgttggagggagcaggcaaaggaagggtacctacccggaagctgaggcccccaagttgcaatagaggacccttttgcctcagggccccccagaaccaaacttaagtgcctgccaggaggaaggcctgcagtagaaggggcagacagaaagaccaaagaaggaaaaggggcaggcagagaatgaggctccgaggggcccatgcccagctctgcaatatactctgcccctcagaaccactcgtggggccgccagtattcccatgccctgttcaaggccatgagccacatgctgtgcattggctatgggcagcaggcacctgtaggcatgcccgacgtctggctcaccatgctcagcatgatcgtaggtgccacatgctacgccatgttcatcggccatgccacggcactcatccagtccctggactcttcccggcgtcagtaccaggagaaggtcagcagggacaggagagggaggtgtggcatggaggggtgttggagactgggtagcctgacttgaggcccattctgatgtgtgcccctgttg

SEQ ID NO: 2851 - DNA, 2300 bp, Homo sapien
tggtgtttataggagtgtttaagaaatttgaagccagtactatggctcacacttgtaatcctggcattttgggagaccaaggcaggaggaccacttgagcataggtgttcaagaccaacctgggcaacagagtgacaccagtctctacaaaaataaaaagtcagcacctgtggaaagaaaggaaaaaaatatttttaataaataaaaatttaaaaagtagccaggcatggtggtgcacacctgtagtactggctacttgggaggctgaggtgggaggatcgttggagcccaggaagtcaaggctacagtgagccatgatcacacgagtgcactccagccagggtgacagagtgagaccctttaaaaaaaaaagaaagaaaacaaggctgggcatgatggctcacacctgtaatcccaccagtttgagaggccgaggctggtggatacttgaggccaggagttggagaccagcctggacaacatggtgaaaccccatctttactaaaaatacaaaaattaggccaggcacagtggctcacacctgtaatcccagcactttgggaagctgtggcgggcagatcacctgaggtcaggagttcgagaccagcctgaccaacatggtgaaaccccgtctctactaaaaatacaaaaattagccaggcgtggtggtgcatgcctgtaatcccagctactcaggaggctgagacaggataatcgcttgaacccaggaggcagaagttgcagtgagccaagatcacgccactgcactccaacctgggcaacagagtcagactcagtctcaaaaaaaaaaaaaaaaagaaaagaaaagaaaaaagaaaaacaaaattagctgggtgtggtggtgcacgtctgtaatcccagctactcggtaggctgaggcaggaggatcgcagaggttgcaatgaactgagattgcgccactgcactccagcctgggcgacagagtgagactctgtgaaaaaaaaaagaaaaaaaagaaaaaagaaaaagaaaaaaggaaggaagggagggaggaaagaaaatttccctgggggtaggagtctataagtttagcaaaatagtcgatctttcagtgtttccagcaacaacctaatcaagtttatcagtgtctgagaatgttcaaggtaccatcttgggttcaaacatgtaggcgaaaacatgcagctggccaggttacagagtggtgaaggcactctgcatttcttggttgagacagagaaaaaaagtggtcagaactgggtaaccctccccccaccatattatcacagtgatcccttttgtctttcttcaggctccagccccaccctacagcccctgctccctggattcactagagctaacttcagtaaagtacaaagaaaatggggccatatgactggccaaaaaaaaaatatctattcacgtggatgaccagatagtatgaatggattgaaaatttatcaggaaaaaaggatgagaggaaatgccaggagatgagggcagagagcaggccgttctgggggagggattctgtggggacagggtggcctactgggtgtgccccttttctcttctctgtctcccttagataagaccagcagttttgtcatcctctccctctcattccatggtcccgcagccccaggcccacactgaaagcatgtcgatccaggagaacatatcatccctgcagcttcggtcatgggtctctaagtcccaaagagacttagcaaagtccatcctgattggggctccaggaggtaagaaggggagacagaagccatggaacataggaggaaaatgagggtgaaaactaggagccagggtggagggcataaatgatccacatcagccactggctaggtgggttttggagaggaacgtacgttcttcagagcctcccgtgtgttaaattatggaccctggcctgggtcttttccaggccctataggcaggccagagccacagcatgtaagccacggggcactcccgtggttcctggactctggcccctggcatacagggcttccaatggaacaggagacagtggtgacactttaaccagtctgcagaactgatccccagcccagctgggcctcatgcctctgacaacccaacagtgtggagcagacccacagagagggagacccagagaggtgtgcagtggcatggaaggtgcggctggaatcgggggctcctctgaactgggatgggtcaagctacagggacctctgtgtctgtagcagctttgagaagcctggggagactcagaggatggggtggggaagccagccagtagc

SEQ ID NO: 2852 - DNA, 2300 bp, Homo sapien
acatatttatttctctgatacttgttgatagtctgtctccccactatactgtaaatctcacagagggcaaaggccctgtctgttttgctcactactgtgtccttagggcctgatacagcgtaggtgctcgataaagattggacagtggggaatgggcaaatggtaactaatgaatgctatgatgatgatgatgctatcaaagcccttccagagaatcccaccagttagtatcagctgaacccacagctagtgtcacaccaaaagtggcatcagggcagcactcacaaaggatgccccaaaccatcccaagatggggctggttgggattccagtgaatgaagcactaaatgccagggcaatcaggccaaagcatacattaggggaacttacctacagaacagctactgcacatccttgctgtggacaatgggacaaagggtgttctacccaggtatgttctcaaggaggggttcggggtatggtgtttataggagtgtttaagaaatttgaagccagtactatggctcacacttgtaatcctggcattttgggagaccaaggcaggaggaccacttgagcataggtgttcaagaccaacctgggcaacagagtgacaccagtctctacaaaaataaaaagtcagcacctgtggaaagaaaggaaaaaaatatttttaataaataaaaatttaaaaagtagccaggcatggtggtgcacacctgtagtactggctacttgggaggctgaggtgggaggatcgttggagcccaggaagtcaaggctacagtgagccatgatcacacgagtgcactccagccagggtgacagagtgagaccctttaaaaaaaaaagaaagaaaacaaggctgggcatgatggctcacacctgtaatcccaccagtttgagaggccgaggctggtggatacttgaggccaggagttggagaccagcctggacaacatggtgaaaccccatctttactaaaaatacaaaaattaggccaggcacagtggctcacacctgtaatcccagcactttgggaagctgtggcgggcagatcacctgaggtcaggagttcgagaccagcctgaccaacatggtgaaaccccgtctctactaaaaatacaaaaattagccaggcgtggtggtgcatgcctgtaatcccagctactcaggaggctgagacaggataatcgcttgaacccaggaggcagaagttgcagtgagccaagatcacgccactgcactccaacctgggcaacagagtcagactcagtctcaaaaaaaaaaaaaaaaagaaaagaaaagaaaaaagaaaaacaaaattagctgggtgtggtggtgcacgtctgtaatcccagctactcggtaggctgaggcaggaggatcgcagaggttgcaatgaactgagattgcgccactgcactccagcctgggcgacagagtgagactctgtgaaaaaaaaaagaaaaaaaagaaaaaagaaaaagaaaaaaggaaggaagggagggaggaaagaaaatttccctgggggtaggagtctataagtttagcaaaatagtcgatctttcagtgtttccagcaacaacctaatcaagtttatcagtgtctgagaatgttcaaggtaccatcttgggttcaaacatgtaggcgaaaacatgcagctggccaggttacagagtggtgaaggcactctgcatttcttggttgagacagagaaaaaaagtggtcagaactgggtaaccctccccccaccatattatcacagtgatcccttttgtctttcttcaggctccagccccaccctacagcccctgctccctggattcactagagctaacttcagtaaagtacaaagaaaatggggccatatgactggccaaaaaaaaaatatctattcacgtggatgaccagatagtatgaatggattgaaaatttatcaggaaaaaaggatgagaggaaatgccaggagatgagggcagagagcaggccgttctgggggagggattctgtggggacagggtggcctactgggtgtgccccttttctcttctctgtctcccttagataagaccagcagttttgtcatcctctccctctcattccatggtcccgcagccccaggcccacactgaaagcatgtcgatccaggagaacatatcatccctgcagcttcggtcatgggtctctaagtcccaaagagacttagcaaagtccatcctgattggggctccaggaggtaagaaggggagacagaagccatggaacataggaggaaaatgagggtgaaaactaggagc

SEQ ID NO: 2853 - DNA, 2300 bp, Homo sapien
ttcttaaaggtggtgtgtccggagtttgttccttctgatgttcagatgtgttcggagttttttccttctggtgggttcgtggtcttgctggctcatgagtgaagctgcagaccttcgcggtgagtgttacagctgttaaggccgcgcatctggagttgttcattcctcctgtttcattcctcccggagcgatctcggttcaccacaacctctgcctcccgggttcaagcgattctcctgcctcagcttctcgagtagctggcactacaggtgtgcgccaccatgctgggctaattttggattttttagtagagatggggtttcactatgttggccaggctggtcttgaactcctgacctcgtgatccgcccaccttggcctcccaaagctctgggattacaggcgtgagccactgcacccagccgtgttttgtccaattctttgttcaagatgccaagaacctggacaccctccaccggtgacagtaccttatatacacggaatcatacagtatctgtccttttgagtctggcttatttcacttagcataattgtcagaggtgcgtgaaccagagcaactccatcttgaatagggactgggtagaataaggctgagacctactggactgcatttccagttggtttaggcattctaagtcacaggatgagataggagattggctcaagatacaggtcataaagaccttgctgataaaacagattgcagtaaagaaactggccaaaacctaccaaaaccaagatggcaacaagagtgacctctggtggtcttcaacgctatactcctaccacatgctgtgtcgacatcagggagttaactgtatatggtctacaaagcagaggcatgaataatccaacccttgtttagcttataatcaataaataactgcctgggccaagtggctcgtacttgtaatcccagcactttcagaggtcgaggtggctggatcacttgaggtcaggagttcgagaccaggctggccaatctggagaaaccccctctctactaaaaacacaaaaattagctgggcatgctggcaggcacctgtaatccaggagaatcacttgaacccgggaagcgaggttgcagcctcccacgtagctggaattaaggcgcggaccagcacacctgggtaatttttgtatttttagtagagaaggggttttgccatgttgaccaggctggtctcagattcctgaccgcaggtgatccgcccaaagtgctggaattacaagtgtgagactcatctttttttttttttttttttgagacggagtcttgctctgtctccccagctagagtgcagtggttcgctggatctcagctcactgcaacctctgccttacgagttcaagcgattctcccgcctcagccctcctgagtggctgggattacaggcgcgcgccaccacgcccgactaattttttttttttgtatttttagtagagacggggtttcaccacattggtcaggctggtctcgaactcctgacctcatgatccacccgcctcggcctcccaaagtgctgggattacaggcgtgagccaccgtgcccggcccaagactcatctttcttaagcccttaaagcactttgcacacattacctcatggtattaccaccctcattcaacagatgaggaaagctagtttcaagcaagttcactgaggatcagagacgttaaatgatttgcctaaagttagagaactaataagtgagaaagctagtcctgctgcgttttactaacgtgccaatcagctgcccaggaagataatgaaaacttgagtaagacaggcagccaaagccacagcggggacgttcccagcctggctcgcttccggcactgacgcctccagccgcgacctctagacttcagcccttccattggtcgtccgtcacagtgccacagtgcgccatgctcacacgacggccagcagccaatcagcgcggctcatcttcgcccagccaggacacgcaggatcgcgttatctgtccctcccgcgggcacattgggagttgtagtctaattatatatttccgcccttagtgtggggagagcgggaactactcgacccacagagccgatcgcggagcggattctgcttttaggagtacccgccaacaagcgggaccgagcaggaatccgtatctgggaacaggtgagagaggatgtgtgctgggccttggaggaagggggccgagaccgggccttacttctgtaacgatactgtgaggcatcggaaggccagcctgttgtgtccgttttgaaggtcggtgggcta

SEQ ID NO: 2854 - DNA, 2300 bp, Homo sapien
taaataactgcctgggccaagtggctcgtacttgtaatcccagcactttcagaggtcgaggtggctggatcacttgaggtcaggagttcgagaccaggctggccaatctggagaaaccccctctctactaaaaacacaaaaattagctgggcatgctggcaggcacctgtaatccaggagaatcacttgaacccgggaagcgaggttgcagcctcccacgtagctggaattaaggcgcggaccagcacacctgggtaatttttgtatttttagtagagaaggggttttgccatgttgaccaggctggtctcagattcctgaccgcaggtgatccgcccaaagtgctggaattacaagtgtgagactcatctttttttttttttttttttgagacggagtcttgctctgtctccccagctagagtgcagtggttcgctggatctcagctcactgcaacctctgccttacgagttcaagcgattctcccgcctcagccctcctgagtggctgggattacaggcgcgcgccaccacgcccgactaattttttttttttgtatttttagtagagacggggtttcaccacattggtcaggctggtctcgaactcctgacctcatgatccacccgcctcggcctcccaaagtgctgggattacaggcgtgagccaccgtgcccggcccaagactcatctttcttaagcccttaaagcactttgcacacattacctcatggtattaccaccctcattcaacagatgaggaaagctagtttcaagcaagttcactgaggatcagagacgttaaatgatttgcctaaagttagagaactaataagtgagaaagctagtcctgctgcgttttactaacgtgccaatcagctgcccaggaagataatgaaaacttgagtaagacaggcagccaaagccacagcggggacgttcccagcctggctcgcttccggcactgacgcctccagccgcgacctctagacttcagcccttccattggtcgtccgtcacagtgccacagtgcgccatgctcacacgacggccagcagccaatcagcgcggctcatcttcgcccagccaggacacgcaggatcgcgttatctgtccctcccgcgggcacattgggagttgtagtctaattatatatttccgcccttagtgtggggagagcgggaactactcgacccacagagccgatcgcggagcggattctgcttttaggagtacccgccaacaagcgggaccgagcaggaatccgtatctgggaacaggtgagagaggatgtgtgctgggccttggaggaagggggccgagaccgggccttacttctgtaacgatactgtgaggcatcggaaggccagcctgttgtgtccgttttgaaggtcggtgggctagactggctggccttctaggggtgtggagacttcccaactctgcccttgtgctttcctggaatccccaatatgcccggaccccggtttactcctttgctgcgagcccttctctcccgtccagagttgctccgagcctatctgctcagtcctagcgattcctgtggggcttgggacgcgcggttcaagcaccccggaccatatggatgcagcacccatgggttctcgctccaatgcttctttcctccttggggcgtaactcagaccctgggcacccctctccactgcccaggggagacctgggttctagatttggctctgcctctactatcttcctacctcctagagcctcagtttggcttgtgtaaaataggatgacttaagggtcctttcagcccctaatcctggggtactttactctgtaccgcctccttacccagccttgtgcacgccatcttgaaggcactgagttctagcctgtttattgtaagtggtgattagttgggtctcagtcacccagccatacttttttgttccctgcgtatccttcctgtaattgtccccaagcacattccacaagagggaggggcactctgggctaaggctggggtgggagttatctggggagctgccaccatgcctctgcctttggtgcttgcccctgcagggagtgcttagtgccccctccctatgccactcccaggatgcccctgtcccgctggttgagatctgtgggggtcttcctgctgccagccccctactgggcaccccgggagaggtggctgggttccctacggcggccctccctggtgcacgggtacccagtcctggcctggcacagtgcccgctgctggtgccaagcgtggacagaggaacctcggtgagtgtggttggggtgag

SEQ ID NO: 2855 - DNA, 2300 bp, Homo sapien
gagggagggctcaggatgtgcattgccctcctgaggagtttctcttctccccttactcaggtacaaatctattgtcaagtacaagacagctttctactccttctaccttcctatagctgcagccatgtacatggtgagtgagcctcctcacccctctctgctctgctgatgggggcttttggacagcaaggcatagagcagaaaacgtgaacactgctacccctggtgaaaaactgtgtgaccttgagcaagtcggtctcgctcagtctctttcctcagctggggataaaattcctacttcacaggactgtaaagattaagcaaggcaagggatatgaaagtgcttagcacataataggggaacaatatatcctgtatctgagtatggataggagtgtggagatcatccaggttgagagggagaagagtggattaaagacagtcagtgggattaagtgtctaccctgaccttgcttctctacatttccttttcatcttgaaagaagttggaggtggcaaaaatattaggaaggtggatcagaatgacttggggactgacatttgtgagggaagagacaggctgtgcacctctagaatggattcatctcttttatgactcccaggaaggcctagccaaaaataagtgggattgaggttggaccatcagtcaggactgtctaggtcagggaagccaagatgtctgaagagagaggaaagatttggggctgcagtagggcaagaccccatgggaggaagcagccaggaagatgccggcacccctggggtttggcttattaacccccctttccctgcaggcaggaattgatggcgagaaggagcacgccaatgccaagaagatcctgctggagatgggggagttctttcagattcaggtaagaaggcaggaggcagtagcagagaacaggcaccagcttcactcctcctctgcccaggaacctcatccttcctcttttgctgccctccccctccctgcccaggatgattaccttgacctctttggggaccccagtgtgaccggcaaaattggcactgacatccaggacaacaaatgcagctggctggtggttcagtgtctgcaacgggccactccagaacagtaccagatcctgaaggtgcctgagagagggtggtgggtccctgagttggtggaaagggatagagcagtggttctcaactagaggcagttttcctcccgaggggacatttggcaatgtcagcagacattttttgccattgtcattacaactctgtgtgtgtgcatgtggtacagacatctagttggcaggagccaaagatgttgccaaacatgtagtacacagaacagctcccccagacaggattatctggtcccaaatttcaatagtgccaaggtggagaaaccctggagtagaggatgcctggtatgaggcaatatttgggatagggaagggaagcttgggattttagctacgtagagacacttgaaaattggagggaggaaaggagtgggtggctttggagatgttctggaatatgtgaatgaggggagtggaggggtcctggaggctctggggaaggccaagcccgttttcctgtctttcaacctcttccaggaaaattacgggcagaaggaggctgagaaagtggcccgggtgaaggcgctatatgaggagctggatctgccagcagtgttcttgcaatatgaggaagacagttacagccacattatggctctcattgaacagtacgcagcacccctgcccccagccgtctttctggggcttgcgcgcaaaatctacaagcggagaaagtgacctagagattgcaagggcggggagaggaggctctcaataaataatcgtgtaaccttcttgtggttctgttcttgctcggcccagccagagtctggctctttccagaatgtgcagggtggggtgctgggaggactcgctgcacggaaccaggacccaggggccaaaagcttaggatatatcaaaccctctaggtgggtgacaaaagacgctaaacgctgggggcgggtctgagctacgccacgcccatgcgcgaaggggtgcagctgcgcagcgcagggtaggttgtgctagtgcccctcccctcccgctctgtgccccgccgggcggggaccgtgggagccgcggacaagcccaaggccggagcggttccaggaggaccctggtgaggagggctcggcccatgggtgtagaccgatggacctgggcacgaggggcggggcaggacaagggagcaggagaaatgaatagagaaagggtgcggtggtg

SEQ ID NO: 2856 - DNA, 2300 bp, Homo sapien
aggtggagaaaccctggagtagaggatgcctggtatgaggcaatatttgggatagggaagggaagcttgggattttagctacgtagagacacttgaaaattggagggaggaaaggagtgggtggctttggagatgttctggaatatgtgaatgaggggagtggaggggtcctggaggctctggggaaggccaagcccgttttcctgtctttcaacctcttccaggaaaattacgggcagaaggaggctgagaaagtggcccgggtgaaggcgctatatgaggagctggatctgccagcagtgttcttgcaatatgaggaagacagttacagccacattatggctctcattgaacagtacgcagcacccctgcccccagccgtctttctggggcttgcgcgcaaaatctacaagcggagaaagtgacctagagattgcaagggcggggagaggaggctctcaataaataatcgtgtaaccttcttgtggttctgttcttgctcggcccagccagagtctggctctttccagaatgtgcagggtggggtgctgggaggactcgctgcacggaaccaggacccaggggccaaaagcttaggatatatcaaaccctctaggtgggtgacaaaagacgctaaacgctgggggcgggtctgagctacgccacgcccatgcgcgaaggggtgcagctgcgcagcgcagggtaggttgtgctagtgcccctcccctcccgctctgtgccccgccgggcggggaccgtgggagccgcggacaagcccaaggccggagcggttccaggaggaccctggtgaggagggctcggcccatgggtgtagaccgatggacctgggcacgaggggcggggcaggacaagggagcaggagaaatgaatagagaaagggtgcggtggtggctgaacgatggagacgaatgcggagagaatggacataccgctgttccgaggggcgagggcgcaggctggagcccggccgaggcagccagcagatgcggagttgacaagctgacggctgctccatccttttcctctccagcccccacccctttcctgcattcaccagacaaactctgcgtattgccccacccccatcctccacctcctttcagggcatctgggtgggtctccctgggtcccttcctctgggagtaaggggtaggctggagggcagggccagattgcggcagcagggacctggaggtccattctgggcccggacctcttccaggcccccgccccccttcggagatccagagcgcagccgcgttctctgaccctcccggctccattcccggggggttacattcgactccatctgcaaacactgcagtggaaactaatggtcagtcgattgcgatttgcatctcattgaaatatcttccaaagcagccagagccttcaggcctgctgctgccgtcaagtcacctcggtgtccttccccgcagctcttgtcctcactggccgggcttcaccacctctgtcttctaggtctgcacctgtggttgccaggtaggtggatgtgagagaccctacccttctggttctctagaagccatcccatcgccgctagcatcatgctgtcccctcagagagctttactctgcaacctcaaccacatccacctccagcacgtctccctgggcctgcacttgtcccgccgtcctgagctacaggaggggcctttgagcacaccccctcctccaggagacactgggggcaaggagagcaggggcccctgcagtggcaccctggtggacgccaattccaacagcccagctgtgccctgccggtgctgccaggagcacggtccgggcctagaaaaccggcaggacccgtcacaggaggaagagggggctgcctctccctcagacccaggctgctcctcctcactcagctcctgctcagatcttagccccgatgagtcccctgtctcagtctacttgcgggacctccctggtgatgaggatgcccaccctcagcccagtatcatccccctggagcagggctccccactggcttcagcaggccctggcacctgctcaccggacagcttctgctgctctcctgattcctgctccggagcttcttcttcacccgatcctggcctggactcgaactgcaacgccctgaccacctgccaggacgtcccttccccaggcttggaggaagaggacgagagggcggagcaggatctccctacctctgagctcttagaggcggatgatgggaaaatcgacgctgggaaaacggagcccagttggaagattaacccaatttggaaaatt

SEQ ID NO: 2857 - DNA, 2300 bp, Homo sapien
ccaggcagggcaaggctccccgagtcggaggcgaataggctcccaccggggacaggcggacgggcagcagctgctcctctggggggctcggcgcccccagcagccgcagcccggcgccgggccacccggccagaggagccaggagcagagacccagctgcgcctgcgcccccaccctccaacagggggcgcccgtcggccgagaaccggaaaaccaggggccgagggagcaggaggggaccggctgcaggcgggattggcggggccaggcgcagagggaaggagggcagcgggatgggcagccaggcaagaaggggcgggaagaagagggagcaaacagttagtcccataacccaatgacccacccagtttccctttcccggagcgctccctggtagaaggggcggggaggatgggtgacacagaatggagggaagacagggggccgggttggaagcctaggaggcgtgagcggccgaagcccagccctcctcccgcttcttgcgacctcttaccctccaggccggcctgcgcgcccggctccttcgcggctggggcctcctcgccagccgctgggctgacagcccggccctcctcggactgcccctccgctatgggctgcagtccaggtcggttcttcttccttcggggagggacaggcgggggtgggggccggggcgggaccaaagcccagccaactggggggtctcgaggcgggactggcggggctggggcccggcttcgggaccggagttccttgaaggtggtgacttcccgaggaggtgccgaggagccgcccggcgaccccgagggggggagctcggtgtcgggcgagaagactatgagccagtcactgcgatctttcttcgcctgcgggacaaggggcagccctgggccccgcttgcgcttctgggccagctcgtggaaggacgtgattgtccggtggggcaccggctcctcgctgacgtcacttctccatcctccatcaattttccctgcatctgttttcgagccagaatcagttattcttgtgttggttttccaaccagagtcgaatttttcaggttcacttttccagctagagttaacattcccgttgtttttccaaccagtgttattgttttcagtggttttccattcagctttagttttctctgtgtcaattttccaaattgggttaatcttccaactgggctccgttttcccagcgtcgattttcccatcatccgcctctaagagctcagaggtagggagatcctgctccgccctctcgtcctcttcctccaagcctggggaagggacgtcctggcaggtggtcagggcgttgcagttcgagtccaggccaggatcgggtgaagaagaagctccggagcaggaatcaggagagcagcagaagctgtccggtgagcaggtgccagggcctgctgaagccagtggggagccctgctccagggggatgatactgggctgagggtgggcatcctcatcaccagggaggtcccgcaagtagactgagacaggggactcatcggggctaagatctgagcaggagctgagtgaggaggagcagcctgggtctgagggagaggcagccccctcttcctcctgtgacgggtcctgccggttttctaggcccggaccgtgctcctggcagcaccggcagggcacagctgggctgttggaattggcgtccaccagggtgccactgcaggggcccctgctctccttgcccccagtgtctcctggaggagggggtgtgctcaaaggcccctcctgtagctcaggacggcgggacaagtgcaggcccagggagacgtgctggaggtggatgtggttgaggttgcagagtaaagctctctgaggggacagcatgatgctagcggcgatgggatggcttctagagaaccagaagggtagggtctctcacatccacctacctggcaaccacaggtgcagacctagaagacagaggtggtgaagcccggccagtgaggacaagagctgcggggaaggacaccgaggtgacttgacggcagcagcaggcctgaaggctctggctgctttggaagatatttcaatgagatgcaaatcgcaatcgactgaccattagtttccactgcagtgtttgcagatggagtcgaatgtaaccccccgggaatggagccgggagggtcagagaacgcggctgcgctctggatctccgaaggggggcgggggcctggaagaggtccgggcccagaatggacctccaggtccctgctgccgcaatctggccctgccctccagcctaccccttactcc

SEQ ID NO: 2858 - DNA, 2300 bp, Homo sapien
agcgcagccgcgttctctgaccctcccggctccattcccggggggttacattcgactccatctgcaaacactgcagtggaaactaatggtcagtcgattgcgatttgcatctcattgaaatatcttccaaagcagccagagccttcaggcctgctgctgccgtcaagtcacctcggtgtccttccccgcagctcttgtcctcactggccgggcttcaccacctctgtcttctaggtctgcacctgtggttgccaggtaggtggatgtgagagaccctacccttctggttctctagaagccatcccatcgccgctagcatcatgctgtcccctcagagagctttactctgcaacctcaaccacatccacctccagcacgtctccctgggcctgcacttgtcccgccgtcctgagctacaggaggggcctttgagcacaccccctcctccaggagacactgggggcaaggagagcaggggcccctgcagtggcaccctggtggacgccaattccaacagcccagctgtgccctgccggtgctgccaggagcacggtccgggcctagaaaaccggcaggacccgtcacaggaggaagagggggctgcctctccctcagacccaggctgctcctcctcactcagctcctgctcagatcttagccccgatgagtcccctgtctcagtctacttgcgggacctccctggtgatgaggatgcccaccctcagcccagtatcatccccctggagcagggctccccactggcttcagcaggccctggcacctgctcaccggacagcttctgctgctctcctgattcctgctccggagcttcttcttcacccgatcctggcctggactcgaactgcaacgccctgaccacctgccaggacgtcccttccccaggcttggaggaagaggacgagagggcggagcaggatctccctacctctgagctcttagaggcggatgatgggaaaatcgacgctgggaaaacggagcccagttggaagattaacccaatttggaaaattgacacagagaaaactaaagctgaatggaaaaccactgaaaacaataacactggttggaaaaacaacgggaatgttaactctagctggaaaagtgaacctgaaaaattcgactctggttggaaaaccaacacaagaataactgattctggctcgaaaacagatgcagggaaaattgatggaggatggagaagtgacgtcagcgaggagccggtgccccaccggacaatcacgtccttccacgagctggcccagaagcgcaagcggggcccagggctgccccttgtcccgcaggcgaagaaagatcgcagtgactggctcatagtcttctcgcccgacaccgagctccccccctcggggtcgccgggcggctcctcggcacctcctcgggaagtcaccaccttcaaggaactccggtcccgaagccgggccccagccccgccagtcccgcctcgagaccccccagttggctgggctttggtcccgccccggcccccacccccgcctgtccctccccgaaggaagaagaaccgacctggactgcagcccatagcggaggggcagtccgaggagggccgggctgtcagcccagcggctggcgaggaggccccagccgcgaaggagccgggcgcgcaggccggcctggagggtaagaggtcgcaagaagcgggaggagggctgggcttcggccgctcacgcctcctaggcttccaacccggccccctgtcttccctccattctgtgtcacccatcctccccgccccttctaccagggagcgctccgggaaagggaaactgggtgggtcattgggttatgggactaactgtttgctccctcttcttcccgccccttcttgcctggctgcccatcccgctgccctccttccctctgcgcctggccccgccaatcccgcctgcagccggtcccctcctgctccctcggcccctggttttccggttctcggccgacgggcgccccctgttggagggtgggggcgcaggcgcagctgggtctctgctcctggctcctctggccgggtggcccggcgccgggctgcggctgctgggggcgccgagccccccagaggagcagctgctgcccgtccgcctgtccccggtgggagcctattcgcctccgactcggggagccttgccctgcctggccagccccgagctggcactgctgctgtccccgctctttcccagaagtagcaccttccccgccgcggctcccccaccccgccaggtacccgcccccccgctgccaccgca

SEQ ID NO: 2859 - DNA, 2300 bp, Homo sapien
gacgtcccttccccaggcttggaggaagaggacgagagggcggagcaggatctccctacctctgagctcttagaggcggatgatgggaaaatcgacgctgggaaaacggagcccagttggaagattaacccaatttggaaaattgacacagagaaaactaaagctgaatggaaaaccactgaaaacaataacactggttggaaaaacaacgggaatgttaactctagctggaaaagtgaacctgaaaaattcgactctggttggaaaaccaacacaagaataactgattctggctcgaaaacagatgcagggaaaattgatggaggatggagaagtgacgtcagcgaggagccggtgccccaccggacaatcacgtccttccacgagctggcccagaagcgcaagcggggcccagggctgccccttgtcccgcaggcgaagaaagatcgcagtgactggctcatagtcttctcgcccgacaccgagctccccccctcggggtcgccgggcggctcctcggcacctcctcgggaagtcaccaccttcaaggaactccggtcccgaagccgggccccagccccgccagtcccgcctcgagaccccccagttggctgggctttggtcccgccccggcccccacccccgcctgtccctccccgaaggaagaagaaccgacctggactgcagcccatagcggaggggcagtccgaggagggccgggctgtcagcccagcggctggcgaggaggccccagccgcgaaggagccgggcgcgcaggccggcctggagggtaagaggtcgcaagaagcgggaggagggctgggcttcggccgctcacgcctcctaggcttccaacccggccccctgtcttccctccattctgtgtcacccatcctccccgccccttctaccagggagcgctccgggaaagggaaactgggtgggtcattgggttatgggactaactgtttgctccctcttcttcccgccccttcttgcctggctgcccatcccgctgccctccttccctctgcgcctggccccgccaatcccgcctgcagccggtcccctcctgctccctcggcccctggttttccggttctcggccgacgggcgccccctgttggagggtgggggcgcaggcgcagctgggtctctgctcctggctcctctggccgggtggcccggcgccgggctgcggctgctgggggcgccgagccccccagaggagcagctgctgcccgtccgcctgtccccggtgggagcctattcgcctccgactcggggagccttgccctgcctggccagccccgagctggcactgctgctgtccccgctctttcccagaagtagcaccttccccgccgcggctcccccaccccgccaggtacccgcccccccgctgccaccgcaacctcgtccgccgaaggcccctcgctggaccaggagcccatcgcctccgcccaggctacgtaagacggacccgggctagccccgcgggccacgcctcaggcgggccgccccgcccactctcgcccggccccgttttcgctttttttccggggttgcccagcttagtcccgcccttcagtttaagccgactccaagcaagtttgtcggccttggggagtctggccccgttcctagtgctggagggggaagttgttgcctttcctgctccgtgggccggccccctctccctccagacccacctgggcatagtggacgcgggcttacccagcctccatgccaagtctagggggtcccagcgagtctgttgttaggggctttgggtcacaccctctgtggaattccttggcctgtgcagctcgggcctgccccccgaccttgctagggaggggtggagggtgaagctcccgggagctcattggcactagaggttctggccacgccctctccgcgagtccagtcccacgcgggatgaagagggcaccctccgccaagaggctgctgcgggacccgggtttcccctttccggcgccttccagcctcccaatcctcgggtctcgcctccctccgtctcctccctttcccctgtctgtctttccattggtccatgccgcccacgtgctccccggggctccgcaggcaggactgggccccggggcggtgcgctgggctacacctccctccccgcgccccgtcctctcccgccctacaggccctagcagggcaggcgggaggtgagcgcggccatcccgctcccggagttccgggatcctggaggtgggggctgtgccctgagggagggcacagggaaccgggatggggctggggga

SEQ ID NO: 2860 - DNA, 2300 bp, Homo sapien
cgagggtagaggtagggcctcactggggaaggactcaaaggatgaatgatagttcagaggaagcaggaggggcagaaggtagaggaacagcataagcagggccctggagcaggaagggccaggcgggaagactgttggcaagaccctccaaggcaggggaagagggcagaggccagacagccaaggctttgggtctttcatcctatgggcgatgggcctccttagaaagttttaattagaagagtaataagatcggagatctggattaatggcattctggcagcagtgggaaccagcaggagagaactctttccttcccatcctcccagcccatcagccccatcctctaccatctgaacctctgacctgcatcttcctggagactggaaaaccacagctccaactgcttggtgctaggggagaaaagagggaatggaagttcagggaggtggaggactccagtcctctctgggtggaggatgggagatgagattggaagagggggggccttctctggggatgtgaggcactactactgtgtcccacccatgacgctcctgcagtcccaggtcgtgggaagggcactggaaagaaggcaactcacttgaggaggcccaggataaaggcatggaagcggctacggctgctgctcagcggggctagacggctgacctggctatacagggttccaagggagcgggtgctggagcctgagaacgtggggtgcagtcagccaagcccggccctgccctgcgcactgccgggtcccacgccctcctggctcacctggcttcaccgacgcctccaccacgctccaggggctgctcctgcgctgcccggtgatgaggtccttccggaaaggcttcagcccgtccgccaccagggcgtggagggccgggcagagggtggtcagcaccaggtgccccacatccgggctcagccggctatcacccaactgggcctggaggtggcgcgatgccgatggctccagagatccctccagacacctcccagccacctcccgccaaccattcccgcaccccccgcggagctccattactctcctcatcccaacagcctccccccagccaccttcaccttctgcaccaagttccgggcggccccgaaatgcgagatgattttatcaacggagacgctgacggctatcagaagacctgggaggagtgggaaagggaagacgctaggaggccgcgcccctacccaggcttgcccgaggggcgtggagagactgccttcggacagcctgagagcagggccgggggcgaagggcagtttattcggaagcgcggggtcgggagtcagggtgccctacctttcttctgctcctgcagctgaccagtcccactctgggcttctgccatccacagccgctgggctccggggacaccggcgaaggaccacgaactacggactggcgtaagggaagaagggcgcggtaacacttaccaagtgttattccgaggactccgggctcccgcacaagttgtctccggcgggtctgcagtgctgtgtccccgaagggtcttggggagaggaggcgcaggaccgcctgaagcacggggtagctcgacccgagccccggagtgaaatctcgcacacttcccagcactcgctgtcccccagccccatcccggttccctgtgccctccctcagggcacagcccccacctccaggatcccggaactccgggagcgggatggccgcgctcacctcccgcctgccctgctagggcctgtagggcgggagaggacggggcgcggggagggaggtgtagcccagcgcaccgccccggggcccagtcctgcctgcggagccccggggagcacgtgggcggcatggaccaatggaaagacagacaggggaaagggaggagacggagggaggcgagacccgaggattgggaggctggaaggcgccggaaaggggaaacccgggtcccgcagcagcctcttggcggagggtgccctcttcatcccgcgtgggactggactcgcggagagggcgtggccagaacctctagtgccaatgagctcccgggagcttcaccctccacccctccctagcaaggtcggggggcaggcccgagctgcacaggccaaggaattccacagagggtgtgacccaaagcccctaacaacagactcgctgggaccccctagacttggcatggaggctgggtaagcccgcgtccactatgcccaggtgggtctggagggagagggggccggcccacggagcaggaaaggcaacaacttccccctccagcactaggaacggg

SEQ ID NO: 2861 - DNA, 2300 bp, Homo sapien
caggacctgtaatcccagctactccagaggctgaggcaggaaaatcgctagaacccaagaggtggaggttgcagtgagccaagccattgtactccagcctgggcaacagagcaagatgccgtctcaacaacaacaaaaatatatatatatataatatttacatataatatacattataagatacatatttttagagacaaagtcttgctataatatatatgtatttttagaggcaaggtcacactctgtcaccaaggctggagtgcagtgaaggaacacagctcattgcagcctcaacctcctgagtgcaagtgatcctcccacctcagcctcccaagtagctagaaccacagacacgagccaccacgctcatttaatttttaaatgttttgtagagatggaccaggtgcggtgctcacacctgtaatcttagcactttgggaggtcaagttgagaggatcgcttgagtgcaggagttcaaaaccagcctgggtaacatagtgagaccccatctctacaaaaaacacaaaaattagccaggcctggtggcccccgcctgcagtcccagccactgtgggggagggatgggggtggagacgcttgagcccgggaggtggaggttgcagtgaactgagattgtgccactgtagtccagcctgggggacgcagcaagaccctgtctaaaataaacaaacaaacaaacagttctttgtagaaacggtagctacaaccagccacactgctcaggctgtcttgaactcctggcctcaagtgatcctcctgcctcagcctgacaaactgctgggattacaggtgtgagccaccacacctggcctgattttattttttacagcaaaaatttataagtgttttaaaaatatacctttttctttttaaaaccaggatttgaacctaggttttccgagtctagaagcccacctcataaccattaaattcttcctgtgcattctggttttatattaatcaacaaatagtgaccaaaatctttaatatatcatacaaggttcttggcacaatctgatccctacaacctctatctgtatcccatgctactctactccatgttttgaccacaaaagctttctttcgcttgcctgaaactatcatgctttttcagacttttgtgtatgctctctcctcactcctttaaataacagatgaagcctattcttcacatttttagcatagtccttactttttctgggaaactaagttagttatttctattatatacagtactcttataactctaagtaactcttcataatagcacttggatggttaaaatccatgaaggtaggaaaagtttctagatttattcaccactctatcaattctaagtacatgaaacataataatcttccaacaaatactaattgaaaaaataaatgaatacatattatataacaagtactagtgtaagctccaattagaacaagttgaaaaactgttgctatctctgggaactcagtgtgtcatgtccttccctacacaatctcttgagggcagaaattttatctttctctttataatctcttcaaatctcagaatacaatcttgtgaaaaagtatgtgtttaattttgctgaccatgatactagaatttgctggaatagaaaggctaacctattcaaaagccttttttgtcgttgttgagacgaagtcttactctgtcatccaggttggagtgcagtggtacaatctaggctcactgcaacctctgcttccctggctcaagcgatccccccacctcagcctcccaagtagctgggaccacaggcgtgcaacaccaccacgcccagctaatttattgtattttttggtaaagacggggtttcaccatgttacccaggctgatgaaagccttttcttgaagcacattttaaagatgacccttcctaacataaatggtcaagatgtctcaaactacagtaaaggcagaaatcatcctccttgtcagtgttttaaagcttcaataattaaactgctatgacagagataccaaaatagactgatagaaaggaatataaaaatatttgacatttcaccaggcccccagcttggggcgccttccttccccatggcgggacacctggcttcggatgcctgccttcttgccccctccaggcggtggaggtgatgggccaggggggccggagccgggctgggttgatcctcggacctggctaagcttccaaggccctcctggagggccaggaatcgggccgggagttgggtcaggctctgaggtgtgggggattcccccatgccccccgctgt

SEQ ID NO: 2862 - DNA, 2300 bp, Homo sapien
actgacaaagaacaaagccatagatacttgtgctatattatattcccttatcaccaaattcagagtcctttactaatactgcagaaataagtttgcagatgataaaaagaataaaaaacatggaccctaaagttctcctgtcaacatgttcaaataccatagactctttcatcttaaactcatactaacatccacacacccgaacaatgaaaatgaaaggttttcaaatgagacctaaatataaattggctctattttattacattttaagttcctaaaatcatatatataaatcatgtgattgtgcttatgctcatcttctaacttgagggcccagtgtctttcatcagattctcaaaaggataagtgaccccaaaaaattttaagaaccactcatctagcctatcaagaaacatcccatttttcagaagaatacggttaagtggcttagtttatgcattctttcttcatattcatagaggggattcttactatatgaaatgagtctttcaaaggattccttcagcccagccaagaagttccaacatccacaggcacatgtattaacaattaccagaacccaaaaacagttctctggttttaattccacaccgcctccctcaacttaatacccaccactgtcaaaacaactcccctcacgttgtacccaggctatttacagagacaccttgattatcctcacgccaaggcatggaccatttattgaacaggcagtcaacaaatatttgttgaatgaatgaaaaaggatccttcctcccacagatttcaagttaagctgtcagcacccatgcagctgctctggtacaagttaagctgtgaaagccttctctccctcacacatacaacctcaagtgtcagaaatgctctgcttcctccataaatccaaaataatatagtcatggatatgcatttcatacaggtcagactcggcaaggacagctacgttccacatacatatctgacacaatcggtctcccccaaatacaagccaaccagtcttatgtgctcctatctttccagcatactcagatttgccgacaaagacttcctgaggcaccatggtatgctgaatatactgctgcagtagtagtgaaaatatgggagttacagttccaactttgtcaccaatttaacatgcggccttggagaagttctctccttatgcctaaatttcctattttgtaaaatggaagaaagcatcctaccattttcacagagattcagtatcacaaaaaaactgaaagagctttcttattgtattgtaaactattactataaacccgcgacaacaaataaggccacccattctttacaactttgtagtaatgattctgttaaagatattttggcccttcacatttacacaactcactctaaccaaaggcacaaactattcttaagaccacaactggctatgccaagtttctcccctccctgacctcacagacacatgctgtacagaacactaccattgccgctctttcccaacaagtaactaggggctcccaatccctaaaatacacacacatatcaacctgcaaggaacctcccaacatttattcaagaaataagctaacttataaggggaactccattacacttacacaaataaaggcaaactcttacggaaacacttgccatcctcacatacacacaccaacacagccgctacacaccaacagaccatctgtctgctagaccaaaaacatctctttccatgtacaaactaaccagtgacatttattaaacttacaacactgagatcatcctgtcgttcccacataccgttcaacgcggcagggacaccacagaccttgtcacacaggtaaaatcccctctcaagatcgtgtcctcgaccactcttatcccttaattaaacacacacaaactggactatgggggaggctccgatcatgcctacaaacacaaactaacctgtcaggggcacagccgactccgcctccactcgcttacttcccagccccctccgggagtctgcctgtcagggacaccccttcaccccgcctggagggacttcccggtaggctcaggatccccctccctgctctcccctcccccatcttcaccactgctctctcagagatccaggtccgggagatgacagtggctcccagaaagcccaggattcaatcgctgagagagtgcttaggcccgaatgccggcccaaatcgttctactcaccgtgtcggaggccgaggccgaggccgagagcgatgagagtgcagggaagtggggaagagggggtggccgccaggctc

SEQ ID NO: 2863 - DNA, 2300 bp, Homo sapien
taaggctgctttcctctttaccttaaagaaacgaaacaagtaaacaacacttaatccacgtatcctaaaggggaaatttgggactgtctacttgaattttggaggttgcaagggctttttatttttatttttttccctcagatggagtttcgctcttgttgcccaggctggagtgcaatggcaccatctcggctcactgcaatctccgcctcccaggttcaagcgattctcctgcctcagtctcctgagtagctgggattacaggcgtccaccaccacgcctggctaatttttgtatttttagtagagacgggattttgccatgttggccaggctggtctcgaactcctgacctcaggtcatccgcccaccttggcctcccaaagcgctgggattacaagcgttagccaccgcgcccggccttgcatgggcttttgaacagtcatttctgaattacttcctggatccccaggagtccacaaatgtgaaggaaagggaaacccaagtagatccttccggtaatttattctgctttaccctttaggtaaaggtaaaaactactagatcaagtaaactttggaattatttgtggactttaatcgtccgtatttctgctgcattcaattatcaaatatcagtcaagtgttttgagaaacaaatattcagtagccacagaaacctaacaggcctatgtttgctttgttttattaactccttggagggacagaacactaccaattacacccacaaacgttatcgacatcaacagaactgtaaatgacaacacggcaatattctgcactttccctatgcctaggagctaattccactttacatatattatcttattatttcacacattaaccctggaggcatgtttggagttgcctaatttttatgtacactttttgataaggaactaacaaaaataacttgctgaaggaagaaaagggagactaagtccagaactgaatgaaaagcacatggtttcttcatcctccatcaccaggctgtctaacgaggctgaagaagtaccatccatgagtaagtgcgtcaagggcaaacaaacatcatcgcatatggacagtggtgtgaaattcgagaaatccgaggagggttaacaacaacaaaaagcacaccaccacgccgatcttcctcgggtcccaggttggcaactcaacgcccgggaggaatccccccggaggcgcgccggtcctactggcctcactccctacctcctggaggtccggagtcccgctcctttccctcagcggtacaatacccgtgtcggtccattccctcaccgtgagtcgaggactagttctcctgactaggcgaccggcacacaccgcctgcgaccagctccacagcagcggtcctgctactgcgaagtaggctcaggtcaaccggcaggaaacgactcaacgcgcagccgccgcggcctccaaccaccggtgggcagaggggcgctaggcagtcctcgatccgctcgccgcgatccggcggaggaggaggagcagagggaggcgagccgcagcgctgcggcgaggagcccagggaggtaggttgtcgtggggctcggtccgccattctggcaattccagtcaaacggcaagccccgacccgctcggcccgtcccttcctctcctgcccctgcagccgacaggaatggaacagtcccgcgggggggattgtgggaggcgcacgcgcgaggggtggagggtggtagggggggctggcggcggcggcggcggccgtggcggcggttggtggccgtgggggcggggaaggggggggaggagagaagaggaggtggaggaggaggaggaggaggcttgggcttgcgccgttgaaggtacgcgtgagggcctgcgccggcgccggcttgacagggcctgaggggtagtgagggactggacgagggggttcctgtgggtgagcgcgtacgggctggctggcgcgcggggcggccgaaggtggtggttggtgggagcagccagcgacgagcccgtagacactcgtacgcgtgcgggcgggcgtgcgcgctacgcggacggagtcgggcggagcgggggacggtgggaaagaacgcaaggaggaaggagtggaaggttgaggggggcgctaggcgcccttcgctccctccctctggaggagctgccgccgccaccgccgccactctgctgctgccgccgccgccgccgccgctcccgccgccattttgggttcgctttgcggaggggagacgatcccagtctcggttgcgggacccgcctcccctcagtttgccccctttagcct

SEQ ID NO: 2864 - DNA, 2300 bp, Homo sapien
gaagaagtctcactctgttgcccaggctggagtgcagtggtgtgatttcggctcactgcaacctccgcctcccgggttcaagcgattctcccgtctcagccgcctgagtagctgggattacagatatgcgccaccacgcctggctaatttttgtatttttagtagggagggggtttcaccatgttggtcaggctggtctcgaactcctgaccccaggtgatccacccgccttggtctcccaaagtgctgggattacaggcgtgagccacagcacccagccactactttttgtcttttttttttttgagatggagtttcagtctgctgcccaggctggagtgccgtggcgcgatctcggctcactgcagcctctgcctcctgggttcgagcgattctcctgcctcagtctccccagtatctgggattacaggcacgcgccaccacgcccagctaattttttgtatttttagtagaaacagggtttcaccatgttgcccaggctggtctcaaactcctgacctcagatgatctgcccatctcagcctcccaaagcactgggattacaggcgtgtgccactacacccggccagaatttcttttttttttagatggaatttcacccttgttgcacaggctggagtgcaatgacgcatctcagctcaccacaacctctgcctccctggttcaagcaattctcccgcctcagcctccaaagtagctgggattacaggcatgtgccaccacggccagctaatttgtatttttagtagagacagggtttctccatgttggtcaggctgttctcgaacttctgacttcaggtgatccacctgcctcggcctcacaaagtgctagaattacaggtgtgagccaccgcacccggccaggatttctttaaaaaatataaacactggccaggtgcagtagctcacttgtaatcccagcactttgggaggccaaggcaggcaaaccacttttggccaagagttcaagatgagcctggtcaacatagtgaaactctgtctctactaaaaatacaaaaattagccaggcgtggtggtacacacctgtaatcacagctacttgggaggctgaggcaggagcatcccttgaacccagaaggtagaggttgcagtgagccaagatcacgtcactgctttccagcctggagaacagagcgagacccagtctcaaacagcaagaacaacaaaaaaaacataagtactgttgacagtacaagtgacctttctagtcaccttgtagtcacgttttctttaacaacatatattttagatggagagaagggaaccggaaaaacactcggtctttgccatgttattcatttctgtgcaaaacaggactggctgatactacgtattccagatggtaagaacttcctgtcttgtcttctctctgttaggttcagttatcttgttaccgtggtagtcttgtagctttaattttctaacggggatctgatagctaaaggaaaagcctttgccagtcacgatggctcatgcctgtaatcccagcactttggaaagccgaggcaggcggattgcctgagcttaagcccaggaggaggctgcagtgagccgtgatcgcaccactgcactctagcctgggcgacaaaacaagacgctgtctcagaaaagaaaaaaaaaaaagaaaagcctttactccagatgtagagcagtctgagctcatccatcatgatttcttcgtgatattactgccaagcaggttacaaggtgaagtcaatgtgatgaaaggaaattgggctaaaagcttcctgaagccttttgatgctaagcagtccttcttttgatatttaatacccatgagcataaactcctgccttagaggtcaccacggggttttttttgttttttattttttgccatcggttaacaattctgagtacccacagagccttttactatttatcagcattctagagtcatcagtataggttgtcaaaacttaagggatattacactttgcatatgaaggggtgggttgcccctccacacctgtgggtgtttctcgtaaggtggaatgagagacttggaaaagaaaaagacacagagacaaagtatggagaaagaaataaggggaccaggggaaccagcgttcagcatatggaggatcccgccagcctctgagttcccttagtatttattgatcattcgtgggtgtttctccgagagggggatgtgtcagggtcacaagacaatagtggggagagggtcaacagacaaacacgtgaacaaaggtctttgcatcatagacaaggtaaa

SEQ ID NO: 2865 - DNA, 2300 bp, Homo sapien
gtactgcaaaagaacacctataatcttcacctagattcaattaacattttgtcactttttaaaattttgagacagggtctccctctgtctctggctgcagtgcagtgctccaatcatggttcaccgcagcctctaattcctgcgctgaagcgatcctctcaccctagcctctggttaggactacagatgtgggctgcctagctaattttttgaaaaattcttttatagagaggatagggggagggggagtctcactacattgtccagtctaccctcacattctcgaatttctggactcaagcgatcttcctgcctcagcctcaccaaaacgtgggaatacaggcgtgagcctctgcgcccaaccaatatttgccttatctctttttttttttttttttttttgagatggagtctggctctgttgcccaaggtggagtgcagtggcgcgatctcggctcaccgcaagctccgcctcccgggttcacgccattgtcctgcctccgcctcccaagtagctgggactacaggtcgcgcccgtcaccacgcccggctaattgttagtatttttagtagagacggggtttcaccgtgttagccaggatggtctcgatctcctgacctcgtgatccacccgcctcggcctcccaaagtgctgggattacaggcttgaaccgcggcgcccggccttttttatttttatttttatttttttattttttattttttagagaggagttttgctcttgtttcccaggctggagtgcagtggcgtgatatcggctcactgcaacttccacctcccaggttcaaatgattccctgactcagcctcctgagcagctgggagtacaagggcccgccaccacgcccggctacatgttttgtatttttagtagagaccggggtttcatcatgttagccaggctggtctcaacctcctgacctcagttgatcctcctgcctcggcctcccaaagtgttgggattacaggcgtaaactaccgcacccggcccttgccttgtttctaaatacacacaagaatgttaatcatagcacctaatagcccaaaaattggaaacaatcccaaaagctattatcagcagtatatatatatatatatatatatatattttttttttttttttttttgagacagagtctcgctctgtcgcccaggatggagtgcattggcgtgatctcggctcactgcaagctccgcctcccgggttcacgccattcgcctgcctcagcctcccgagtagctgggactacaggcgcccgccaccacgcccagctaatttttttttgtatttttagtagagatggggtttcaccgtgttagccaggatggtctcgatctcttgacctcgtgatctgcccgcctcagcctcccaaagtgctgggattacaggcgtgaaccaccgcgcccagcctattctttctttagaatagatcagtggtggcgtattcatacaatggactattccgcagtgatgaaaatgaattatagatatttgcaaaaatatgaattacataaaccatattgagcaaaagacgccaacagatacatactctctttacataaggtgttagatacacagagatagataaatacgtgtaaatgatagagatatgatagctaagccagtccacaggttattagtcgtggtccacgtgacttctgaagagatgaaggggcatgggaggctttaggggagcttccgcttttctggcaaggttttctttttgcccggggagctatcagccagcggagagatctgtgagaagggataagacctcaagacaagtaggaagcagagccttccacggcccgcgccctggcggccccaagtcagcggcggagacggcgcccaccccgctccaacgtggagcaggagcaacggcgtggcccgtggagccccgcccctcacaggcaaccacagagaagccggactgggccacgtctaggaagaggtaggaagggatcggcgcatcgtttctccaatgggaaaggatgtgtttgcgggccaataagtagccgagaataacacccgcccacgcgcctgccaagccaatcggctaggagcagcgagcggcgcggctgaggcgcggcggccccgtggagcagcgcagtatggcgggcggggcccgggaggtgctcacactgcagttgggacattttgccggtttcgtgggcgcgcactggtggaaccagcaggtgaggtcagccggcagctgcccccgaggagcccttcgggatctacagtcccgacgttcagccggcctgcctcgtcctctctg

SEQ ID NO: 2866 - DNA, 2300 bp, Homo sapien
gatggagtctggctctgttgcccaaggtggagtgcagtggcgcgatctcggctcaccgcaagctccgcctcccgggttcacgccattgtcctgcctccgcctcccaagtagctgggactacaggtcgcgcccgtcaccacgcccggctaattgttagtatttttagtagagacggggtttcaccgtgttagccaggatggtctcgatctcctgacctcgtgatccacccgcctcggcctcccaaagtgctgggattacaggcttgaaccgcggcgcccggccttttttatttttatttttatttttttattttttattttttagagaggagttttgctcttgtttcccaggctggagtgcagtggcgtgatatcggctcactgcaacttccacctcccaggttcaaatgattccctgactcagcctcctgagcagctgggagtacaagggcccgccaccacgcccggctacatgttttgtatttttagtagagaccggggtttcatcatgttagccaggctggtctcaacctcctgacctcagttgatcctcctgcctcggcctcccaaagtgttgggattacaggcgtaaactaccgcacccggcccttgccttgtttctaaatacacacaagaatgttaatcatagcacctaatagcccaaaaattggaaacaatcccaaaagctattatcagcagtatatatatatatatatatatatatattttttttttttttttttttgagacagagtctcgctctgtcgcccaggatggagtgcattggcgtgatctcggctcactgcaagctccgcctcccgggttcacgccattcgcctgcctcagcctcccgagtagctgggactacaggcgcccgccaccacgcccagctaatttttttttgtatttttagtagagatggggtttcaccgtgttagccaggatggtctcgatctcttgacctcgtgatctgcccgcctcagcctcccaaagtgctgggattacaggcgtgaaccaccgcgcccagcctattctttctttagaatagatcagtggtggcgtattcatacaatggactattccgcagtgatgaaaatgaattatagatatttgcaaaaatatgaattacataaaccatattgagcaaaagacgccaacagatacatactctctttacataaggtgttagatacacagagatagataaatacgtgtaaatgatagagatatgatagctaagccagtccacaggttattagtcgtggtccacgtgacttctgaagagatgaaggggcatgggaggctttaggggagcttccgcttttctggcaaggttttctttttgcccggggagctatcagccagcggagagatctgtgagaagggataagacctcaagacaagtaggaagcagagccttccacggcccgcgccctggcggccccaagtcagcggcggagacggcgcccaccccgctccaacgtggagcaggagcaacggcgtggcccgtggagccccgcccctcacaggcaaccacagagaagccggactgggccacgtctaggaagaggtaggaagggatcggcgcatcgtttctccaatgggaaaggatgtgtttgcgggccaataagtagccgagaataacacccgcccacgcgcctgccaagccaatcggctaggagcagcgagcggcgcggctgaggcgcggcggccccgtggagcagcgcagtatggcgggcggggcccgggaggtgctcacactgcagttgggacattttgccggtttcgtgggcgcgcactggtggaaccagcaggtgaggtcagccggcagctgcccccgaggagcccttcgggatctacagtcccgacgttcagccggcctgcctcgtcctctctgcttccccaggatgctgcgctgggccgagcgaccgattccaaggagcccccgggagagctgtgccccgacgtcctgtatcgtacgggccggacgctgcacggccaggagacctacacgccgcgactcatcctcatggatctgaagggtgaggtggtggcagagttagccgatgccccttatttcccttccgcgtgcctagtccttgcgctgccgttatcttcaagaccctcccaccttaccgagctccaggaccggagatgaggagctgagcacaacatgccaacactcgaggggcccacgacagttgctcaagagccatttcgggaataggctgctaggccctggagacagtgaggacttgaactgcagcactcctgtcagacccctggatgtggttccccccg

SEQ ID NO: 2867 - DNA, 2300 bp, Homo sapien
tcaccatgttcactaggctaatctggaactcctgacctcaagtgatccctgccctcggcctccaaagtactgggattacaggtgtaagccaccacacctggcctctttttgtttgtttctttttgagacagggtctcgctatgttgcccaggctgatcttgaacccttgggctcaagtgatcctcacacctcagcctcccaagtagctgggtttacaggcatgtaccattgcacccaactgaaaccctttctcttaaaaaaacaaaattgttggagcagatatgcatgtgggttgacttggtgagcatcaggcagggcttcttcctttggtgggccccaaaggcataggcggtcaggacacctttgacccagaagatcatccctgtgggtctgtgacagcaaatcctacaagagcaaggagccccatgaagccacccagaacaggactgtcaggaccaccagaaagagagatgcctatttcaggtgagtgatctgccaacccagcccttctgtttttcagtctcgttcttctataccccagacaggaacctccatgagcctggataaataacacccttttcagggatggacataccacctctttcactgatggacccataagaagcccttctcctgttcaggctttttctatcctatggcctcactcctcttgcagaattaagagtgtgtggccgggcgcagtggctcacgcctgtaatcccaacactttgggaggccgaggtgggtggatcacctgaggtcaggaattcaagaccagcctggccaacatggtgaaaccccatctctattaaaaatacaaaaaaaaaaaaaaatagctgggcccggtggtgggcacctataatcccacctacttgggaggctgaggcaggagaatcccttgaaccccggaggcggaggttgccatgacctgagatcacgctactgtactccagcctgggcaacaagaccaaaaatctctcaaaaaaaaaaaaaaaagtgctacaaatttcacatgattcaacattgtcttgtgttttattcctaaaacccttcccccatctctaaatctagtgtaatctacatcctaaagactgggccgttctcagctttggcagtaggactttatatctttgcataagtgacattatgcccaccatctccacccaactcctttattatttatattttcttgcagagatggggtctcaccatattgcccaggctagtctcaaactcctggcagtcccaccactttggcttcccaaagtgcggacgttataggtgtgagccaccatgcccagcactcttttttattagaatttttgcacagtacctggccacaggtaatttctcgtgcttaggtgcatcttgatcctcacagtaccctgggatccttattttcctcctaagcaggattggcagtggggggcactttgccatcccctcgagaagtgactcttacagaacggctcctcctggatggcccaccacctcattcaccagagactcctcaatttccccccacaactggagctgtactgtacactgttaagagaaaccaggttgggcctgaggttcgctcctgccccaaggcatcccccagacttcagaaagagagggagggccaaaaggcagtgagtgagtcagaggctttgatgctggtctgggatgcatcagaaactgagaaattgcctggtaccgtggaaccccctgcttccttcctgagtcctgtttcctcaaagaccagagatgcagggagaagacatgtgtccgggaaaccagacactcaagagagatggctgccctcaagcagagctagggtgaagacaagagacaggacgtgccctgtccatgaatctccatcaggaattgacacctcagagacttctcccaaagcccctagagggggtttggctaaagacagtggaacacagggcaagggtccagagggggaacagcagccaaaggccacagaagctacggtgtgtgccaataacagcaaggtcagctccactggggaaaaggttgtcctgtggacaaggtaggtaagggtggatgatgtgtgtttggaaaagagcatagaccacatccatgtggctccctagggttaatcatgatacctgggttacagggaagctgaccgtgtgatcctcaccatgtgccaggagcaaggggcacagccacagaccttcagcatcatctcccagcagctgggaaataagacccctgctgaggtaggtgcgggttggggtgaagacctggcaaaaagaggtcaaggtggccaactaagagacagaaag

SEQ ID NO: 2868 - DNA, 2300 bp, Homo sapien
tgcttaatagtccaactatttgtcagacttttgtaggtcgagctcttcaaccagttagagaaaagttttcagactgttatattattcattatattgatgatattttatgtgctgcagaaacgagagataaattaattgactgttatacatttctgcaagcagaggttgccaatgctggactggcaatagcatctgataagatccaaacctctactccttttcattatttagggatgcagatagaaaatagaaaaattaagcaacaaaaaatagaaataagaaaagacacattaaaaacactaaatgattttcaaaaattactaggagatattaattggattcggccaactctaggcattcctacttatgccatgtcaaatttgttctctatcttaagaggagactcagacttaaatagtaaaagaatattaaccccagaggcaacaaaagaaattaaattagtggaagaaaaaattcagtcagcgcaaataaatagaatagatcccttagccccactccaacttttgatttttgccactgcacattctccaacaggtatcattattcaaaatactgatcttgtggagtggtcattccttcctcacagtacagttaagacttttacactgtacttggatcaaatagctacattaattggtcagacaagattacgaataataaaattatgtggaaatgacccagacaaaatagttgtccctttaaccaaggaacaagttagacaagcctttatcaattctggtgcatggcagattggtcttgctaattttgtgggaattattgataatcattacccaaaaacaaagatcttccagttcttaaaactgactacttggattctacctaaaattaccagacgtgaacctttagaaaatgctctaacagtatttactgatggttccagcaatggaaaagcagcttacacaggaccgaaagaacgagtaatcaaaactccatatcaatcggctcaaagagcagagttggttgcagtcattacagtgttacaagattttgaccaacctatcaatattatatcagattctgcatatgtagtacaggctacaagggatgttgagacagctctaattaaatatagcatggatgatcagttaaaccagctattcaatttattacaacaaactgtaagaaaaagaaatttcccattttatattactcatattcgagcacacactaatttaccagggcctttgactaaagcaaatgaacaagctgacttactggtatcatctgcactcataaaagcacaagaacttcatgctttgactcatgtaaatgcagcaggattaaaaaacaaatttgatgtcacatggaaacaggcaaaagatattgtacaacattgcacccagtgtcaaatcttacacctgcccactcaagaggcaggagttaatcccagaggtctgtgtcctaatgcattatggcaaatggatgtcacgcatgtaccttcatttggaagattatcatatgttcacgtaacagttgatacttattcacatttcatatgggcaacttgccaaacaggagaaagtacttcccatgttaaaaaacatttattgtcttgttttgctgtaatgggagttccagaaaaaatcaaaactgacaatggaccaggatattgtagtaaagctttccaaaaattcttaagtcagtggaaaatttcacatacaacaggaattccttataattcccaaggacaggccatagttgaaagaactaatagaacactcaaaactcaattagttaaacaaaaagaagggggagacagtaaggagtgtaccactcctcagatgcaacttaatctagcactctatactttaaattttttaaacatttatagaaatcagactactacttctgcagaacaacatcttactggtaaaaagaacagcccacatgaaggaaaactaatttggtggaaagataataaaaataagacatgggaaatagggaaggtgataacgtgggggagaggttttgcttgtgtttcaccaggagaaaatcagcttcctgtttggatacccactagacatttgaagttctacaatgaacccattggagatgcaaagaaaagggcctccacggagatggtaacaccagtcacatggatggataatcctatagaaatatatgttaatgatagtgtatgggtacctggccccatagatgatcgctgccctgccaaacctgaggaagaagggatgatgataaatatttccattgggtatcgttatcctcctatttgcctagggagagcaccaggatgt

SEQ ID NO: 2869 - DNA, 2300 bp, Homo sapien
cagaaagtcagtatggatatccaggaatgcccccagcaccacagggcagggcgccataccctcagccgcccactaggagacttaatcctacggcaccacctagtagacagggtagtgaattacatgaaattattgataaatcaagaaaggaaggagatactgaggcatggcaattcccagtaacgttagaaccgatgccacctggagaaggagcccaagagggagagcctcccacagttgaggccagatacaagtctttttcgataaaaatgctaaaagatatgaaagagggagtaaaacagtatggacccaactccccttatatgaggacattattagattccattgctcatggacatagactcattccttatgattgggagattctggcaaaatcgtctctctcaccctctcaatttttacaatttaagacttggtggattgatggggtacaagaacaggtccgaagaaatagggctgccaatcctccagttaacatagatgcagatcaactattaggaataggtcaaaattggagtactattagtcaacaagcattaatgcaaaatgaggccattgagcaagttagagctatctgccttagagcctgggaaaaaatccaagacccaggaagtacctgcccctcatttaatacagtaagacaaggttcaaaagagccctatcctgattttgtggcaaggctccaagatgttgctcaaaagtcaattgccgatgaaaaagcccgtaaggtcatagtggagttgatggcatatgaaaacgccaatcctgagtgtcaatcagccattaagccattaaaaggaaaggttcctgcaggatcagatgtaatctcagaatatgtaaaagcctgtgatggaatcggaggagctatgcataaagctatgcttatggctcaagcaataacaggagttgttttaggaggacaagttagaacatttggaggaaaatgttataattgtggtcaaattggtcacttaaaaaagaattgtccagtcttaaataaacagaatataactattcaagcaactacaacaggtagagagccacctgacttatgtccaagatgtaaaaaaggaaaacattgggctagtcaatgtcgttctaaatttgataaaaatgggcaaccattgtcgggaaatgagcaaaggggccagcctcaggccccacaacaaactggggcattcccaattcagccatttgttcctcagggttttcaggaacaacaacccccactgtcccaagtgtttcagggaataagccagttaccacaatacaacaattgtcccccgccacaagcggcagtgcagcagtagatttatatactatacaagcagtctctctgcttccaggggagcccccacaaaaaatccctacaggggtatatggcccactgcctgaggggactgtaggactaatcttgggaagatcaagtctaaatctaaaaggagttcaaattcatactagtgtggttgattcagactataaaggcgaaattcagttggttattagctcttcaattccttggagtgccagtccaggagacaggattgctcaattattactcctgccatatattaagggtggaaatagtgaaataaaaagaataggagggcttggaagcactgatccaacaggaaaggctgcatattgggcaagtcaggtctcagagaacagacctgtgtgtaaggccattattcaaggaaaacagtttgaagggttggtagacactggagcagatgtctctatcattgctttaaatcagtggccaaaaaattggcctaaacaaaaggctgttacaggacttgtcggcataggcacagcctcagaagtgtatcaaagtactgagattttacattgcttagggccagataatcaagaaagtactgttcagccaatgattacttcaattcctcttaatctgtggggtcgagatttattacaacaatggggtgcggaaatcaccatgcctgccccattatatagccccacgagtcaaaaaatcatgaccaagatgggatatataccaggaaagggactagggaaaaatgaagatggcattaaagttccagttgaggctaaaataaatcaagaaagagaaggaataggttatcctttttaggggcggccactgtagagcctcctaaacccataccactaacttggaaaacagaaaaaccggtgtgggtaaatcagtggccgctaccaaaacaaaaactggaggctttacatttattagcaaatgaacagttagaaaagggtcacattgagccttcgttctcacc

SEQ ID NO: 2870 - DNA, 2300 bp, Homo sapien
tttgctttaataaatcttgccaccgcacactctttgggtctgcatgtttctctaatggagctgtaacactcaccactgaggtccatggcttctttccttgaagcctgtgaaaccacgaacccttcaatcaagaaaagacctttgatcaggagaagacttctcgtctcatttctggggacacattcaggatttctccaaagcagtgagtaacattgaacccctcttgcttgctattctgttctatcttctcattagaaattggaagaaaacaccaggcacctgtcagccatttaaatgtgacaagcggccgggtgcagtggctcacacctgtaactgcagcactttgggaggccaaggcgggtggatcacgaggtcaggagattgagatcatcctggctaacacagtgaaaccccacctctactaaaaatacaaaaaatattagccaggcatggtggtgggcacctgtagtcccaggtactcgggaagctgaggcaggagattggcgggaacccaggaggcagagcttgcagtgagctgagattgcaccactgcactccagcctgggcaacagagcaagactccatctcaaaaaaaaaaaaaaaagtgacaagcgcagccgccaggcttaagacacaggtgtgaggctctctgggaaagggctctctaacaacccccggccctctgggctgggagtgttggtttgcctggaaccaggtccacctttctctacctttcctgggaaaagctgagggctggctagaggcggaaaactgtcgtcctgaactcccagcactgacccagttgagatcatggcacagcgagaagcctctacactgcagctgcccatgcgtgcatttcatgtcttttctgacccatgcctcctgggtcctaacgtcctcagagaagactttcttgaggtcctatcctctaggatctttcctagatcaagtctaagaatcttttggctaggagcctaagtcaagtggggaggtaatccaaagacctttgcccatggtgtccccaggcttattcttatgcaaatgggtatcagtatacttacacgggacctgtccctcataacctgtaccctaggtactatctggaacatcaaaaggcatgtcagtggctgatagaaggcctaagacatttttccttttgttgccctaaacttactccagattgtagagactcctttaattaccacctttcctgtctggaatcagcgattagaactgtagaacttctccacttgaagtggtcatacttatgggccaaaaacaatataatagacaataggtcccctgattcaagtccaaaggtcaatgaatattcttaggagggcaaataggggacagaagattcaggtatgaaaagcacagttccaactttggtcctccaatttgccgctgccttccctaaaactgttgtgctatagtgccattttcaaggaatttatcttgctgggacagctccaagcccagaaatatgctaactggtgcctggtctctaaactcaaaatacaccccaaacctaagacccacttgcagatgcaaaggcaattgtgggcatgctgttaaggagccactaaaatccagcagcccaggacctctttctttgtggctaaaaaaggacaggaaacaaattcaggcaaaactgctatgtcggtaagcacaattaaattcattaagcagggttccatgggtgattgagcaccctggaaagtaaaggacactagaaccataggggatgtgtggggaaaagcaagagagatcagattgttactgtgtctgtgtagaaagaagtagacatgggagactccattttgttatgtgctaagaaaaattcttctgccttgagattctgttaatctatgaccttacccccaaccccgtgctctctgaaacgtgtgctgtgtcaactcagggttgaatggattaagggcggtgcaggatgtgctttgttaaacagatgcttgaaggcagcatgctccttaagagtcatcaccactccctaatctcaagtacccagggacacaaaaactgcggaaggccgcagggacctctgcctaggaaagccaggtattgtccaaggtttctccccatgtgatagtctgaaatatggcctcgtgggaagggaaagacctgactgtcccccagcccgacacccgtaaagggtctgtgctgaggaggattagtataagaggaaggaatgcctcttgcagttgagacaagaggaaggcatctgtctcctgcctgtccctgggcaatggaatgtctcggtataaaacccgattgtatgc

SEQ ID NO: 2871 - DNA, 2300 bp, Homo sapien
tgaggcaggagaataggatctggagacagggagccttcactttagcctctgattggtcgcaggcgaaatcttcatttgcatagggtgtaatttcacttcagcctccaattggtcatgggctacgtcttcatttacaaagggtgtaaccaataggaaacctctaaagggtactcaaacccaagaagattttgcaactggggtgcttgagcctcttgcccaagcctgcttctgctctgtggaatgtactttcacttcaataaatctgtgctttcgttgcttcattcatttgttgctttgcttgtgcattttgttccattctctgttcaatacgccaagaacctggacaacttgtagtcaagaccgtccactggtaacaccctgagcacggtatttgtgatgacatcaaggaagaacacactgtggaattagacactggctccccaagtgaggagttgagcagtgctagagaggtaaagaaacagacaatcttacagaaggaagaagagaggattcagccaactaaaaccccttcatcttctcaagaacccccaatgaaggaaacttggggggagatgagggcaaaggatcaccaaataatgcttcatcctccatgaatcctgaagtgaggcttagtagcccccagggaagcccaaagactcatccagtgttgatggtcagtcagtggggaccccagttggaccagaaactggaggagagaaagataggccagaaaaagaggaagaagatgactttgatgacctcacccaaaatgaggaagatgaaatgtcatcagcttctgaggaatctgtgctttctgtcccagaactccaggtgagagctagagaatactctcaagtattttgtggactcagtaatatgtttaacttattgatatgccacctgcttgcttgctgcactatggatagtcctaaaatcatttgtatttgatttgtgaatgcattatgggacatgattgtggagttgaggtgaaatgagatggaaaggatgaaattttacttattatattaaactcgtttacacattaaattgaatcacctgaccatactttaaatgccttaaaaaatagtatatagggccaggtgcggtggctcatgcctgtaatctcaggcatgggaggccgaggcaggcagatcacctgaggttgggagttcgagaccagcctgaccaacaaggagaaatcctgtctctaccaaaaatacaaaattagccgagcatagtggtgcatgcctgtaatcccagctactcgggaggctgaggcaggagaattgcttgaacctgggaggtggaggttgcagtgagccaagatcacgccattgcactccagcctgggcaacaagagcaaaactccatctcaaaaaaaaaaaaaaaatagtaaatagtccaggcttggtcgctcacacctgtagttccagcactttagaaggccgaggtgggcggatcacaaaacgaggtcaggagtttgagaccagcctggccaacatggtgaaaccctgactctactaaaaatacaaaaattagcccggcgtggtagcatgctcctataatttcagccattcagggggctgaggcatgaaaatccctcgaacccaggaggtggagtttgcagtgagccaagattgtgccgctgcactccagcttgggtgatggagtgagacgctgttgcaagacaaaaaaaaaaaaaaaaaaaaaaaaaaaaaggaagaggcacataaatatgggctaaggcaaaggaaaactaatttcagggtaaagaagaagttttcaaaaggcatcttttccactttcctgctgtcaggcccaatgtcagctatcactgggatttcataactcagggaattccgctctgacagctgtagtgggttccccattgtttaacttcagattatcctgatacagctctgtgctgttctgcaattcatgagccactaggagccgtaagtactctttggagggttttacaggaaacaatggagaaactgacttggctggcatctgaaaaggcgcatgagtcaggagggtgagtctgaagaagagaattctcaggaggagaactctgagccggaagaagaggaagaagaagaagcagaaggaatggaaagcctggagaaagaggatgaaatgacggatgaagcagttggagactctgctgagaagcctccttctacttttgcctcacctgagactgctccagaagtggagaccagcagaactccaccaggtgagctaggcaaacctatactgaaggaccattctcacttaacctcattgtctagagaaca

SEQ ID NO: 2872 - DNA, 2300 bp, Homo sapien
atacaaaaatcagctaggtttggaggtgtatgcctatagtcccagcttctcaggaggcagtgggaggatggcttgagcctgggagggggagtttgcagtgagctgagatcatgccactgcagtccagcctgagcggcagagtgagaccatgtctcaaaataaattaattaattaaattaaagtaatagtccccattcttgagactcttaattctagctcgggagctagaccatgtattccttagtgagaaacagtttaaaaataaaacaagaatataatccctgaatatctgagaactcaggcataatcttaacagtagtttattgtgaaagactttatgattatttttacctgtttttatcctgtagtaggaaggtcagcttctcatttagattctgaaggctattggtattaattgtctggaattgtcttagatcttccttgtgtcgtgttttcccagaaagagctgggaacctttgctcaaagctccatcgcccttcaccatcagtacaaccccaagtttcagaccctgttccaaccctgtaacttgatgggagctatgcagctgattgaagacttcagcacacatgtcagcattgactgcagccctcataaaactgtcaagaagactggtaggagacagatgtgtcagctttaagtttttacttgcggtgagaggtggtgggaatcttatcccatagataacttcctaggatacttgcctaggaatggaggacacaggacatttgtaatttcttccttctctcttttatcctccctttgtactcattatccaagttctagaattacatgataatctccgggcctgggtaaggcatggaggcagtggacagtataggaatatgggaggtagagatctgaggctcagtgctaagaattggactacagcaatatgaggggtaagtattaggaatcagatcaagataaactggggcctggtaaagatgaaagtcaggtggtaaagttcggtcatgtttagctttttattctcttcattaagatcaactaactttatttaccataatgattgtagcataggtgatatctccattctgaatgaaatgttgacttgcaagttaggcgtaaattagagattgtacatttgccgtgttcagtattttaaagaaatttgccggtttagattctaccttgcattggtttagtattttttgagaaaatatttgctatttacttaagccaaatatttacttctgatttgtttgctgacttagcaaattagttgtggtttgttctggatttgggtttgtctttggattctattttaaatccctaagtcttatcattacattgaatgtagttgaatttaagtgtactatatcatagacacagatcccaaactactttaatagctatattatatgaaatggtaatgaaaacgtgatttaataccaaattatagtattatcttacacatctagtgtcctgtgtttttcttctggagatataaaaatgacacttatggaaggagaaatatggatatagtagttttgtctctagaaatgcagaggtgcctaaaattgagaggctgagagagggagacagaaatgaatgagactgaattgtctcattccttttatggttcttttgttcccaacctcaggaggaatctgggagaacttaatgaaagttaagaaagaatgaaataaaagtaaaatttggaataccaggtttgtgagggagattaaagaagttggaatcttttttcttttttttttttttaagatggagtctcgctctgtcacctaggctggagtgcagtggggtgatctcggctcactgcaacctccgcctcccaggttcaaacaattctcctgcctcagcctcccaagtagctggaattacaggtgcgtgccaccatgcctggctaatttttacatttttggtagagatggggtttcactatgttggccaggctggtcttgaactcctgacctcaggtgatccacctgcctcggcctcccaaagtgctgggattacaggcgtgagccagcacgcctggcctggaatcttatcctggaagaaaaaagcattgttgaaggtctgttatccttcagagatttaaaggggaaaggaggtaaaacatttttgagcatacactatgtgacaggtattactaggtactttttaagtgtttgttttactttgtgaataaagtgttacacgtaagaaagagtaagagaggccgggcgccgtggcttacgcctgtaatccaacactttaggaggccgaggctgtcggatgacaaggtcaggagatca

SEQ ID NO: 2873 - DNA, 2300 bp, Homo sapien
agaggtcaggatgcagtttgtgccataagtggaacaaagcaaagagaatagtccctgtaattagtcctgtgtttgaacttaacagcactactaagcagagagcttgggttccatctgaaagctagacctttagggattttccaatttagtgaaaaaagataagataggccaaccaatgtcttaaaaactagaactactagtcattctccattacaacaaatatcacaatacaactacatcaaaaatctcaagattgctaagtcagtatttgacccattattttaatttatagttcatagaacaaaattctggtatagcagaatggaaccattcatcctgggaacgtataataggatctgattaataaatattttggttttgctgatcaactctttataacttcttaaaatttggaaaatatagaactaatttaaaattcctgttagaatccagttaccttctggtattcaatggaatatagtcatatatcatctcatggtcataccctctgtgaaatctatcattaaacgattcatcattgtgtaaacatcgtagaatgtacttacataaacctaaatggtttagcctactgcatacctattgctcccaggctacaaaacctgtacagtgtgttactgtactgtactgaatactgtaggcagttgtaacacaatggtaagtacatatgtatgtaaacatagaaaaggtacagtaatcttatggagccacctctgactatgtggttcgttattgactgaaacattctgtggcgcatgactgtacttgggcagcttctgcttctctttcgattgcaaatacaaacctgtttttgttttaatctttgactaaataaaaatccctctgtaagtccatagagagtaagcacatcttaaaacacaataaggaagagagaggagaaaaagacagtcaaaacaaaaactctggggcttcccttatcaattacctaaataatccttgttaaaactaagtgcaggctatgtttccattttctacttttttatgcttcttctcttctgttccttcagtggtggtagcgcggatgttcaaattttcagttctcagtaaagattgtatagacagtcccacggtcttcaggtttttactctgtgctacccaaacctacagtaaatactataaaagaaaacttattcaaacgtaatctttatctgcaaaaactattgaaaaacgttaccatttaactattgctgtaatatagggggttccttgaaatatgataacctgcttgttatagctacttcagcagatcttatcctgttgcatagggtatcagcatatgcttaatcatttaggtatattattctccctttatttctttctatgtaaacatagaaaaggtatagtaatcatacatagaactgacatgctaggtattggaatttttgcttcagccctgcaaacaatctttcaggagggtatggatgggaagttagggttaggaaccttggaagaggaatttaaagggctaaaagaagatagccttcatggataatattttaactaacttctccgttctgttcatttgaactaccatgtacttcagttattttggtatatccttttcctgcttcatgctagaaagtctttgacttgttaagaaagcagggcagtgcagcctgagtagataggataatgggacaagctggacctgggatgggagtaacatcccagggagtaacaagtaatgagagaagaaatgagaatgatgagttcccaccagctccttggctgctttcttacccatatatttctctgtccctagttttttgtttaattttttcttcatttgtatattatttggaagaggaattgtagaggaatgggatggggtgtaatacagaatcatttgatgcatgctaactactttgggaaaagatttgtgtaaggctgggagtttgactgttggctaaagtgaaaaggggggattagtagggaatgaaaattgttcaggctctttgctcatcattgcaaagaattggatgtgttgtggacctaggaaaacactcaaattcagtcatccccgtttgggataggtttgaggaactactggccaacctactaaatgaacaacatcagatagcgaaggaactatttgaacagctgaagatgaagaaaccttcagccaaacagcagaaggaggtagagaaggttaaaccccagtgtaaggaagttcatcagaccctgattctggacccagcacaaaggaagagactccagcagcagatgcagcaggtaacactttccttggtcatattaatatt

SEQ ID NO: 2874 - DNA, 2300 bp, Homo sapien
ctttcatccgattctctgaaggataagtgaccccaaaaaacttttaagaaccactaatctagcctatcaagaaacatcccattttccagaagaatacagctaagttggcttagttcatgcattcttacctcatattcatagagttcatagacgggatccttactacatgaaatcagtcttttttttttttttttttttttttttggagatggagtctcctctgtggcccaggctggagtgcagtggcgcaatctcagctcactgcaagctctgcctcccgggttcacgccattctcctgcctcagcctccccgagtagctgggactacaggcgcccgccaccacgcccggctaattttttgtatttttagtagagacggggtttcatcctgttagccaggatagtctcgatctcctgacctcgtgattcgatctcctgacctcgtgatccgcccacctcggcctcccaaagtgctgggattacaggtgtgagccaccgcgccctgccgaaatcagtctttcaaaggattccttcagcccagccaagaagttccaacatccacaggcacatatattaacaattaccagtacccaaaaacagttctctggttttaattccacactgcctccctcaacttaatacctaccaccgtcaaaacaactcccctcagattgcatccaggctatttacagagacaccttgatgatcctcacctcaaggcatggaccattcattgaatggttatatttgttgaatgagtgaaaaaggatccttcctcccacagatttcaagttaagctgtcagcacccatgcagctgctctggtacaagttaagctgtgaaagccttctccctcacgcatacaaccttaagtgtcagaaatgctctgcttcctccataaatccaaaataatatagccatggatatgcatttcatacaggtcagactcggcaaggacagctacgttccacatacatatctgacacaatcggtctcccccaaatacaagccaaccagtcttatgtgctcctatctttccagcatactcagatttgccgacaaagacttcctgaggcaccatggtatgctgaatatactgctgcagtagtagtgaaaatatgggagttacagttccaactttgtcaccaatttaacatgcggccttggagaagttctctccttatgcctaaatttcctattttgtaaaatggaagaaagcatcctaccattttcacagagattcagtatcacaaagaaactgaaagagctttcttattgtattgtaaactattactataaacccgcgacaacaaataaggccacccattctttacagctttgtagcaatgattctgttaaagatattttggcccttcacatttacacaactcactctaaccaaaggcacaaactattcttaagaccacaactggctatgccaagtttctcccctccctgacctcacagacacatgctgtacagaacactaccattgccgctctttcccaacaagtaactaggggctcccaatccctaaaatacacacacatatcaacctgcaaggaacctcccaacatttattcaagaaataagctaacttataaggggaactccattacacttacacaaataaaggcaaactcttacggaaacacttgccatcctcacatacacacaccaacacagccgctacacaccaacagaccatctgtctgctagaccaaaaacatctctttccatgtacaaactaaccagtgacatttattaaacgtacaacactgagatcatcctgtcgttcccacataccgttcaacgcggcagggacaccacagaccttgtcacacaggtaaaatcccctctcaagatcgtgtcctcgaccactcttatcccttaattaaacacacacaaactggactatgggggaggctccgatcatgcctacaaacacaaactaacctgtcaggggcacagccgactccgcctccactcgcttacttcccagccccctccgggagtctgcctgtcagggacaccccttcaccccgcctggagggacttcccggtaggctcaggatccccctccctgctctcccctcccccatcttcaccactgctctcccagaggtccaggtccgggagatgacagtggctcccagaaagcccaggattcaatcgctgagagagtgcttaggcccgaatgccggcccaaatcgttctactcaccgtgtcggaggccgagagcgatgagagtacagggaagtgaggaagagggggtggccgccaggctcctccgcttccctg

SEQ ID NO: 2875 - DNA, 2300 bp, Homo sapien
aactttgtcaccaatttaacatgcggccttggagaagttctctccttatgcctaaatttcctattttgtaaaatggaagaaagcatcctaccattttcacagagattcagtatcacaaagaaactgaaagagctttcttattgtattgtaaactattactataaacccgcgacaacaaataaggccacccattctttacagctttgtagcaatgattctgttaaagatattttggcccttcacatttacacaactcactctaaccaaaggcacaaactattcttaagaccacaactggctatgccaagtttctcccctccctgacctcacagacacatgctgtacagaacactaccattgccgctctttcccaacaagtaactaggggctcccaatccctaaaatacacacacatatcaacctgcaaggaacctcccaacatttattcaagaaataagctaacttataaggggaactccattacacttacacaaataaaggcaaactcttacggaaacacttgccatcctcacatacacacaccaacacagccgctacacaccaacagaccatctgtctgctagaccaaaaacatctctttccatgtacaaactaaccagtgacatttattaaacgtacaacactgagatcatcctgtcgttcccacataccgttcaacgcggcagggacaccacagaccttgtcacacaggtaaaatcccctctcaagatcgtgtcctcgaccactcttatcccttaattaaacacacacaaactggactatgggggaggctccgatcatgcctacaaacacaaactaacctgtcaggggcacagccgactccgcctccactcgcttacttcccagccccctccgggagtctgcctgtcagggacaccccttcaccccgcctggagggacttcccggtaggctcaggatccccctccctgctctcccctcccccatcttcaccactgctctcccagaggtccaggtccgggagatgacagtggctcccagaaagcccaggattcaatcgctgagagagtgcttaggcccgaatgccggcccaaatcgttctactcaccgtgtcggaggccgagagcgatgagagtacagggaagtgaggaagagggggtggccgccaggctcctccgcttccctgggtccaccgcggatccctcccgcttgtcaggaggcggccagcgggtaagccgactggcggaaatgcgagagaggagaagggaaaggtggagggctaaaggggcaaactgagaggaggcggatcccgcaaccgacactgggatcgtttcccctcgcaaagcgaacccaaaatggcggcggcagcggcggcagcagagtggccgcggcagctcctccagagggagggagctaagggcgcctagcgacacccccaacctcccactcctccctcctcgcgttcttccccacggtcccccgcttcgcccgactccggccatgtagcgcgcacgtcagcccgcacgcgtacgagtgtctacgggctcgtcgctggctgctcccaccaaccaccaccttcggccgtcctgcgagccagccatcccgtacgcgctcacccacgggaacctcctcgcccagttctccactccccctcagaccctgtcaagccggctccagcgcaggccctcacgcgtaccttcagcggcgcgagcccaagccttctccacctcctcttctctcctccccctccctccccgcccgcacggccaccaaccgccgccaaagcagccgccgccagcacccccaccctacactcctcgcgcgtgcgcctcccacagtccccaccgcgggactgttccattcctggcggctgcaggggcaggagaggaagggaccggcaaagcgagtctggcttgccgtttgactggaattgccagggtggccggccgagtcccatgacaacctacctccctgggttcgtcgccgcggcgctgcggctcgcctcctcctccatgggaccgcggcgaggggatcgagggcggcctagcgcccctctgccggccggtggttggaggccgcggcggctgcgcgttgagtcgtttcctgccggatgacccgacccttttttgcagtctcaggacgggcgctttggagccggccccaggcagcgtgtgtcggtcgcctagtctggagaactagtcctcgactcacggtgagggaatggaccgacacgggtattgtaccgctgagggaaaggagcgggactccggacctccaggaggtagggagtgaggccggtagaccggcgcgcctccggggg

SEQ ID NO: 2876 - DNA, 2300 bp, Homo sapien
ctagttgctcagatggctgaggtgggaggatcccttgagccaaggagcttgaggttgcagtgagccaggactgcactactgccttccagccttggcgacatagatcctatctcaaagcaaacaaacaaaaaaaagtgtaaatttacagaagagttgcaaaggtagtacaaagtgctttcttacaattttcattagagtttccttaatgttacatacatatgaccatggtacaattttcaaaattaagaaattaaagctggtacaatactatttaaaaattgcagactttatttgcatttcctcagcttttctgctaatgtcttctttctttttttgagacagggtctcgctctgtcacctaggctgcagtgtgatggcgtgatctcggctaactttgcaacctcttcctcaatcctcctgcttcagcctcccaagtagctcagactacaagcgtgtgccacacctgtctaatttttgtgtctttttgtagagatggggtttcaccgtgttgcctaagctggtctcgaactcctaggctcaagcaatgcgccctcctccgcctcccaaagtgctgagattacaggtgtgagccactgcgcccagcctaatgtcttctttctgttacaggatccagtagaagattccacatctggagatcttttcctttctttatatctatcaccgacattacctactctttaaaaattttgtaaaaggcataaatttgaaaaatatatcctcattaatctaaatcaagtcattgatacaactatttaacaagacgcccggcctgctttgttttattaacgacttggagggacagaacactacccattacacccacaaacgttatcgacatcaacagaactgtaaatgacaacacggcaatactctgcaccttccctatgcctaggagctaattccactttacatatattattatttcgtgtgtgtgtgtgtgtgtgtgacggagtctcgctttgtcgccaggctggagtgcagtggcgcgatctcggctcactgcaacttccgccgcccgggttcaagcaattctcctgcctcagcctcccgagtagctggggctacaggcgcccgccaccacggccggctaatatttgtatttttagtagagacggggtttcaccatgttggccaggattgtctcgatctcttcaccttgtcatccacctgcctcggcctcccaaagtgctgggattacaggcgtgagccaccgcgcccagccctatcttattatttcacacaccaaccctggaggcatgtttggagttgcctaatttttatgtacactttttgataaggaactaacaaaaataacttgctgaagacaagggaaactgagtccagaactgaatgagaagcacatggtttcttcatcctccatcaccaggctgtctaacgaggctgaagtaccatccatgagtaagtgcgtcaagggcaaacaaacatcatcgcatatggacagtggtgtgaaattcgagaaatccgaggagggttaacaacaacaaaaagcacaccaccacgccgaacttcctcgggtcccaggttggcaactcaacgcccgggaggaatcccccccggaggcgcgccggtctaccggcctcactccctacctcctggaggtccggagtcccgctcctttccctcagcggtacaatacccgtgtcggtccattccctcaccgtgagtcgaggactagttctccagactaggcgaccgacacacgctgcctggggccggctccaaagcgcccgtcctgagactgcaaaaaagggtcgggtcatccggcaggaaacgactcaacgcgcagccgccgcggcctccaaccaccggccggcagaggggcgctaggccgccctcgatcccctcgccgcggtcccatggaggaggaggcgagccgcagcgccgcggcgacgaacccagggaggtaggttgtcatgggactcggccggccaccctggcaattccagtcaaacggcaagccagactcgctttgccggtcccttcctctcctgcccctgcagccgccaggaatggaacagtcccgcggtggggactgtgggaggcgcacgcgcgaggagtgtagggtgggggtgctggcggcggctgctttggcggcggttggtggccgtgcgggcggggagggagggggaggagagaagaggaggtggagaaggcttgggctcgcgccgctgaaggtacgcgtgagggcctgcgctggagccggcttgacagggtctgagggggagtggagaactgggcgaggaggttcccgtgggtga

SEQ ID NO: 2877 - DNA, 2300 bp, Homo sapien
cccgtctctactaaaaatacaaaaaattagctggacgtggtggcgggtgcctgtagtcccagctactcaggaggctgaggtaggagaatggcgcgaacccgggaggcggagcttgcagtgagccgagatcgcgccactgcactccagcctgggtgacagagcgagactccgtctcaaaaaaaaaataaaataaattagctggatgtggtggcatgtgcctgtagtcctagttgctcagatggctgaggtgggaggatcccttgagccaaggagcttgaggttgcagtgagccaggactgcactactgccttccagccttggcgacatagatcctatctcaaagcaaacaaacaaaaaaaagtgtaaatttacagaagagttgcaaaggtagtacaaagtgctttcttacaattttcattagagtttccttaatgttacatacatatgaccatggtacaattttcaaaattaagaaattaaagctggtacaatactatttaaaaattgcagactttatttgcatttcctcagcttttctgctaatgtcttctttctttttttgagacagggtctcgctctgtcacctaggctgcagtgtgatggcgtgatctcggctaactttgcaacctcttcctcaatcctcctgcttcagcctcccaagtagctcagactacaagcgtgtgccacacctgtctaatttttgtgtctttttgtagagatggggtttcaccgtgttgcctaagctggtctcgaactcctaggctcaagcaatgcgccctcctccgcctcccaaagtgctgagattacaggtgtgagccactgcgcccagcctaatgtcttctttctgttacaggatccagtagaagattccacatctggagatcttttcctttctttatatctatcaccgacattacctactctttaaaaattttgtaaaaggcataaatttgaaaaatatatcctcattaatctaaatcaagtcattgatacaactatttaacaagacgcccggcctgctttgttttattaacgacttggagggacagaacactacccattacacccacaaacgttatcgacatcaacagaactgtaaatgacaacacggcaatactctgcaccttccctatgcctaggagctaattccactttacatatattattatttcgtgtgtgtgtgtgtgtgtgtgacggagtctcgctttgtcgccaggctggagtgcagtggcgcgatctcggctcactgcaacttccgccgcccgggttcaagcaattctcctgcctcagcctcccgagtagctggggctacaggcgcccgccaccacggccggctaatatttgtatttttagtagagacggggtttcaccatgttggccaggattgtctcgatctcttcaccttgtcatccacctgcctcggcctcccaaagtgctgggattacaggcgtgagccaccgcgcccagccctatcttattatttcacacaccaaccctggaggcatgtttggagttgcctaatttttatgtacactttttgataaggaactaacaaaaataacttgctgaagacaagggaaactgagtccagaactgaatgagaagcacatggtttcttcatcctccatcaccaggctgtctaacgaggctgaagtaccatccatgagtaagtgcgtcaagggcaaacaaacatcatcgcatatggacagtggtgtgaaattcgagaaatccgaggagggttaacaacaacaaaaagcacaccaccacgccgaacttcctcgggtcccaggttggcaactcaacgcccgggaggaatcccccccggaggcgcgccggtctaccggcctcactccctacctcctggaggtccggagtcccgctcctttccctcagcggtacaatacccgtgtcggtccattccctcaccgtgagtcgaggactagttctccagactaggcgaccgacacacgctgcctggggccggctccaaagcgcccgtcctgagactgcaaaaaagggtcgggtcatccggcaggaaacgactcaacgcgcagccgccgcggcctccaaccaccggccggcagaggggcgctaggccgccctcgatcccctcgccgcggtcccatggaggaggaggcgagccgcagcgccgcggcgacgaacccagggaggtaggttgtcatgggactcggccggccaccctggcaattccagtcaaacggcaagccagactcgctttgccggtcccttcctctcctgcccctgcagccgccaggaatggaacagtcccgcggtgggga

SEQ ID NO: 2878 - DNA, 2300 bp, Homo sapien
cctcaggtgatccacccacgtcagcctcccaaagtgctgggattacaggcatgagctactacgccaaacccagatccagtattttaaaaggataatcaacataaatgagtttgggataattttaggaatgcaagatagtattacatgaaaatcagatgtattcattagtgcaacaaaggaatgataaaataatgtaattatcttagtgcggagaaagctgtaaaaaacattcaaatctattcatgaccaaaattcttagcaaaacaggaatacagaatttccttaagctgtcagagtacctacagaaacttttcagcccacatcatacttagaagtgaaatggtagctgcgcacagtgcctcacacctgtaatcccaacacttttggaggccgaggtgggcagatcacttgagctcaggagctcaggagtttgagaccagcctgggcaagacggtgaaaccccatatgtacaaaaaataaaaaaaattagccaggtggtggtggtccatgcctgtaattgcagctatgcaggaggctgaggtgggaggatcgcttcagcccaagaggttgaggctgcggtcagccgagattgcaccactgcacaccagcctgggcaagagagtgagaccctgtctcaaaataaataaataagactaaataaatatggaattacaaggagctcagaatagacaagagaggctaagattttattttttattttcagacggagtcttgatctgtcgcccagtttggagtgcagtggtgctatctcagctcactgcaatctccacctccggggttcaagtgattctcctacctcagcctccggagtagctgggattacaagcgcccaacaccatgcccagctaatttttgtatttttagtagagacgggtttcactatgttggccaagttggtctacaactcttgacctcagtggtccgccgacctcggtctcccagactgctgggattacaggcttgagccaccgcgcctggccacttttttttttttattttttgttttatctgtatttttttgagacagggtctcactctgtcgcccagacaggagtgcagtggtgcgatcatgggtcactgtagcctcgaattcttgggcccaagcaatcctcccatctcagcctccagttgggacgacagatgtgagtcgcctggctaactttttgaaatattattttatagggagttgggggctggtgtctcactaggttgcccagtttggaatttctggattcaagcgatcctcctgcctcagcctcccaaaacctgggaatgcaggcatgaggcttagcgcccggccaatatttgctttatctttctaaatatacacaaggatgttaatcatagcacctaataggccaaaattggaaacaatggaaacaatcccaaaagctattatcagcagaatatattcattctttagaatagatcagtggtggtgtattcatacaatggactattccacagagatgaaaaatatatatgcaaaaacataaattgcataaaccatattgagcaaaagacagacgccaatactctatttacataaagtgttacatacacagagatagattaatacatgtaaatgatacagatatgatagctaggtcagtccacggggatctgtggacttctgaagagtcgtgatccgtgtgacttctgaagagatgagggggcatgggaggctttagcggagcttccgctattctggcaaggtttcatttttgcccggggagctatcagccagcggagagatctgtaagaagagataagacctcaagggaagtacgaggcagagccttccgcggcccgcgccctggcggccccaagtcagcggcggagacagcgcccaccccgctccagcgtggagcaggagcaacggcgtggcccgtggagccccgcctctcgcggcaaccacagagaagccggactgggccacgtctaggaagaggtaggaaaggatcggcgcatcatttctccaatgggaaaggatgtgtttgcggaccaataagtcgccagtataacacccgcccacgcgcctgccaagccaatcggctaggagcagcgagcggcgcggctgaggcgcggcggccccgtggagcagcgcagtatggcgggcggggcccgggaggtgctcacactgcagttgggacattttgccggtttcgtgggcgcgcactggtggaaccagcaggtgaggtcagccggcagctgcccccgaggagcccttcgggatctacagtcccgacgttcagccggcctgcctcgtcctctctgct

SEQ ID NO: 2879 - DNA, 2300 bp, Homo sapien
gatcacttgagctcaggagctcaggagtttgagaccagcctgggcaagacggtgaaaccccatatgtacaaaaaataaaaaaaattagccaggtggtggtggtccatgcctgtaattgcagctatgcaggaggctgaggtgggaggatcgcttcagcccaagaggttgaggctgcggtcagccgagattgcaccactgcacaccagcctgggcaagagagtgagaccctgtctcaaaataaataaataagactaaataaatatggaattacaaggagctcagaatagacaagagaggctaagattttattttttattttcagacggagtcttgatctgtcgcccagtttggagtgcagtggtgctatctcagctcactgcaatctccacctccggggttcaagtgattctcctacctcagcctccggagtagctgggattacaagcgcccaacaccatgcccagctaatttttgtatttttagtagagacgggtttcactatgttggccaagttggtctacaactcttgacctcagtggtccgccgacctcggtctcccagactgctgggattacaggcttgagccaccgcgcctggccacttttttttttttattttttgttttatctgtatttttttgagacagggtctcactctgtcgcccagacaggagtgcagtggtgcgatcatgggtcactgtagcctcgaattcttgggcccaagcaatcctcccatctcagcctccagttgggacgacagatgtgagtcgcctggctaactttttgaaatattattttatagggagttgggggctggtgtctcactaggttgcccagtttggaatttctggattcaagcgatcctcctgcctcagcctcccaaaacctgggaatgcaggcatgaggcttagcgcccggccaatatttgctttatctttctaaatatacacaaggatgttaatcatagcacctaataggccaaaattggaaacaatggaaacaatcccaaaagctattatcagcagaatatattcattctttagaatagatcagtggtggtgtattcatacaatggactattccacagagatgaaaaatatatatgcaaaaacataaattgcataaaccatattgagcaaaagacagacgccaatactctatttacataaagtgttacatacacagagatagattaatacatgtaaatgatacagatatgatagctaggtcagtccacggggatctgtggacttctgaagagtcgtgatccgtgtgacttctgaagagatgagggggcatgggaggctttagcggagcttccgctattctggcaaggtttcatttttgcccggggagctatcagccagcggagagatctgtaagaagagataagacctcaagggaagtacgaggcagagccttccgcggcccgcgccctggcggccccaagtcagcggcggagacagcgcccaccccgctccagcgtggagcaggagcaacggcgtggcccgtggagccccgcctctcgcggcaaccacagagaagccggactgggccacgtctaggaagaggtaggaaaggatcggcgcatcatttctccaatgggaaaggatgtgtttgcggaccaataagtcgccagtataacacccgcccacgcgcctgccaagccaatcggctaggagcagcgagcggcgcggctgaggcgcggcggccccgtggagcagcgcagtatggcgggcggggcccgggaggtgctcacactgcagttgggacattttgccggtttcgtgggcgcgcactggtggaaccagcaggtgaggtcagccggcagctgcccccgaggagcccttcgggatctacagtcccgacgttcagccggcctgcctcgtcctctctgcttccccaggatgctgcgctgggccgagcgaccgattccaaggagcccccgggagagctgtgccccgacgtcctgtatcgtacgggccggacgctgcacggccaggagacctacacgccgcgactcatcctcatggatctgaagggtgaggtggtggcagagttagccgatgccccttatttcccttccgcgtgcctagtccttgcgctgccgttatcttcaagaccctcccactttaccgagctccaggaccggagatgaggagctgagcacaacatgccaacactcgaggggcccacgacagttgctcaagagccatttcgggaataggctgctaggccctggagacagtgaggacttgaactgcagcactcctgtcagacccctggatgtggttccccccg

SEQ ID NO: 2880 - DNA, 2300 bp, Homo sapien
caagctctggagccgctccctcagggcatccaggagtctctaaacaaccctacccctggggatttagaggaaattgtcaagatggaacctgaagaagctagagaggaaatcagtggatcccctgagcgtgatatttgtgatgacatcaaagtggaacatgctgtggaattggacactggtgccccaagcgaggagttgagcagtgctggagaagtaacgaaacagacagtcttacagaaggaagaggagaggagtcagccaactaaaaccccttcatcttctcaagagccccctgatgaaggaacctcagggacagatgtgaacaaaggatcatcaaagaatgctttgtcctcaatggatcctgaagtgaggcttagtagccccccagggaagccagaagattcatccagtgttgatggtcagtcagtggggactccagttgggccagaaactggaggagagaagaatgggccagaagaagaggaagaagaggactttgatgacctcacccaagatgaggaagatgaaatgtcatcagcttctgaggaatctgtgctttctgtcccagaactccaggtgagagctggagaatattctcaagtatttcgtggactcagtaatatgtatcacttattgatatgccacctgcttgcttgctgcactatggatagtcctaaaatcatttgtatttgatttgtgaatgcattatgggacatgattgtggagttgaggtgaaatgagatggaaaggatgaaattttacttattatattaaactcgtttacacattaaattgaatcacctgaccatactttaaatgccttaaaaaatagtaataggctgggcttggtggctcactcctgtagtcccagcactttgggaggctgaggtgggtggatcacaaggccaggagtttcagactggcctggccgacgtggtaaaaccccatctatattaaaaataacaaaaattagccaggcatggtggcggacacctgtaatccctgctgcttgggaggcagaggcaggagaattgcttgagcccgagagacagaggttgcagtgagccgagatcacgtcattgctctccagcctgggcaacagagcaaggctctgtctcaaaaaaaaaaaaaaaaaaaaaaaaaaaaaaatagtaaataactgggcacggtggctcacgcctataaatcccagcactttgggaggccaaggcgggcagatcacctgaggtcgggagttcaaaaccagcctgaccaacatgaagaaactccatccctactaaaaatacaaaattagctgggcgtagtggcacatgcctgtaatcccagctactcaggaagttgaggcaggagaattgcttgaaccggggaggcagaggttgcggtgagccacgattgcaccatctcactccagcctgaaaactatcttcaggttacagaagtttgtaaaagggaacttcttcccctctcctgctgtcaggccgaatgtcagctatcactgggatttcttttttttgtcttgttttgtgtgtggttttttctgtgttttttttttgtttgtttttgtttttgttttgagatggagtcttactctgtctcccggattggagtgcagtggcataatttcagctcactgcaacctccacctcccgggttcaagcaattctcatgcctcaacctcccaagtagctgggattacaggcatgtaccaccatgcctgactaatttctgtatttttagtagagacgtggtttcatcatgttggcgaggctggtcctgaactcctggcctcaagtgatccacccacctcggcctcccaaagtgtcaggattacaggcgtgagccactgtacctggcccattgctgggatttcataactcaaggaattcccctcaggacagctgtagtgggctccccattgtttaacttcagattatcctgatatagctttgtgttgtttgcaattcatgagccactaagagccattataagtactctttggagggttttacaggaaacaatggagaaactgacttggctggcatctgaaaggcgcatgagtcaggagggtgagtctgaagaagagaattctcaggaggagaactctgagccagaagaagaggaggaagaagaagcagaaggaatggaaagcctgcagaaagaggatgaaatgacggatgaagcagttggagactctgctgagaagcctcctacttttgcttcacctgagactgctccagaagtggagaccagcagaactccaccaggtgagctaggcaaacctatactgaaggaccattctc

SEQ ID NO: 2881 - DNA, 2300 bp, Homo sapien
gagcacacaaggacactaatggtattcagaaatatagatttcaaagagtccttagtaatctattctgaaatttaacaaccttcactgtgagaagtaggtttgtttttcctttttctaacctcagtccctctggattgaggttaagcttcctctggttctgtcattttgttcaagggaacatgtctgagagatttatgccaagatcctatgttattttcatactcctttcagaaagcaaaatatatgtgataaagttgcaaacatcttggttattgtctctctgggggctgggttacggtggctcacacctgtaatcccagcactttgggaggctgaggtgggaggattgcttgagccagggagttcgagagcaacctgagcaacatagtgagaccctgtctctgcaaaaaataaaaataaattagccaggcatggtgccatgcatctgtggtcccagctactcaggaggctgaggtgggaggattgcttgagcacaggaagttgagagggcgtggagccatgattgcatcactgcacatcagcctgagtgacagagagagatcctttctccaagaagaaaaaaaaaaaagatctctctggattcctgaaatgacaatgtggtaacatgtcacttcatcattttctttccatccccagcacgttcagctcttgacccaaatccaccttcttgccacctgcaaccccaacctcaatccggaggccactaccaccaggatatttcttgtaagtttccaaatatccataactctaaagactagagtatgaaattagcttggcaggttatttctcagttattcactgatcataatctatatttattcttctctcgggtatttttgattgttttgcctgctttctgttaaggcttcctgtgtttgctgagagaacgtaagccactgattcccatgaaaggacaaggagtgtattcaattttcttaatactgtctttctgatatttttattgaatcctcctcatctttagatccaacctaacttcttaggtttttggtaccactgttcgttttatagatgttgagactgggcacggtggctatgcctgtaatcccagcactttgagaagccaaagcaggcagattatatgaccccagtagttccagactagctggggcaacatgccgaaagcccgtctctacaaaatacaaaaattaaccagatgtggtggtgcgtacctgtagtctcagctacttgggaggcagaggtggaaggatagcttgagcctaggaggtgagggttacagtgagctgagatcgcgccactgcactcaagcctgggcagcagagtgagacccagtctcaaaataaataaataaataaaataaaagtaatagtcctaattcttggctgggtgcggtgacttgtgcctgtaatctcagcactttggtaggctgaggtggctggatcacttgaggtcaggagttcgagaacagcttgaccaacatggtgaaatccagtctctacttaaaatacaaaaaatagccgggcgtggtagcgggcgcctgtaattaatcccagctactcgggaggtagatggagaagaatcgcttgagcccaggaagtggagacttcagtgagtcaagatcgcaccactacgctccagcctgggcgacagagcgaaactccgtctcgaaaaaaaaaaaaaaaatgagtcctcattcttcataatcttacttctagttcaggagctagaccatatattccttagtgtttctcactaagtctaaaagtaaaacaagaatacaatccctgaatatctgggaactcaggcataatcttaacagagtagtttattgtgaaagactttatgatgatttttacctgtttttatcctgtagtaggaaggtcagcttctcatttagattctgaaggctactggtattaattgtctggaattgtcttaaatctttcttgtgtcctgttttcccagaaagagctgggaacctttgctcaaagctccatcgcccttcaccatcagtacaaccccaagtttcagaccctgttccaaccctgtaacttgatgggagctatgcagctgattgaagacttcagcacacatgtcagcattgactgcagccctcataaaactgtcaagaagactggtaggagacagatgtgtcagctttaagtttttacttgcggtgagaggtggtgggaatcttatcccatagataactaaggatacttgcctaggaatggaggacacaggacatttgtaatttcttccttctctcttttatcctccctttgtactcattatccaag

SEQ ID NO: 2882 - DNA, 2300 bp, Homo sapien
ctaaggttcccaaccctaacttcccacccctaccctcctgggagactttttccagggctgaagcaaaaattcaaaaacccagcatgtcagttctgaagtaaaaggagaataagatagctaagtgattaagcatgtgctgataccctatgcagtcagggtaagatctgttggccaggcctggtggcttacgcctgattccagcactttgggaggccgaggcaggtggatcatgaggtcaagagatcgagaccatcctggccaacatgatgaaaccccgtctctactaaaaatacaaaaattagctgggtgtgatggcgtgtgtctgtagtcccagctactcaggaggctgaggcaggagaatcacttgaacctgggaggcggaggttgcagtgagccgagatcatgccactgcattccagcttggcgtcagagcgagactccgtctcaaaagaaaaaaaaatctgtttatgtagctacaacaagcaggttatctttctttcttttttctttttttttttttttttttttgagacagagtcttgctctgtcgcccaggctggagtgcagtggcgggatctcggctcactgcaagctccaccttctgggttcacgccattctcctgcctcagcctcctgagtagctgggactacaggcccccacgactgcgcccagctaattttttgtattttcagtagagacggggtttcaccatggtcttgatctcctgacctcgtgatccgcccacctctgcctcccaaagtgctgggattacaggcgtgagccaccgcgtccggccaacaagcaggttatcatatttcaaggaatccccgatattacagcagtagataaataagaaaatgtagtatcccaccagggaatactatacagccataaaaaggtatgatatcatgtccgtttcagggacatggatggaggtgaagccatcagcaagctaacgtaagaacagaaaaacaacactgcatgttctcacttataagtaggagctgaacaatgagaacacatgggcacagggtggggaacaacacacactggggcctgttgggggagcgggggaagggagaggatcaggataaactgctaatgcagctgcacttaataccaaggtgatgggttgataggtgcagcaaaccaccaaggtgcacgtttacctgtgtaacaaacctccatgtcctgcacatgtattctgaaacttaaaattaaaattttgagggctaggcatggtggcttacgcctgtaatcccagcactttgggaagccgagatgggtggatcatgaggtcaggagatggagaccgtcctggctaacacagtgaaatcccatctctactaaaaatacaaaaaattagctgggcgtggtggcacgtgcctatagtcccagctacttgggagggtgaggcaggagaattgcttgaaccctggaggcggaggttgcagtgagctgagatcgtgccactgcactccagcctgggcgacagagcgagactgtgtctcaaaaaatatttaaattttgaaaaaaaaatgcaaggcagtgcagcctgagtggatagggaaatgggacaagctgaacctgggatgggagtaacaagtaaatgagagaagaaatgagaatgatgagttcccaccagctccttggctgctttcttatccagatatttctctgttcctagcattttaattttttctttatttgtatattatttagaagaggaattttagaggaatgggatagagtgtaatatagaatcatcatatttgatgcatgctaactactttggcaaaagatttgtaaaaggctgagagtttgactgttggctaaagtgagatgggggattagtagggaatgaaaattgttcaggctctttgctcatcattggaacgaattggatgtgttgtggacctacggaaacactcaaattcagtcatctccctgttgggaataggtttgaggaaccactggccaacctgttaaatgaacaacatcggacagtgaaggagctatttgaacagctgaagatgaagaaatcttcagccaaacagctgcaggaagtagagaaggttaaaccccagagtgagaaagttcatcagactctgattctggacccagcacagaggaagagactccagcagcagatgcagcaggtaggacttttcttggtcatgttaacattggatttttttttttgagacagagtctggctctgtctcccagcctggagtgcagtggcccgatatcggctcacttcaacctctgctttctgggctcaagcatttctcctgcc

SEQ ID NO: 2883 - DNA, 2300 bp, Homo sapien
gtcccagctactcgggatgctgaggcaggagaatcgcttgaacccagcaggtggaggttgcagtgagctgagatcgagccactgcactccagcctgggcgacagagcgagactccaccttaaaaaaagaaagaaaaaaaaaatattgtgggagggtacacagagaaatctttgttaatagttttatgtgtttctttctagatactctgtgggtgttcagtcaagcatgtatttatctcaaacaagaatttttttccacaaaaagaatcatactatacatattggtcttcatctgcaacttgcttctttcacttagcagtataacatatatttttccattataatacatagagatcacctcttctatttaatggatacatgatagtaagaaatttaggtattctctttttggtctttttttttttaaatcagttcctcagtcacactagctgcatttctcaagtcacatgtggctaatggctactgtatgatacaatacaatacatgtatagatcatttccatcatcacagaaagttctgttagacaacactgatctaaaattatctggagaaaaatattaccttaatatataataattccataatttaatgactccttcataatttttacttagtaattgaaaagacagtttagcattaacattaaagaaaattaggctgggccctgtggttcactcctgtaatcctagcactttcggaggccaatgcaggcggatcacctgaggtcaggagttcgagaccagcttggccaacatggtgaaaccttgtctctactaaaaatagaaaaattagccgggcgtggtggtgggcatctgtaatctcagttacttggtaggctgaggcaggagaattgcttgaagctgggaggcagagtttgcagtgagccaagatcatgccactgcactccaacctgggtgacaaagtgagactccatgtcaaaaaaaaaaaagaaaaaagaaaattaaaagggagaagaacatccatatttctattattctaacctaacaaatgtttattatttttgtatatttttagttatttatgattcttattgtaaggatataatttttcatgcttatgattattatgtatatattgtacttttgtcatacatgtattgaacttttatagaatggttacatattcacattttatatgtgtacgtgttgagtatccccttcatccaaaatgctcaggaccggaagtattttggatttcagattttttcagatattagaatatatgtattattatacttaacagataagcatactaaatttgaaaatttgaaatctgggcagggtgcaatggctcacactgtaatctcagcactttgggaggccgaggcattcagatcgcttgagcccaggagttcaagaccagtctgggcaacataccaaaaccctgtctctactaaaaatacaaaaattagttgggcatggtggcatgtgcctaatcccagctacttgggaggctgaggtgtgacaatcgcctgatcctgggcagtcaaggctgcagtgagccatgatcgtgccactgcacttcagcctgggtgacagagtgagaccctgtctcaaaaaaaaggaaaaagaaaatttgaaatctgaaatgctccaatggctattccctttgagagtcatgtttgcactcacagagtttcagattttggagttttggatttggaatgctcaacctgtactattttatactaagaaattataattatatagtcattctctaattgttgggaatttgggccactccttttttcactgtcagcttcactgtacaagtagcttttacagaaagtattattttcatggaatatactacacaaaattagctgggtgtggtggcgtatgcctgtggtcccagctactcaggaggctaaggtgggaggatcacttgagcccgggaggtggaggttgcagtgagctgaggctgtaccactgcactccagcctgggcgacagagtgagaccctgtctcaaaaaaataaagaataaatgtgctttattggaacagattcttagaagtttgagaacagagttaatgagcatctgaaacacttttttttcctagatgaagcagatgatgatgatgatccagaatataatttcctggaagacctcgatgaaccagacacagaggatttccggactgaccgggcagtgagaatcaccagtgagtctgtgtttattctaagtcctgctcttgactgctttgcagctgtctttgtttactttgtagatttttaggggtgaagtttgcagctcatcca

SEQ ID NO: 2884 - DNA, 2300 bp, Homo sapien
ctctgtgcctggccctgttttttttttttttttgagatgtctctcttgcttaggttggagtacaatggtgcaatcatggctcactacagccttgatctcctagtctcaagagatccttctctttcagcctcctaagtagctgggactacaattggtgccaccacacgcaactaatttgtttgtttgtggcagagatgaggtctcactgtgttacccaggctggtctcaaactcctagcttcaagcagttcttcctgggcctcccacagtgttgggattgcaggtgtgagccaatgcattcagccagcggtattatacttaattgccccacagtggaaacaatctgaattccatcaacagataattggataaacaaaagtggtatatctatacaatgggatattattgggtgaaaaaaggaattcggggccaggcatggtgactggagtgcagtggtacgtgtctcactgtcaccttgaactcctaaacccaagcaattctcctgactcagcctcttgagtagctggtaccacaggcacataccaccatgcctttaatcccagcagttaggaaggccaaggcaggaggattacttgagcccagtccaggagtttgaaacttgcctgggcaacatagggagtccccccacccccatctctacaaaaaatgaaaaaaattagctgagtatggatccagtggctcacacgtgtaatcccaacactttgggaggctgagcaggtaggtcacctgaggtcaggaattcaagacaagcctggccaaccccatttctactaaaaatacaaaaatttgccaggtgtggtggcacacgcctgtagtcccaactatttgggaggctgaggcaggagaatcacccgaacccgggagatggaggttgcagtgatccgagatcgtaccactgcactccagaatgggtgacagagcaagactccatctaaaaaaaaaaaaaaaaattagccgagcatggtagagcatgccgatagtcccagctacttgggaggctgaggcaggagaattgcttgagcccaggagttcgaagctgcagtcagctctgattgtgccagtgctgtagcctgggtgagagattgagactctatctcttaaaaaaaaaaaaaaaaacaccaggcatggtggctcacagctgtaatccgaacactttgggaggctgaggtgggcagatacctgaggtcaggacttcgagaccagcgtgcccaacatggtgaagctccgtttctagtaaaaatacaaaaattagtcagatgtcgtggctggtgcctgtaatcccagctccctgggaggctgaggcaggagaatcacttgaacccaagaggcagaggttgcagtgagccgagatggcaccactgcattctagcctgggcaacaaagcaagactatgtctcaaaaaaaaaaaaaaagtattgatagatattacaacagggtgggatttaaatgcattatgctaactgaaagcggccagagacaggccacacattttatgattccatctaagtgaaatgtccagcagaaacaaatccatagagacagaaaatagattaatgcttaacaggggctgggaggagggggaaagggaagcgactactaatgggtatgggatttctttttgggttaatggaatgttctgaaattagataatggtgatggttgtataactctgtgaatatatgaaaatcctttcaattatacactttaaaagggtaaattttatggtatgtgaattgtatatcaataaagctgttataaattttcctaaaatgttggtttcaaactgatgtcatttattttatttcttttttatgtcgtgtttcttaaagtttctcaaacaataataaatccaaattgtttagaggaaggatcctgttacttaagctaagatgagaagaaaaggagtgatgatgaggtttggaaacatcactcactcagtgacttttctttctccattgtccagcccatggatgacagtctcattgcatttcgaacgcgttctaagatgcccctgaaagatgttcccctgggccaattagaggcagagctccaagctccagacatcactccagatatgtatgaccccaatacggcagatgatgaggactggaagatgtggctggggggacttatgaatgatgatgtggggaatgaaggtaagttttggtttgtgatttattatgtatactgtccattatctgttgtaaaatttttagtatttggaagggtatagaatggaatggtttgggttaattgatttaatttgtatttaactgataa

SEQ ID NO: 2885 - DNA, 2300 bp, Homo sapien
gtccagcctcactttggcaaatgcttttaaaatggacacgtaatttttcttattgcatattctagaccttcattgctatgtaggttgtaagtagtagtggtagtcgacatctgtgtcttatttctggacaaaacaggaaaatgttcagtattccttcattatatatgaggatagttataggcttttcatagaaatattttttaggttaaggaaataattttcctaagttttctgagttttttcatatattgaatttcatcaaatgctttttcctatctctattaagatcatgtttttttctctttcattttgttaatgtggtaagtttcattaggtttattgagatataaaataaaatgtatctgatgagttttgaaaaatatgtacagttgggccaggtacggtggctcacacctgtaatcccagagctttgggaggctgaggcgagtggatcacctgaggtcaggagttcaagaccatcgtgagcaacatggagaaaccccatctctactaaaaatacaaaattagccgggcgtggtggcacatgcctgtaatcccagcactttgggaggctgaggcaggtggatcacctgaggtcgggagttcaataccagcctgaccaacatggagaaaccctatctctactaaaaatacaaaattagccgggcatggtggcacatgcctgtaatcccagctactcgggaggctgaggcaggagaatcacttgaacccaggaggcggaggttgcgctgagccgagattgcaccattgcactccagcctgggcaacaaagagcgaaaactccgtctcaaaaaaacaaaagaaagaaaaatatatacagttgtgttaactgctaccacaaccaacgtggaacatttctgtcaccccaaaagttgcctaattcccctttgctatccccctttctcaaacattggcaagcactgatttctatttccatagttttgcatcttctatgcaaatgttctatacttgttataccgtcatataatatgtgtccttttacatctggtttctttcacagcataatgcttttgagatttatccactttactgttggctttctgggctaagttcctggagcagctattttggaattctgatgatgttcttggtttatttgcagaagaacaagacaatgaagaaagtgagaaaaggagaaaaaagaaaaagggtaccaagaggaaacgagatggaaggggtcaagaagggaccttggcatatgacctgaaactggatgacatgcttgaccgtaccttggaggatggtgccaagcagcacaatctaacagcagtcaatgtccgaaacatccttcatgtgagtaagactggggcagttatgtaaatggaagggaactttttcatggaaagcatataaaaatgttcagcaaattcttgactcttgatacgtgaattaccgattttgtgggttacccgtgacagaacattttacatttttacatatttaagatagctttctccttgcactcagtacaagtttgaaatatgaacacatgttaaagaagaatttaattggaaagataaactgttcctgtttccttccactgattttcatatttactgtattgtttagtagattcaatgttgataatgttcatagtgggtttactcttgtgggtcgatatgtctaaaaagatgcctggttaatagtttattgcactttgtacatatgtaaatacttttcttgatatgtagcaacacagctatttgcagagcctttgctcttgttactctttctcttaagcatatagttacttacctcaggatctccttttatgtgagccattcctgttcctagtagcagctaatgagattggttcatttgctgctacattgtttgaaactgtgtggttctggccaaaacttacttctgccttctttgctttcagttgccttgctttaccccagtctgatgctattcgagtatatggttctcatttgtcctgtacataggtctgacagttacatggagagatgagtattgtctaggtgacaaacccttgttgcataaagtgaaatttcatctttctccaggaagtaatcacaaatgaacacgtggtagctatgatgaaagcagccatcagtgagacggaagatatgccaatgtttgtgagtagttgattatcactcttttaatgtcttggaacagagttatctctaaactggctaagggtaggaggtcacttaggagtttgtaaacagtttggcagctggggttaaagttagcatttcaaaacataagaattacttggtaatttttac

SEQ ID NO: 2886 - DNA, 2300 bp, Homo sapien
atttaggcatcctttcactttgtactcttgctccccaagtcctcttcccaggtaactgttaaacaattttttgtgtatagtccagggattttctgtatatatgcaagctatttccttgatagcctgatttctgatgtttaccatttttttttttttttttttttgagacagagtctctctctgtcgcccaggctggagttcagtggcgcgatctcggcacactgcaacctccgcctcctgggttcaagcagttctcctacctcagcatcctaagtagctgagattacaggtgcccgccaccatgcctggctaattttttgtatttttagtagagacggggttttgccgtgttggccaagctggtctcaaactcctgacctcaagtgatccacccatctcagcctcccaaagtgctgagattacaggcgtgagccactgtgcccagcattcttttttggtttgtttgtttgttttgtttgagatggagtttcgctctgttgccctggctggagtgaagtggcactactatcttggctcactgcaacctctgcctgccaggttcaagcgattctcctgcctcagcctcccaagtaactgggattacaggtgcctgccaccatgcctggcttatttttgtattctttttttacagccgaggtttcatcatgttggccaggctggtctccaactcctgacctcaagtgatctgcctgcctcagccttccatagtgctgagattacagatgtgagccactgcgcccagcctacttttaatactacatgaatatttctttgcgtgtgtgtgtgtgtgtgtgtgacagtgtcttgctctgacacccaggctggagtgcaatggcatgatcacagctcactgcagccttgaactccagggtccaagtgattctcccaccacaccctcctaagtagctgggaccacaggtgtgtaccaacacacccagctaattttagagctctatatttttgtagagacaaggtatctccaaatgttgctcaggctggtcccgaactcctggatcctggctaaagcgatcttcctgccctggcctcccaaagtaatgggattacaggtgtgagccacctggcctagcctaattttttatttttatttttagtagagacaaagcctcgatatgttgctcagactggtctcaaactcctgggttcaagtgatcctcctgcctcagcctcccaaagtgctgggatgatagtcatgagccacctcatgactataagcacctggcttttttttttgtgtgtgtgtgtgtgtgacggggtcttgctgcgttgtccagtctggagtgcagtggtggaatcgtatctccctgtaacctcaaaatcctggcctcaagccatcctcccagctcagcccccccaagtaactaggactacaagcatgcaccatcaccccttttttctctgtctttttaatgctagcctcacctactcccctcacaaagggagtgtttatgaagtgttgaggtgagaaagttgtctaatgaactgtagaaccatatatttacaattttatggtgacagttactcttctgctctgccaaattgatttacaaagtcagggcattttatgattatatttatagttgatgaaatatggtgttaatggtcatctatataaaatgtcatcaggaatttcctttacaagtctgatttttcataggaaaaaatgcaaaactgaaagcatattagaaataaaaagacctcagcaattacctagtttaactccctgagtttacagatgagtaaattggatctgagctttgatttaagagaggaaaattcctatatagtatatgcttaattcatgaagttgtctacctaaaaacactataataagatgctaaattctacaacagagtatgactgagaatggtcaaagtgtggagcaatatttgtgattcttccagggaaacctcaaatgaattctgaaggggagataccttccctgccatcaggcagccaatctgcaaaaccagtaagccagcccaggaaatcaacccagccagatgtttgtgcctctcctcaagaaaagccactcaggactctgtttcaccaacctgaggaagagatagaagatggtggactcttcattccaatgggtaggctttctttttctttttaattaaatgaaacctctttattgaagtataatatgtagaaaactgcacatgtcctaagatatcctgaattcactatatttttacaaatttaatacacccttgtaagcaggacccagatcaagatagagaatgttatcaataccc

SEQ ID NO: 2887 - DNA, 2300 bp, Homo sapien
gaaagtactgaagggtaagaagcataggtagattattatatgaaatcctctgatttcagttttctgggctttaatacagcagcaaaatgttctcggtcctgagttccagaattttgggaaaataaaattctgtactgcctggatttcagtatcgactgccatcattatgcatttctgagaccgctaaaggttattacagaacttttttttttggcttatatttcacagtggatggaaactgtcttaaacctcagaaactctgatgaaagaccaaacctggggatggttgcacaactctgaacatttactaattttaaaaaaacagccgggcacggtggctcatgcctgtaatcccaaacctttgggaggccaaggcgggcagatcacttgaggtcaggagttcgagaccagcctggccagcatggtgaaacccccatctctactaaaaatacaaagattagccgggcgtggtggcacacgctacttgggaggctgagacacgaggatcgcttgagcccaggaggtggaggttgcagtgaaccgagatcgcgccactgcactccagcctgggcaacagaacaagactccgtctgaaaaaaaaaaaaaaaaaaaaatttggttgtacacgtaaaacagatggatattgtggtatgcaaagctgtttaaaaaaaaaaaaaaaaacaactaatgaaaagtgccaaagttaatcagtgttgaatttttttcatgaacctcaagtgcttagggtttcgtatgagagaggccaaaccgaaagatctgtgtattctgtaggtcaaagaacaacacacatgaaactccgagcttctggagtcttccttggtatttgggagagttggtgtgattcaggttagtcagactactgccatgtttgcataaatttcaaccttcattttggctgtggataatttcatccgttggattctgtttacagataggattagttcaaatgtataaatttgtgttggtggtttacctgtaaaatgagggggttgaaagtatttttccaccttttgacattctgttttttattatttttttaatctccgtggattccagacattgtttttctagaaaagtggaaataacatcattttagaagtcattcattcattcgctcattcaaaaagcacgtattgaattattgaacatctgttacaccccaggcagcctcctggacactgggtcaatgcattattagctagagttaggagacttaatacctgattctccttgatagctgtctgtgtaccgttgtgaaatcacctactcagatgagccagaactttgtcctgtgcaaactggaatatgatataataatcttacagtctattgtggagaccaagtcacctaagaaaatgtgagagcattttgtaaaatgcagaatattgtacatatatgaataattactatagcctgagtccaagagtgccttagttttaatcaggagcctgcactatttgtaatttagagacttctttttctggcattttatgacttcttcagtcccttggtcctgtgttccaggtgactcgtagtgagaaaaattagttgttaatctttttttttttttgatacagagtctcactgtcgctcaggttggagtgcagtggcacgatgccggctcactgccacctccgtctcccgggttcaagcgattctcctgcctcagcctccggagtagctgggattacaggcgtgcgccaccacgcccagctaattttgtatatttagtagagacggggtttcaccatgttagccagggtgatctcgaactcccgacctcaggtaatccgcccgcctccgtctcccaaggtgccgggattacaggcgtgagccaccgcgcctggcccccaaattagctgttaatctaaaccactgaatcttaacctcagttttgagtaggataactccatgggcagagaaagctaagtagtgcctttaaatttttttgccaataactgacgcactaacgttgtggcttcactctgccctaaaatgggatggcgcatagtgttaggcgcatgctccttgatgcactgcggcgcggcgctccgaggctcggggacgcgcacgcaattcgctgttgttggctgacttccggtggtgccaaagccgtttccgtggaatcaggccggctggtgagggtacaggtttgtgtgtggtggggtgggaagaggcaggtgggagctgggacacctggacgaacgatgtccaggttgagaaggtcgggtctgagggtgggcgctgggtgcgtggcggaagttaagggcgtgaagtcc

SEQ ID NO: 2888 - DNA, 2300 bp, Homo sapien
ggttaagattcagtggtttagattaacagctaatttgggggccaggcgcggtggctcacgcctgtaatcccggcaccttgggagacggaggcgggcggattacctgaggtcgggagttcgagatcaccctggctaacatggtgaaaccccgtctctactaaatatacaaaattagctgggcgtggtggcgcacgcctgtaatcccagctactccggaggctgaggcaggagaatcgcttgaacccgggagacggaggtggcagtgagccggcatcgtgccactgcactccaacctgagcgacagtgagactctgtatcaaaaaaaaaaaaagattaacaactaatttttctcactacgagtcacctggaacacaggaccaagggactgaagaagtcataaaatgccagaaaaagaagtctctaaattacaaatagtgcaggctcctgattaaaactaaggcactcttggactcaggctatagtaattattcatatatgtacaatattctgcattttacaaaatgctctcacattttcttaggtgacttggtctccacaatagactgtaagattattatatcatattccagtttgcacaggacaaagttctggctcatctgagtaggtgatttcacaacggtacacagacagctatcaaggagaatcaggtattaagtctcctaactctagctaataatgcattgacccagtgtccaggaggctgcctggggtgtaacagatgttcaataattcaatacgtgctttttgaatgagcgaatgaatgaatgacttctaaaatgatgttatttccacttttctagaaaaacaatgtctggaatccacggagattaaaaaaataataaaaaacagaatgtcaaaaggtggaaaaatactttcaaccccctcattttacaggtaaaccaccaacacaaatttatacatttgaactaatcctatctgtaaacagaatccaacggatgaaattatccacagccaaaatgaaggttgaaatttatgcaaacatggcagtagtctgactaacctgaatcacaccaactctcccaaataccaaggaagactccagaagctcggagtttcatgtgtgttgttctttgacctacagaatacacagatctttcggtttggcctctctcatacgaaaccctaagcacttgaggttcatgaaaaaaattcaacactgattaactttggcacttttcattagttgtttttttttttttttttaaacagctttgcataccacaatatccatctgttttacgtgtacaaccaaatttttttttttttttttttttcagacggagtcttgttctgttgcccaggctggagtgcagtggcgcgatctcggttcactgcaacctccacctcctgggctcaagcgatcctcgtgtctcagcctcccaagtagcgtgtgccaccacgcccggctaatctttgtatttttagtagagatgggggtttcaccatgctggccaggctggtctcgaactcctgacctcaagtgatctgcccgccttggcctcccaaaggtttgggattacaggcatgagccaccgtgcccggctgtttttttaaaattagtaaatgttcagagttgtgcaaccatccccaggtttggtctttcatcagagtttctgaggtttaagacagtttccatccactgtgaaatataagccaaaaaaaaaagttctgtaataacctttagcggtctcagaaatgcataatgatggcagtcgatactgaaatccaggcagtacagaattttattttcccaaaattctggaactcaggaccgagaacattttgctgctgtattaaagcccagaaaactgaaatcagaggatttcatataataatctacctatgcttcttacccttcagtactttctcgttttggaaccacagcgcgtcagtgggcgcggcctcattctcgggaaaactcggcggtgggaggagtcccctccgggagagcttcctgaagggggcgagggctgacttccgtaatctttcggaagaggcggagtcttcttccgaggaccattcggaagaggcggagtcttcttccgaggaccattcggaagaaggcggagcctacctctcatcaggaccagtctgactgcacctgcatccttagctcagcgcatccccggagcatcttaagagctgagcgcagctgacaactaggggccggaccgtcgcaggaggcgtccgctggataccttcccccttccctgacctagagctctacagctgctgcctcggtactgaccgagggttcc

SEQ ID NO: 2889 - DNA, 2300 bp, Homo sapien
cagctgggtcagagaaaacttcttgactaaaactggtcagaactcatcacagaaatgaaatacagtggtctctctctcccagaactggttgcagctaaaacagagagatctgactgctggctataggattttggacttaatgactgaaattgcaaattgtcctttttcttggcattacagattttgccaaaataactttttgtatcaaatattgatgtgtgaaagtgaaggagctagtctgctgaaccaggaatagtttgagatattgaactgtcatttttgcacatttgaatactttgcaggctggctttgtataaacttatcctctggtttcctatatgttgtaaatatttagaccataatttcattataaataaatctataaatattctgcttgtggtttctctgttttcttccacaacccatccatacactgaaattcataaacttttttactcatagcacaatgcaactataacattaccagaaaaatacatatacagaccccaaggtttgcatatagttcccagagttatgtaactgcaaaatgtacccttaaagttcaaatgaaaaggttaaggattattatgctggatattttccattttcatattttagccctcctttatttaacagcgtattaaaaggacttcatgaatgaagcgggttttaaaggaaatatgttattcttggaaagacattttatttttttttgagatggagtctcgctctgtcacccaggctggagtggaatggtgcaatcctggctcaccgcaacctcctgggttcaagtggttctccagcctcagcctcctgagtagctgggattataggcacctaccaccatgcccaactaatttttatatttttagtagagacagggagtcaccattttggccaggctggtcttgaactcctgatcctcaagtgatcagcccacttcagcctcccaaagtcctgggattacaggcgtgagccagcactcctggccagaaagacttaaattttgagacggagttttgctctgttgccaggctggagtgcagtggcaccctctcagccagctaactgcaacctccacctcccaggttcaagtgattctcctgcctcagcctcccgagtagctgggacttataggcgcatgccaccacacccagctaattcttttgtatttttagtagagacggttttacatgttggccaggatggtctcttatttcttgacctcatgactcacctgcctcggcctcccagagtgctgggattacaggtgtgagccaccgcgcccgcccggcccagaaagacatttaaaaagaacagtggtaggcagagctgcatgagaacaattttcgtgtcagtttcttctagcacctgtgctacgtaaatagaggggaatatggttatagtggctgcgcttcagttctgtatttaactcaaggcctctgttaactcagagctctctttcctgccagagtgtggtacatttatttaaaacaagtttttgtgtgtcttatacgtgtttaaaatacatacagaactctgattagggagtgttgtgaacatctggtttctgagaatgaatttaggtttcaatagcaaaagtcattgtggccgctcctttaggaaagtcatttttctcctatgagtagtcatccccggtagacttgactgaaatcctgtgttttaggaggatttggggggtgcccctgtcctcccttcctctcattacattgggtcaaattagttttgggtttttttttttcccacaagcagcaaacaaccctcggtaagttgttaatttaagtgtccctgcatgtctcttatcacgtactcccttcccttttgtgtaaataatttactttctactcgtgattaaatacccttgtctgtgagtgcatacaccctaggttgggtaggtgaccagaggaccttcagcggtgggtcccggaactgggttttagggacctgggaggggcgggaagagggcggggcaggctgtgggcgtcactgagtggccccgcccctccttccgcgactcgggcgccggtggcgccatcttactcggttgcgggaggggtcacaggtcagtgccggagcctccgcgagtgaaggaagacgaagtgcgtgacccgaccggctgtggtgttccagtccccactgaccagtaggagcagcagggcgtcggcttgtgaggtagaggggtggggagtctggcggcggagcagcagctgggggtggggagggggttcggaggagaatggggagggggcggaacctctgggtaccgcagacgtgagaga

SEQ ID NO: 2890 - DNA, 2300 bp, Homo sapien
tggtgggcatgtaaaatagtgtagccagttggtttggcagttccacaaaagttaaacaagatgtccatatgacctagcaattctgcttctacatgtaaaccctaaagaattaaaaacagatacttaaatacttgtgaatgttcacagcagcactacttacaatacccaagaggtggaaacaactcaaatgttaatcaatggatgaatggataaattgtggtctatacatccaatggaaaagaaattcagtgataaaaaagaatgaagtttattcagtgataaaaaaatgaagttctgacatatgctacaacatgaataaactttgaaaacactgtaagtgaaagaagccagatacaaaaggtcacacattgtataattccatttatataaaatgtgtaaaataggtaaatccagagaaacagtagattagtggtagcccatgtcttgcggggcaagagaaatgtgaagtgactgttaacaggtgaggggtttctttttggggtgatgaaaataatctggaattagataatgatgattgtggcacaatcttgtggacacactaaaaaacactgaattgtgcacttaaatttactctttaaaaagggtaaatttatggcataggagttacatcacaaattttttaaaatgacaaatataataaataatgtaatttcaatcagaatcccaacagcattgtgttttggggagaagaggaaaaggggcactttggggaggccgaggtggtaggatcggttgagcccaggagtttgagaccagcctaggcaaaatagtaagacaccccccacccccgcaccccctaccaccccggtctcttaaaaaaaaaaaaaaaaagccaggtgtggtggcccgtgcttgtagtcccagctacttcagaggctgaggtgggaggatcaggagactcattgaagctccaagacatcctaaaggttagaaacctttagcctcggcagggcgcggtggctcacgcctgtaatcctaccacttcgggaggccgaggcgggtggatcacctgaggtcaggagtttgagaccaggctggccaacatggctaaactgtgtctctactaaaaatacaaaacaacaacaacaaaaaattagctgggcgtggtggcgggcacctgtgatcccagctacttgggaggctaaggcaggagaatcgtttgaacccgggaggcggagagtggttagccgagatcgcgtcattgcacttcagcctgggtgacggagcgaaactgtctcaaaaaaaaaaaaaaaaaaaaaaaagaaacctttagcctacagaatcaactcaaactcctcagcatagcattcaaggcctttcatcttctggcctcccactccagccagctcaaccgttaagtacacagatgccagaacagggtgctccataacctatgcttgatcgcctctccagtactcaaccggctttttagcgtcccattcttaaacgctccagcaagatgagcagcttatcttcttcgacctttgcttaatatacaactctatcatacatatttgcctgcgtacctgccttgccacattgagagtaccagaatggcagggcctgcggcttattcatctttttatttttatattccctgcttggtgcacagaaatgaagcaaacaaacagagaaattctccaaatgatctttgcaacgaatccttttccttttcctaagtaacagaaacgtgaaacgggcaaaagccgcgggaaggctgtctccccagacagaaactaggactcaacacaaacgtagcggaatttgaggagaaacctgtttaatctcctgactcatgcatattgtcttctagtctaacaacatgcccacgataaagatggattcagctagccccgattccgcatttatagtaggcacagcagccatctttcttaaggttaaggcgcaacccggaagatcacaccctacctgcctcagaaacgccagatgcctttaaatcatcgagagtccaatcggaatcgacattttcaccggaaccgctcggccccacgaccggaagaggctgtgcgtaagaacgttgggggcggaagtgacgagaggtggtagtcggatagttggcgggtggttgagtagaagcggtcgccatgtccgcggggagcgcgacacatcctggagctggcgggtacggcttcaggggcgagggcatcggagcgagcactggggcgcaggagaggcggagggaccctgagaagctgcgtatagggtggaagggtccttaagtgggaagtaaagggctggacgtttggggagaaggatct

SEQ ID NO: 2891 - DNA, 2300 bp, Homo sapien
atacaaaaattagcctgtgtggtagcacattcctgtggctgaggtaggaggatcacctgagcctggggaggtcgaggcactgagccaagattgtgccactgcactccagcctgggtgacagagtgagacctcttctcaaccaaaaaaaaaagaaaaaaagaaaaaaaatttttttttttttttgagatggagtctcgctctgtcgcccaggctggagtgcagtggtgtgatctcagctcaccaaaatctctgcctcccgggttcaagtgattctcctgcctcagcctcccgagtagctgtgattacaggcactcgccaccacgcgccactaattttgtatttttagtagagacgggctttccccatgttggtcaggctggtcttgaactcccgacctcaggtgattcgctcacctcggcctcccaaagtgctgggattacaggcatgagccacctcgtctggccaagcagttatcttaattgccagattagcagggtgattctgggtgggcagaggagtagacatggccccgagagacagtgatgacacagtcacacaggagcagccatgaggccagaaggtagcctgtggggctcacctgaccttgggctgggcactccccttctgccaccccctttatactcatccctggttcgaaagccccaacatgttggcacccagcctgtatcactctcacctctgggtttctcctatgtgttcacaagcccactgctgatttattgtcgcaaagggcccctctcttccctcagcactccaaaggaactgaacatcgaacgttatcttaattagctggcagagggcaagaaggggctgaatatattggaatccttgagaaagccttactcttttacctatccacctcctgccttctctttgtccccacctcagctccttctgcagtaggtagagatgtaggcaatgaaaggggagggcccaatgaagcattttttttttccagttatgattgagatcatggggagacaggatgaggtgtggtgagggcgtatctcaggatccttagctctgacatggggtttgcaggagagagtagggggaccgctgagctctgtccacagactagagcaggaaaggggggaaaggcggcgatagaggttagcaggaatgtttaattatcaggagcaggaacagaactgagggcatgcccaggtccacacaggccctcataggcccagtgttcccagtggggaggaaacaggaagctgtgacttcctctctcttttccctccctgctcttagcctcaaggtcactgctgctgagatgaattccaacctgttttagttggcactgttccctgggcatggtaatagcctctcagtacccttctgccacaaacaccccaaacttctcctttgaaataatattcatacaaattgctatttcacatgtgttctctcattgcatcatgccactcctgtgaagcagacttacctgaaaattttaagcaagaaaacaggcttaggggagtaaagtaactctcccagtcacacggctagtgagcagcaggtctgggactccgcagcctccgctctttcctctcttggacacccatgctgattccctgcctctatgccacctcccaggccccttgctttgggccccaagggaacactttctgcagaggagggaggcctctgcactgttaggaacagaggcagctctagtttggttcctgtcatctctgggacagggaacctccagctctctccctggggtggaggcttggggctgccctccatagcggggtaactctcccttctcccctccctctctgccatttagagcccctcttacaggcgggcgcatgcacatataccctggcattcaggctgtgcctcgccctgccccacctaccaccaatcttgaccaacaggaaggtggtgggttgtcctttccacacccctccctctgaggtgtgggcgtgggccagggctcaccagaggccccagagaagcacttaattctacagcctccttcctagagccttcagtggcctctgccagtctggcagacacttgcagacctctcttctcagcaccaccaatctctgatgccctgcgatgcccacactcaatacttctgcctctccacccacattcttctgggccaatgcctccggaggcagtgtgctgagtgctgatgatgctccgatgcctgtcaaattcctagccctgaggctcatggttgccctggcctatgggcttgtgggggccattggcttgctgggaaatttggcggtgctgtgggtactgagtaactg

SEQ ID NO: 2892 - DNA, 2300 bp, Homo sapien
cattttgagacatgtattgggtgcctattgtataccaggtattgtgctaagggctttcatattctttatttatccttgatgtagcagtagtgtggatgaaggtgtgtagcaagaagaacttcccatgggatttgtgagaaagagacagaatgactctaggtctgagcgtggtggctcacacctataattctagcactttggggaggctggggcaggaggatcacttgatcctaggagttcgagaccagcctgggcaacatagcaagacgctgtctctacaaaaaaaatttaaaaattaggtgagcatcatgatgcatgcctgtggtcccagctatttggagggctgaggtggaaggatcacttgagcccgggaggtcaaggctgcggtgagccatgatcatgccaatgtactccagtccaggcaacagagtgagaccctgtctcaaaaaaaaaaagaaaaaaaaaagtatctagatgctggagagcaaaggactgaaccaagcaggaagggcctctgagcactggggtgggtgttatggattgtggagtaatgggccctttttcttggtgcataggttgggtcttggaggtaaagggctgtcctacttgggcgtgggtaaatgggagaccaatgtgattatcttaagaatacctggaaaagagtaggacaaagaaccaaacaagcccactcactccacctctggagcaggcacccctggtaagcaggccctatgtccttccatcctcagaagcctgagccctggggcgggcacaggcaacctccgggacaatagcactaggcagtgccagggtcgcttgctgctgggcagtgcccatgctgggatgtgctgctgctgtggctgctgcccgctgctggcccacctagagcaggggtcacttcgagagagggtgagtgttgggaggtggaggaggcagggcccagagtaccagggctgtctgtggagcattgatgccagagagaggaagggccactagagaccctgttctctggctgccccagtcttctccctccctttgccactccatctgagctggtcagacagatgagtgtttgtggatgccacagggggagggtggagggcaaaggacagaggtcaggtgtggaagagagtactcgtagcagcactggggcagagctgcagcactgcccattctggagtgaccctggtccagccatgttgttttttttaatactattttcagcttgcttgcttttacttatgtgtgtatatatatatatgtatatattttttttttttatagagatgggtctcgctgtgttgctcaggttgttctcaaactcctggcctcaagcgatcctcccacctcagccccgcaaagtgctgggattacaggtgtgagccacctcaccggcctcttgcttttaattcaaatgtaatacatgctcaaacttttggtttgagttatatagaaggctgggagggcaggagaggaggagaaaagggagagtatatggcagtgggaagagatttttggacttggtgtttgaggtcctgtgaggttattattcaaaggtgaatttgaacttctttttttttttttgagacatagtctcactctgtggcccaggctggagtgcagtggcccaatctcaacccaccacaacctccaacctccccggttcaagcaattctcctgcctcagcctcccaagtagctgggattacaggtgcctgccactacgcccagctaattttttgtatttttagtagagatggggtttcaccatgttggtcaggctggtctcgaactcctgacctcaggtaatccacccgcctcgacctcccaaagtgctgggattgcaggtgtgagccactgcacccagcctgaatttgaacttctaaagaggtataatttggtgcaagataggtggaggttagaccaaagggagcattttctagtggtccgggtaggtaggtgccagaatagaaaaaaggaggccagaacattttagaggtttgagttagaggctagaggcagctcagcttcctgaataagcctaggtagaggagcagttggcctgcgtgaggaggaggggaggagaggctgtgggcgggagaggagaacagtggcggagaagcaaggctgagaaagggaaggcagagcgggaggagcctaggagggagaccctgagaagagaagggaggacatagagagagcaggagacaggaggaggatgcgaaaaatggatgattggggatggggaggatgcatgaggggagaagggattgaccccaagacctctgggctctggacatc

SEQ ID NO: 2893 - DNA, 2300 bp, Homo sapien
gcctgggagagaagctgaggtcccaccccagatcttgtctctgggcctccagtgggtggaaccttgaggccaagattctagcctctggctgtctgtttttaaatttagtacattcctgagtcttggctgcccacctcaggggaggtgagtctggagttctggggccaggagcctcaggcctcttggtttgggggagttcctacaccctccccgtaggtatacttggcaggtgcaagccaggaagaacaagctgtggccctggggaagtccttcctgctttctaatgtccatccagcctgaactgggcacggtttatttcctcttcctttttcctggtctttgctatttaaggattctaaacaggggaatgggtgaagaaggaggtgaaggagttgctaggaaggaggggaagccggaggggcagtgtgggggtagtgctgggggtgaggagcccaaccagctcagccagtggtgaggtagtggagcccaaaaatagtggcagaggctaaaattggcacctacaagagtgctgagttgggcttgaaacctgcagcctggccccactgctgagccagggcagagaactgctggatctgggttgggtctcccctccctcccttcttctcccacgccctttggggccagaatcaggcaggaccctgctaaccgaaggctctgtcccaggcctctctgtgcttctggtttctccagagaaatgggagaccctgagaggcagaaatgaacttcactgtaagtgatcatagttagactggaggaggaattttcccaatagcaggaaactcacccaaaggctggctcaggctggggaaaagggtccagagagatgaatgccccaccttaccctgcttcttggggagaggctggttgggccctaactttctttgactagggcaggctggtttctggtctttcagttccggcttaacttgcaacagagagaactgcagttagacacatggaaggccttcggtaaaagtggagaatcccaacctagtcccccaaagtagctggcagaggcggagctaggaggagggcagagtggggtcaggaaggccccagaagggtggggcatgtgggagaattctctcctctctgttcttcgacctctgggagtgaatcctacccttcccgtgtactgaagatccagcgtttagttctcctttgatttcctctccctctggccacccctgcccccaatcgtaaaaggggtcagtctgctcaggcctgctttgatgggaccccgaaggccaggaaggaactggtcctgggttttctaagagctgggggcggatggaattctcctgcctgcgggtctttaaagactgaggtaacgcagtaggggagggaaaaagggagggcgaggggagaagggaagaaggggagggcagaggggaaagggccaacctgggtccggcgagggctgcggggctgggttttaggaaaagaagagctaagaggcgggtctctggggctagagggcgcccccaggcgctggaggggaaataggcagaggggcctctcaaacctgtcctaggaccctcgtacctctccgagctgcccccacacaaaccctggcgtcccgtcctgcgcgcgggcaccccgccctccctccgctccgcctacccccttcctgagcttgggcgggggaggagactcgggtttgaggaactggtgctgggtgccgggcgaggggagtcagacttcctgtccccgagaccaacgcgtgcgggccgaacccctccccccgccttcccccaacaatacaggacgccggggtccgcgccgcgtcctccctggtccccccgtccgattatgtctcggatcgaatccctcacgcgggcgcggatcgaccggagcagagagctggcgagcaaggtgggctcggaaacccctctcctttcgccgcggtcctcgggtgctccccgaaccccggcacccgcggtgcatctcctgtctccccgcctgctttctgggcgccaaaatcgggcggagcggtggatcggcgagcggcgggacggggtgggtggggactgcgagcgagtgggtaggggtggggggagcggcagacgcgacggtgctgggatcccgggagggagcggagcggacctgggcttggtcgcctccaagccggcgggaccgagtgctttaggccgcttgaaagaaagttgctccggtaagggacggagcgggaagagggaggtgtgtgtctcgcgggtgggggcggtggaagctccggcacctcctctcaccccgggccccaccggcttgggcttggcgtg

SEQ ID NO: 2894 - DNA, 2300 bp, Homo sapien
acggaaactgagtcaagctgcaggccaagctcactaaacacaggtgtttttaaaggcagaacacttttcttttccctgtccctagtccctttccttgttattcatctcctaaggggaagaagagggcatagggtgaggggtagggtaacagcaggtgggatggaaagtagactgaaggttggggtgggagacagaaaagagttggagggtcgggtcctcttctttcatagagaccttcttagttgagttgagggaccatgaggtcgcttgaaaaaccccagggttcaaattctatgtttcctgggtacccaggctggagtgtggccctttaagattctatccatagcttgcagcaccctcctgccccaggcctgggagagaagctgaggtcccaccccagatcttgtctctgggcctccagtgggtggaaccttgaggccaagattctagcctctggctgtctgtttttaaatttagtacattcctgagtcttggctgcccacctcaggggaggtgagtctggagttctggggccaggagcctcaggcctcttggtttgggggagttcctacaccctccccgtaggtatacttggcaggtgcaagccaggaagaacaagctgtggccctggggaagtccttcctgctttctaatgtccatccagcctgaactgggcacggtttatttcctcttcctttttcctggtctttgctatttaaggattctaaacaggggaatgggtgaagaaggaggtgaaggagttgctaggaaggaggggaagccggaggggcagtgtgggggtagtgctgggggtgaggagcccaaccagctcagccagtggtgaggtagtggagcccaaaaatagtggcagaggctaaaattggcacctacaagagtgctgagttgggcttgaaacctgcagcctggccccactgctgagccagggcagagaactgctggatctgggttgggtctcccctccctcccttcttctcccacgccctttggggccagaatcaggcaggaccctgctaaccgaaggctctgtcccaggcctctctgtgcttctggtttctccagagaaatgggagaccctgagaggcagaaatgaacttcactgtaagtgatcatagttagactggaggaggaattttcccaatagcaggaaactcacccaaaggctggctcaggctggggaaaagggtccagagagatgaatgccccaccttaccctgcttcttggggagaggctggttgggccctaactttctttgactagggcaggctggtttctggtctttcagttccggcttaacttgcaacagagagaactgcagttagacacatggaaggccttcggtaaaagtggagaatcccaacctagtcccccaaagtagctggcagaggcggagctaggaggagggcagagtggggtcaggaaggccccagaagggtggggcatgtgggagaattctctcctctctgttcttcgacctctgggagtgaatcctacccttcccgtgtactgaagatccagcgtttagttctcctttgatttcctctccctctggccacccctgcccccaatcgtaaaaggggtcagtctgctcaggcctgctttgatgggaccccgaaggccaggaaggaactggtcctgggttttctaagagctgggggcggatggaattctcctgcctgcgggtctttaaagactgaggtaacgcagtaggggagggaaaaagggagggcgaggggagaagggaagaaggggagggcagaggggaaagggccaacctgggtccggcgagggctgcggggctgggttttaggaaaagaagagctaagaggcgggtctctggggctagagggcgcccccaggcgctggaggggaaataggcagaggggcctctcaaacctgtcctaggaccctcgtacctctccgagctgcccccacacaaaccctggcgtcccgtcctgcgcgcgggcaccccgccctccctccgctccgcctacccccttcctgagcttgggcgggggaggagactcgggtttgaggaactggtgctgggtgccgggcgaggggagtcagacttcctgtccccgagaccaacgcgtgcgggccgaacccctccccccgccttcccccaacaatacaggacgccggggtccgcgccgcgtcctccctggtccccccgtccgattatgtctcggatcgaatccctcacgcgggcgcggatcgaccggagcagagagctggcgagcaaggtgggctcggaaacccctctcctttcgccgcggtc

SEQ ID NO: 2895 - DNA, 2300 bp, Homo sapien
tgtttgagaccagcctggctaacatggtgaaaccccatttcttctaaaaatacaaattatccaggcatggtggggtgtgcctgtaatcccagctactcgggaggctgaggcaggagaatcgcttgaacccaggaggcagaggttgcagtgagctgagatcgcaccattgcactccagcttgggcaacaggagcgaaactctgtctcaaaaaacaaaacaaaacaaaacaaaagcaaacagtgtcttactctgtcacccaggctggagtgcagtggcatgatcatagctcactgcagccttgaactcctgggctcaagtgatcctcccacctcagcctcccaagtagctgggactataagcacgtgccaccacacccggctaacattttgtttttttgtggagacagtgtctcgctatgttgcccgggctggtctagaacagctgggctcaagcaatccacccacctcagcctcccaaagtgctggctgagccaccgcacctggccttttttgagtctcccaactggtcacgtgccctcactcctttaacagcctaaagccttttgttgaaacttctcttgtggcatttggcatatgtgagccagttatggagtcatctgtgatttgttcttttgcttgttcacacacacacacacacactcacccactcactagactctgattccttgaggataggaacaatatctatttctctttgcttggctttctgctatataagtcctcagtaaatggaataagaaggagacaatgaggatctctttatgtactagaaaggacactgaactgggatccagaaaacctaagttctagccttgagtctgcagctaattcacaatgtgaccctgaggtcacaatgtgtcacaatgtgaccctgaggtcacaatgtgtcacaatgtgacacattatccagttatgtgtctcagtaaagtgagtggtggctaggcactcctaagtccagctgactgtgacacacttctagtcccaaggtttcagagttctagaaccctgctcactcttatttcctgctgacgcagactggtctgtgtgtgtctcccacgaacagagccgtcccagacgtgttctgagcaggtggagacaaggtgcccgtgaggccacactggcctctgcctttctgcagttgaatccagagaacaactggaggaagaagagatggggaaataaaggaggggaatggctcgcatgctgtacccctccaaaggtcaggggctttccgggcccacggccgaaaacaaagacgtcttcagaagacatagttgggggcctggcagggagctcgagggcccactgaatacgtaagcccccaggggacctcctgtacctccttccttccaggcctagaccttggagaaaatgggaaagtgggaaggaactagataactctctagtcatctccctcaagagacaaccatccgaagaacaacaagaatcaaggagacctgggccctcagtcctttccctggagaaccagagctcaatcccatttgtgggcctttgggggaggatggatgctgccttccaaaatatgcctctccacagtggctcttacctccttctctcagggaagactgagggtgggagtgggagggaggtgtggagtcagggggagtatcaggacactggatcttcttgcttctgcctcccacggtgggtttcatagaaccacataatggtgtaatagaaccacaaaggaactcagagagcatatggcacaatctcctcattttacagataaggaaactgaggcccaaagaactttcagagatttcttgagagaggtggtctcacggttgggacatttggcctgccccattgccaggcctttgccgggcttttggttgcaggctgaggacaacccaggatgtcttggattaactcatggtcccgcattgccacatgagatcagttgttcttgctcagacttctgcataggcttggtggactggagcagagagatcatctcttccccctcccttggaaaacccctgaccacttccccaaagtcagaggaagtcagaaagagaaggtccgggggtcagcatgaagagttcagtgtgagtgaacattgtaggggctgctggccatggaagggcactgtctctctgctttgacaatggtccccttgaacaagttcctttagctctggtgagtgaaccaaccttccctagctcccgggcagggctggctggtttcagtgaggggagaggaccctgggccttgtccctgaactggcttgggtgggaactcagatgagaagcaatg

SEQ ID NO: 2896 - DNA, 2300 bp, Homo sapien
tttagtccacaggttgaaaggctgctacaactttagcttcatctctttccgttccttaactcttgagccagtgctagcaatgtctcccacactgtggtcctgcgccctctcaaggctggttatttcaacttcacctcggcaacaattacttacctggcccaggaggatgggcccgttgtggtgagttgcccaaacccttagctggatggaatttggatctgccttcccttaaaatctcttgtggtgggggtaagagggggatgaagagaggttgattaatagataccaaaatacagttaggactgggcgcagtggctcacacctgtaatctagcatttttggaggccgaggtgggcagatcacctaaggtcaggagttcaagaccagcctggccaacatgcagaagccccatctctactacaaatacaaaaattagctgggcgtggtggcaggcgcctgtaatcccagctacttgggaggctggagcaagagaatcacttgaacccaggaggcagaggttgcagtgagccgagatcacactactgcacttcagcctgggcgacagagtgagactccgtctcaaaaaatatatatatatagttagaaagaataagacctagtgttcgatagtttagtagggtgactatagttaacagtaatctaatgtatatttcaaaatagccagatgagaagcatttgaacatttccatcataaagaaaagataaatgcggccagacgtggtggctcacgcctgtaatcccagtactttgggaggccaaggcaggtggattgcttgagcccaggagttggagaccagcctgggcaacatggtgagacccccatttcaaataattagccaggcatggtgcacgtgcctgtgatcccaggtactcaggaggctgaggtgggaggattgcttgagccccagaggttgaggctgcagtgagccattttattgccactgcattccagcctgggcaacagagtgagaccctgtctcaaaaaaaagataaatgtttaaggtgatggatatccatctaaaaagtatagattgtaaaaacaaaaacctcttacagaaaatttacacagtagctactaaattctgagggagataacattaaccagacacttggtattgtcctaaggaagtatgtttcaaattaaagttctggactagagtgattgaaatggatgggagaggtgtaccatggccttccccttctcttcattccttctgccttccttttcatctggagtgtgtcatttgctgcctactgatgtccttgtctttctgatctgtcttctctgccactgtcagattcttcccagtctccactgttactctctccttcccttgcttagattgctcctgcttacggcatcagggctgagcttttctgcctctcactgcacccccctccagtagtctagctattttctgcctccagccttctctcccactctgcccatacagaccctacatcctaattaggccaagctacttcccataccttctcccccaactcagtccttattctttcctttgtgcctttgttctgtttgaagtacccttttccctccactccattatatctgaagccttctcaagacccagctttgagctatgtctccttgttttctgccttcagttcatattgctctttgctattcattcttttcttttttcttttctttttttcttttttttctttttgagacagagtctcactctgtcacccaggctgcagtgcagtagcgcaatcttggctcactgcaacctccacttcccgggttcaagcgattctctgcctcagcctcccgagtaactaggacaacaggtgtgtgctaccgtgcccggctacttttttatatttttagtagaaatggggtttcaccatattggccaagctggtctcaaactcctgacctgtgatccgcccgcctcggcctcccaaagtactgggattacaggcgtgagccaccgtgcccggccactattcattctttcataaacatatattgactgcatctaaacttctgtagcacttatagtctatggcacttgaacatttaatcactgtcttcagtagtttgtttcttatttatagatcttccctctccccacccccacctcccaatttaattataaactccctgaggccagtaactgtcttagatttctttttcccatatatgatagaaactcagtagtaaacagtcttttgattgatgtaaaggtcaatagacatttatgaagcccctgcaatgtgccagactctggggaataccaagaggatta

SEQ ID NO: 2897 - DNA, 2300 bp, Homo sapien
tccagcctgggcaacacagtgagactctgtctcaaaaaaaaaaatttctccaatcagcagacgtttcttgagcactttctttgcccttgaaaaagtgtacactacagaaataggacctaatcattaaggtacatttttctttttcttttttaagacggagtcttgctctggcaccaggctggagtgcagtggtacgatctcggttcactgcaacccctgcctcctgggttcaagcgattctccaacctcagcctcctgagtagctgggattacaggcatgcgccaccatacccagctaatttttgtatttttagtagagacggggtttcaccatgttggccaggatggtctcgatctcctcacctcgtgatccacccgcctcggcctcccaaagtgctgggattacaggcatgagccactgtgcctggcctaaggtacatttttcaagccagaaacaattaaaggaaaacaaataaactgttgtgtgtaaaagagctcaaagccaaggagggcttcccagagaggacaagaccagaacagggtcctgaaggattggctggatttggataagaaagagaggcagtaggacatttcagggaagccacacaccaaggcctgaagtcagagcagattggaggttgtatgtagagaagtcattattaattcctggactacttcctgtgtgctcaggcaagacactaagcaacgggaaatggacaaccttttctcaagaagctgcaatcttggaggtggagaatggaaggacagatactaaggcagatacaggcaatgtgtattattctacaagaatgtaacccccagaaagtagaaaccatatctgtcctatttatcactgtatctccagaacctacagcagcaccaggaacaaagtaggtgctcagtaaacgcatattgaatgcaggaatgctacaagggaggtatagaataacagcaatactgataattaccatttactgagcacatacatgtgccaggcactgtactaagagttttacatacatcatcttatttgatactctaaccttttgtgagtgctataattatcttgttttacagatgtgggaaccaaggtgttatataagtaatgcttgttcaaggttacctaaccagtaagtgacagaactgggattgaattcatgactgcctaacttcacagttcatcctctgaacctaagatctactgttcaaaatgctgttttgggaagtttggcagctgattaaaaagtgcagggaggccgggcgtggtggctcaagcctgtaattccagcactttgggaggccaaggtgggcagatcacttgaggacaggagtttgagaccagtctggccaacatggtgaaacaccgtctctactaaaaggacaaaaaattagccgggcaggtggcacactcctgtaatcccagctactggggaggctgaggcaggagaatcgcttgaacctgggaggcggaggttgcagtgagctgagatcgcgccactgcattccaccctggggtacagagcaagaccctgtctcaaaaataaaataaaataaaataaaataaataaaaataaaaagtgcaggaaagacctaagatagaaagactactagagtaaaacccacatccagaaaccagcaagaactgaagcagttatagtaggaatggagaaaaaaagatctacttttttggcacttcaaagggcttctaaataaagctcagggctcggtgacctgctggatgtagggaatgtctatgtgtcttgtctgagaatagaaaaaatactggttggaatagcttttctctaattctctgttcgacagtactagttgacattttagatagatgatccaaatttctaggtttgctagtttcccaaagcacctaatgaggtgcgggtcacatacagtagtgaaaaatcagcttgaaaagccccccaaagagggccgaataagaagcctggagaacgcacaaacctcttaggagcgctcacagcctctcaggcaggcgggcactacaaagggaaaggtggggcttctccaagaactacaactcccacaaggcattgggcggaacaccacggtttccggccagtgcttatttccggtctttcggatgctgacgctctcttcctgtctttgtggctccggaaaggcgtttgggatgccaacggtaagtccggaggcttagggcgtccgaacgggagaggcgagagcctcgtgtccgcgcatcaccccgtggctgggggttagctaggggagggcgggaagggcagaggacgcggtggctggaggacgtgtaa

SEQ ID NO: 2898 - DNA, 2300 bp, Homo sapien
tgcagggcttgccatgtacagaagaacaggttatgcactgcacaaccctagaggatgctccatttatctggactatgactgtacacatggcctgggggatgtcttcagcagatgctctaatttctctgcactctgggggatatcttgattgggaaagttccttccctctgtgtgttttagtttccttatttgtaaagtaaggactggaacttgatccatgattttaaaattgtgctcctgcatcctggaaaggtcttcatctccaggatgaggaaggacccaatgggagaggctgcagccctcctgccccagctccagccagaccattaacacacttggtttctgagtgagatttagcatgaggaaagggtctctgctgctaagacaagtttgatctagatgatatttaatcatttctttccaaattggacataatttgagcttatggcaggaacagtccagagaggcataaatcagacccagttcctagctggcttgtccttatcaagtaaatggaaaaggggccaggccaaagcagggcaagatgaccttggacttgggagagacttggactcatgccacaatcctagggtgcccactggaccattgcttttctgagttttgtagtcattcggtgtctgaagtaaggtagattgaagtgaggccttcggtttccatctggaccctttctctcctgttttctttttttccgccttgtcctagggatgttcaatagcccagaaatgcaagccctcctccagcagatctctgagaacccccagctgatgcagaatgtgatctcagcaccctacatgcgcagcatgatgcagacgcttgcccagaaccccgactttgctgctcaggtatgaaaccagcatgaggagagtattgttggggagagagttcctcttggttgggggcagtttcttgtggtcaaaacactgtggagccagactgcctgggtttgcatcccaagctctgctgcttcccagctgtgtgagttaagcaagttatttagcctcccagtttctttatctgtaagatgataataacaatagttcctacctcctatagttgtgaggattaaatgagttaatacacgttaagtgcttagaacatggcgtgtgacagagtaagttctgtatacctggaaatgttagctgtcctcatcatcatcagacccagggctgagcaggctgactcctcatactcttcattacccagagcatagttccatttcctctcactgtcccacttaggccttcaggatactttgagatccccggagaagctggccagatttcctgcagtggtagggggtgcccagggagtctgaggctgtgggggaattcttagggtgaaaaggcccaggtctccccctgctaccttcaccctggcagatgatggtgaatgtgccgctcttcgcggggaacccccaactgcaggagcagctccgcctgcagctcccagtcttcctgcagcaggtgagtgaggagcctagatgggtggaggttgagggcaaggggtagtccctgaagcccaatgggtggaaatgaagttggggcagagcttgactctggactcctagttgaggttgtctcctctttcctgccacctcttgatgcctttctctgcttatttcccaccagatgcagaacccagagtcactctccatccttaccaatccccgagccatgcaggcattgctgcagatccagcagggactacagaccttgcagaccgaggcccctgggctggtacccaggtgagggtaggggggcaggagggcagcaaggttctagcaacttctccccttcaactcttctctctgccactctctcagcatcctttgtgtctctgagggtctgttttcctgtttcttccaactgcttttccttctggatctcacattctcatccctttcttggatgccatctcctacctcttggtctctcttgcctacagccttggctcctttgggatatcccggaccccagcaccctcagcaggcagcaacgcagggtctacgcccgaggcccccacttcctcaccagccacgccagccacatcttctccaacaggggcttccagcgcccagcagcaactcatgcagcagatgatccagcttttggctggaagtggaaactcacaggtacatgaggcagtgggggcaggtgctgggagcaccactttgatcctgggaggtttcaagggaagcaatagaatagaggcagtagggcaagcttgggagtcaggtcctgttctgccacttgctagccttgggcaggttactgatgctc

SEQ ID NO: 2899 - DNA, 2300 bp, Homo sapien
gtccaggctcttaactaaacacactgcctctcaatgagagccgttttcaaattcagctttgtagggaacatacagtatttaaattctgaaatttagtaattctatgtggttagggagggagcaaggatggagttagacttcccaaattctaccagcccctccaaaacacaacacaaaacaaaacacaacacacactttaagtaaaaacagtgcacttgttaagcagaggctgcttccagatccctctcttccaaccagatggcctatcttaagccccgcctatgtgaaattatggagcggccacagggggtggcgaacacaggcaacagtccgtcattcaacaagattttattgagcacctactgcacaccgtgtaaatctcagaagagctgagaaccaaatgtaaccacgtcgatttgaaagagtgggaaggatctgggcacagggaaatcctcccccgacagccccgtcgctcagagaacactgggcgttctctgaggcacagagtaggcgccggcgctctccgcctgcccccggcccgttctctcagttagcacctagcccgggcccccactccggcacactcccctcaaacccagggtccttcccccttcccggtgcaaggtgtcccctcctcactctccaccacgcccccaggccacaaggcaaaacccgcccctcaacacgcgccacgctcccccagatctcccctcgcagggcgccccctacccgcctctccttgccttcagctcctcggagtcccagccggcccccgccctcctctccggggccctccgggacgccggaccgtcagagaggccccccatctcttcgcagacccctcctccgcgctccccccgccccccgcctgctgtactacctccttgaccgaggctcgatcgcagatcacaatttcctccttgtccttgggggtcttgacggtgacccgaatggggggcctcgtctcggccccgctcggctccgccatgccgccgccgccacccggccgcccgccagcccgcccggctcctcctcctccccgcccgcccggccggcccggctcggcttctgcgcctccaacactcccctctctccacctctcccctcccctcccctcccctcctctctcctcccctcccctccccgaggcttcaccgccccctccggaccagccgcagccacagcgccccgggcggaccgggggggccactgcagcggggtccgcccagggccaagccccaggtccggagcccggccagggtctcgccaggcgggggcccctggggggcctctgggagggggaaggggcgtgcccttcattgcgggggcgagggcggactgccccgggagaccgcgacccaacgctgcccgcccgagccgtgccgcggtcccctccagcccaaagcctccccgccccctccgcggctaactcggctccgggacaaaggactttctgtgtcgccgctttatctccgttccctgtgataacttggtctttcttggaagcccaagtcccttccaggccaggggactttcccgacttggaggttgggttttcccaccaagcacgtccacctaggttctcagctctgggactgaccctatagccccgagggtcgcggcctgaatggtctattaagaacggttccagggagctgggttttggctgcgtggcctttcagagccttggtttcctcaagataataataatagtacctctcgcctcatcgcacagaattgtgcataacggagaaaactgttttgaaagtaaccaaaggcgtgcctgacaaatatgaggatgtagtataattattgaatcgtggactgccaagcggacacgttgattcctttctccccgaaggggttaaatgtccttccagcgctgctgctgtcctttcactcccgttcttttccgccccccaacaaccgcgtggtcggcttggaaaggcgaactataattcccagggtgcctcgcgaggccacaaagaactacgattcccagagccccccgcggtggggcggggttgagtcggaaccacaatagccaggcgaagaaactacaactcccagggcgtcccggagcaggccaacgggactacgggaagcagcgggcagcggcccgcgggaggcacctcggagatctgggtgcaaaagcccagggttaggaaccgtaggcatgctgcgccccaaggctttgacccaggtgctaagccaagccaacactggaggcgtccagagcaccctgtgagtgcagaccacggacccgagcggcgagcgctgcagtggggcggcgcgcggct

SEQ ID NO: 2900 - DNA, 2300 bp, Homo sapien
ggatgacaacactttgtgtttgcacgtcattctactgtttatacccattatttcatctgaccttcacaacaacccatgaggggagcggggagagggaaattattgtcttctccttaaacatgaggtaaggaagctgagagaggttaagcgacttacccaaggttccacaactgataagtggatggctgagaccagaacccaagtcagacctctcaggtccagggatccttcctcaccaccacttgatgaatagggtcctgcctattacaaatgctgctgcagaccaactcttagtaatcttccggagatcctgtccctgcccctccaaccatccaggatggggtccaggtcgcccccttgggatcccctttgggggacaggggaagtctggctcccctctccataccatgcagtccatgaggatgaatttgagattgtcttcattaaacgcttggttcccgttccggtcgtaggcggcccagatgttactggctatggcagcggtgacccgggcgtcagtgtccccgtaaccagagtaggccagcagtgatccctcgttattcagcagcctggtgaggggcggggagggatagcgatgtgctcagagcggggagtaaaacgtctgggtttccatcccaagtcccaccaagggcacatccagcaaggctctggcctgagcgtgtcccggaacatgccctaagcacccagcacaccggcttcccttttcgacaggggacctcccggccggtatccccagccgctgccccctctgccgcttcctcccttcctggtgatccttccccacccctccctcagggagccgcgcgccgccccactgcagcgctcgccgctcgggtccgtggtctgcactcacagggtgctctggacgcctccagtgttggcttggcttagcacctgggtcaaagccttggggcgcagcatgcctacggttcctaaccctgggcttttgcacccagatctccgaggtgcctcccgcgggccgctgcccgctgcttcccgtagtcccgttggcctgctccgggacgccctgggagttgtagtttcttcgcctggctattgtggttccgactcaaccccgccccaccgcggggggctctgggaatcgtagttctttgtggcctcgcgaggcaccctgggaattatagttcgcctttccaagccgaccacgcggttgttggggggcggaaaagaacgggagtgaaaggacagcagcagcgctggaaggacatttaaccccttcggggagaaaggaatcaacgtgtccgcttggcagtccacgattcaataattatactacatcctcatatttgtcaggcacgcctttggttactttcaaaacagttttctccgttatgcacaattctgtgcgatgaggcgagaggtactattattattatcttgaggaaaccaaggctctgaaaggccacgcagccaaaacccagctccctggaaccgttcttaatagaccattcaggccgcgaccctcggggctatagggtcagtcccagagctgagaacctaggtggacgtgcttggtgggaaaacccaacctccaagtcgggaaagtcccctggcctggaagggacttgggcttccaagaaagaccaagttatcacagggaacggagataaagcggcgacacagaaagtcctttgtcccggagccgagttagccgcggagggggcggggaggctttgggctggaggggaccgcggcacggctcgggcgggcagcgttgggtcgcggtctcccggggcagtccgccctcgcccccgcaatgaagggcacgccccttccccctcccagaggccccccaggggcccccgcctggcgagaccctggccgggctccggacctggggcttggccctgggcggaccccgctgcagtggcccccccggtccgcccggggcgctgtggctgcggctggtccggagggggcggtgaagcctcggggaggggaggggaggagagaggaggggaggggaggggaggggagaggtggagagaggggagtgttggaggcgcagaagccgagccgggccggccgggcgggcggggaggaggaggagccgggcgggctggcgggcggccgggtggcggcggcggcatggcggagccgagcggggccgagacgaggccccccattcgggtcaccgtcaagacccccaaggacaaggaggaaattgtgatctgcgatcgagcctcggtcaaggaggtagtacagcaggcggggggcggggggagcgcggaggaggggtctgcgaagagatggggggc

SEQ ID NO: 2901 - DNA, 2300 bp, Homo sapien
atatgttgctcaggctgttctccaacttctgggctcaagccatcctcctgcctcccaaagtgctgggattacagatatgaaccacttcgactggccagtgagtgccttttctattcttggggttgggagggtgcccctaacagcctagaacaagctatccctttcttcttcttccaggtgtttatgtgcttacacagaccctccccagatcttgaagccctttgtagacaagaggcctttgctgtgaggcctcaggtcctgtacagggagtagaagtaacccagacctcccaaaggccttcatctccagaccctgctcctacactcagaccactcaccccagctgtctgtttctgccccaggtctctgcctacccaatatccttaaagcaggtctgtatagggagctaccagcccccttccccagtgccatataaaggaacccatcccagagaagtgggtaggtttcgagtcccagctccacccaagatgagaaacactgcccatcccaggccctgggctgtcaaggaagggcagaagttactgtggccatgatactcccacagctctgcattgcagcagggtgactggtgttctatcagcccctggtctaatatcccttactctggttcccccagtgtacccccctaccagctctgaaggaaaagcaggccaagtgggtttcttcctttttttttttttttgagatagaatctcttgctctgtcacccgggctggagtgcaatggcacaatcttggctcactgcaatctccgcctcccgagttcaagcaattctcctgcctcagcctcctgagtagctgggattacaggcgcgtgacaccatgcctagctaatttttgtatatttttagtagagacagggtttcaccatgttggtaaggctggtcttgaactcctgacctcgtgatccgctggcctcggcctcctaaagtgctgggattacaggtgggagccaccgcaccaggcctctttttttttttgagacggagtcttgctctgtcgcccaggctggagtgcagtggcgcgatctcggctcactgcaagctctgcctcctgggttcacgccattctcctgcctcagtctcccgagtagctgggactacaggcacctgccactacgcctggctaattttttgtatttttagtagagacacagtttcaccgtttctaccatagagccagagagggccccctcctgtttttttatctcttaccaagacctcctggggctcctcattccttcaggatggtctcgatctcctgaccttgtgatccgcccgcctcggcctcccaaagtgctggaattacaggtatgagccaccgcacccggccttttttttttttttttgagaagcagtctctgttgcccagactggagtgcagtggcacgatctcagcccactggaacctctgcctcccggcttcaagcaattctcctaccttggccgcccaagtagctgggattgcaggcgcccaccaccatgcccagctaattttttttttttttttttttagacggagtttcgctcttgttacccaggctggagtgcaagggcgcgatctcgactcaccacaacctccgcctcctgggttcaagcgattctcctgtctcagcctcccaagtagctgggtttacagccatgtgccaccacgcccagctaattttgtatttttttagtagaaacggggtttctccatgttggtcaggctggtctcaaactcccgacctcaggtgatccgcccacctcagcctcccaaagtgctgggattacaggcgtgagccaccgcgcctggcctcaagtgggtttctgaggggctatttcttgctcattagttgggggaccggccctcaccacagattccagaagcccagcaatgcacactcagccctcagtgggctgtctctgaaggtcctgtccctttttcgcttcccccccgctggagctgcttctcccgcttgcgggagcccaggctgagagcagacacccaacctgtcgaacctgtctgacgtcatcatctctccacccacctgggccccaggtctccagccaccccgctcttcctgttctcagcttccgtcctctctgcttccttacagcacccccacctgccagagctgatcctccctaggccctgcctaaccttgagttggcccccaatccctctggctgcagaagtccccttacccccaatgagaggaggggcaggaccagatcttttgagagctgagggttgagggcattgagccaacacacagatttgtcgcctctgtccccgaaga

SEQ ID NO: 2902 - DNA, 2300 bp, Homo sapien
aggaggcaagggggctcagcagtgggctctggggggtggggatggagatcacagaagataaaaggtactgtaaacagaaacagcacaagccaggatatagtaacactgactagtactactaaaagcaggaatcattgccacttactaagcctttgctatgtgcccaggaagggacaagttactttacatttggcattttatgtaacccttaaagtaccacaggagtaaagtgctataattagttaatttctgtataaatacaaacaaggtgaaatcagggtggagctaggatgggggcgagctgcacggatcgagagcgccccctcacttccgcacaatgctctgcacttggcaactttcatctaaccacagaggaccaaaagctgaacccagcatctgcattttatgaagactcagaggacacacaggaggttaggcctcctgacaccacatccgaagtgtctcttaggccgggtgtgttggctcacacctgtaatcccagcactttgggaggccaaggtgggtggatcgcttgagctcatgaattcgagaccagcctgggcaacatggcaaaatcctgtctctaccaaaaatataaaaaattggccgggcttggtggtgcgtacctgtagtcccagatacttgagaagctaaggtgggaggatggcttgaacccgggaggcggaagttgcagtgagccgaaatcgccccactgcactccagcctgggtgacaaagcgatactgtgtctcaagaaaaaagtgtcagctgggcgcggtagctcacacctgtaatcccagcactttgggaggccgaggcgggcagatcacaaggtcaggagttcgagaccagcctggccaacagtgaaacccccgtctctactaaaaatacaaaaattagccaggcatggtggtgggtgcctgtaatcccaactactcgggaggctgagacaggagaatcactcgaacctgggaggtggaggttgcagtgagccaagatcatgccactgcactccagcctagcgacagagcaagactctgtctcaaaaaaaaaaaaaaaagaaaaagaaagtgtcttccagtcagtgtgaggcctaagcatgtgaaatggggtctgtttgtgtgtatatggggtggatagcacttgccagggggcaggaagcaagagtcaggggctttggttacacatgctcctcgttacctgatctcttatgagcctcagttgactcatcaatgaattgggagttagacatcactagtctgaagacatcccatccaactccaagagggagactggatgctttcagtgatgccttgaatggtcaggccagggactgctgcaagaggtaggcattcagctaatcctagaaagaaggccacgggagagaacaggccactgttaaggagccatgtgaggaagatcttgaaggtggcagagttggctaaagcccagatgtgcactggtggagagtaggggctaaaatcaggacgagaacctgagaaagtagaggggctggctgtgaggaagccaatagagattttagagcagggaggtgaaactttatttatttagttagttagttgagacaaattttcactcttgttgccgaggctggagtgcaatggagcgatctcagatcactgcaacttccgcttcccgagttcaagcaattctcctgcctcagccttccgagtagctgggattacaagcatgcgccatcatgcccggctaatttttgtatttttagtagagatggggtttctccatattggttaggctagtcttgaactcctcacctcaggtgatccacccgccttggcctcccaaagtgctgggattacaggcgtgagccaccgcgcctggccgagggaggtgaaactttacaggctccaagactagtgtccctggaaggcagaggagccttgggctgctctgttgggttctgggcccctggccgcaagtttctgtatttcctgatctctagtactctgatcccgggtgttccagcttgacggctctgctctgatgctgggtccaatgcctctgatcgtatctctgtccatccttctcattcccacccaggtactatcgtggtgcagtgggggccctcctggtgtttgacctaaccaagcaccagacctatgctgtggtggagcgatggctgaaggagctctatgaccatgctgaagccacgatcgtcgtcatgctcgtgggtaacaaaagtgacctcagccaggcccgggaagtgcccactgaggaggcccgaatgttcgctggtgagagcctgccactacccaggct

SEQ ID NO: 2903 - DNA, 2300 bp, Homo sapien
cccaacctactctcttcccctcaccccccaatctgccagcgttgaagaagcagccatctggagtggaggaaggaggaaaaaatgagctcacctcaggtctcaggttggagggttggggcagaggcagaaaagtaggaccacttggtttcggttggagagagaaggggaatagtgagttgtgctcagagaagggtgtgagtgggtctatatgtgattgggggtgaaagtcatgggtgcgggtgtgtataggaatgtgctgtttgtgtgctggggaggatggggatggacagtgggatgtatgaaaggccgaaacacagggacttgatgtgtgtgtgaaagaggtgtataaaagtgtacattagattggccccataagtattatttagataaaggcacacctcttaggtacatgtgtgtgaactcacacacgtgacgtgtgcttcccaaaagggtatgagtcttggaagctctgtgtgaagctaggagcagggaagaggaaggtgggtaaggaggagagggacttgtccagacccccaggtcggcagcttttagaaacagaatagcccttacttttctctctagccttctccctctttgtctctctttgtctcatttttcttctttctcttcctgcctttccctaacctcccagctttaactcacttctacttcaaagcaggagtgtgggtccaaaatacctctccctcaccgtactcagccccagcccagctcagctgtcttgcccccaggggacagggggacaagagtgacacggggttgggcactgttccctcacacagaagtttaactccatactcctcctttcctccttgaacttatgattgtcagacctttcccagtcccctacactctactcgttgctgcaaactcgctatgaatttgaggcccactgagagaaactactgagtggaaggcatgtggggcggtcatagagcagatagacttcagtggtccctgggtagtttggaggacacttttaatgatcaagggtcagatgagtagattatgaggttactgagcacattggggttctgtggaaagatcagggtcagtgacagatgtggggggtgattaagtgatttggaagtttgtgagtagccaggaatcagtagagaaattgaaggaagagcaaatgttgggagaaaggagtgtagtttgtgaatggatttgagttaccagcttgtatgggagggtcagtgattatttgggggttttgaggagtgaatgaatttggagggccctgaatggaactcagggaaagttagtacattttgaaatctgtggctgagagagacattaggcacatctgagatctgataaatggtttcttcaagtcagggtggactgtgtgtgcagcagtgggcatttcaaagggtagactgaagtgttcctgggaggctaggtatttgggtaaggatcaggaatttattggtcccagcacaaaccttgctgtgtgcgtttctttgtctctctccttccccgccctatcccaggctgcaagattaaggccttgagggccaagaccaacacctacatcaagacaccggtgaggggcgaggaaccagtgttcatggtgacagggcgacgggaggacgtggccacagcccggcgggaaatcatctcagcagcggagcacttctccatgatccgtgcctcccgcaacaagtcaggcgccgcctttggtgtggctcctgctctgcccggccaggtgaccatccgtgtgcgggtgccctaccgcgtggtggggctggtggtgggccccaaaggggcaaccatcaagcgcatccagcagcaaaccaacacatacattatcacaccaagccgtgaccgcgaccccgtgttcgagatcacgggtgccccaggcaacgtggagcgtgcgcgcgaggagatcgagacgcacatcgcggtgcgcactggcaagatcctcgagtacaacaatgaaaacgacttcctggcggggagccccgacgcagcaatcgatagccgctactccgacgcctggcgggtgcaccagcccggctgcaagcccctctccaccttccggcagaacagcctgggctgcatcggcgagtgcggagtggactctggctttgaggccccacgcctgggtgagcagggcggggactttggctacggcgggtacctctttccgggctatggcgtgggcaagcaggatgtgtactacggcgtggccgagactagccccccgctgtgggcgggccaggagaacgccacgcccacctccgtgctcttctcctctgcctcctcctcctcctcct

SEQ ID NO: 2904 - DNA, 2300 bp, Homo sapien
ccaggtgcccatcaaacgatatgtgagtagaaatggtaggagaggggagttcactgttttgtgaccctccatacctcgaaaatagaacaatcatttactgacattaaagcagcaaggatgtgggctggacaacaggtaggacttcataactgctaagaggtctgaagacaagaggaaacaagcaaattttccttcttaaggtcttttaaaagtgaggggagggtgtagggtgtggtggcttacacctgtaatcccagcattttgggaggccgaggcgggtggatcacctgaggtcaggagttcaagaccagcctggccaacgtggtgaaaccccatctctactaaaaaatacaaaaaattagctgggcgtggtggcaggtgcctgtgatcccagctactcgggaggctgaggcaggagaatcgcttgaacccaggaggcagaggttgcagtgagccgagattatgccactgcactccagcctgggtgacagagcaagactccatctcaaaaaaaaacaaacaaaaaaagtgagggagggtcccccaacctactctcttcccctcaccccccaatctgccagcgttgaagaagcagccatctggagtggaggaaggaggaaaaaatgagctcacctcaggtctcaggttggagggttggggcagaggcagaaaagtaggaccacttggtttcggttggagagagaaggggaatagtgagttgtgctcagagaagggtgtgagtgggtctatatgtgattgggggtgaaagtcatgggtgcgggtgtgtataggaatgtgctgtttgtgtgctggggaggatggggatggacagtgggatgtatgaaaggccgaaacacagggacttgatgtgtgtgtgaaagaggtgtataaaagtgtacattagattggccccataagtattatttagataaaggcacacctcttaggtacatgtgtgtgaactcacacacgtgacgtgtgcttcccaaaagggtatgagtcttggaagctctgtgtgaagctaggagcagggaagaggaaggtgggtaaggaggagagggacttgtccagacccccaggtcggcagcttttagaaacagaatagcccttacttttctctctagccttctccctctttgtctctctttgtctcatttttcttctttctcttcctgcctttccctaacctcccagctttaactcacttctacttcaaagcaggagtgtgggtccaaaatacctctccctcaccgtactcagccccagcccagctcagctgtcttgcccccaggggacagggggacaagagtgacacggggttgggcactgttccctcacacagaagtttaactccatactcctcctttcctccttgaacttatgattgtcagacctttcccagtcccctacactctactcgttgctgcaaactcgctatgaatttgaggcccactgagagaaactactgagtggaaggcatgtggggcggtcatagagcagatagacttcagtggtccctgggtagtttggaggacacttttaatgatcaagggtcagatgagtagattatgaggttactgagcacattggggttctgtggaaagatcagggtcagtgacagatgtggggggtgattaagtgatttggaagtttgtgagtagccaggaatcagtagagaaattgaaggaagagcaaatgttgggagaaaggagtgtagtttgtgaatggatttgagttaccagcttgtatgggagggtcagtgattatttgggggttttgaggagtgaatgaatttggagggccctgaatggaactcagggaaagttagtacattttgaaatctgtggctgagagagacattaggcacatctgagatctgataaatggtttcttcaagtcagggtggactgtgtgtgcagcagtgggcatttcaaagggtagactgaagtgttcctgggaggctaggtatttgggtaaggatcaggaatttattggtcccagcacaaaccttgctgtgtgcgtttctttgtctctctccttccccgccctatcccaggctgcaagattaaggccttgagggccaagaccaacacctacatcaagacaccggtgaggggcgaggaaccagtgttcatggtgacagggcgacgggaggacgtggccacagcccggcgggaaatcatctcagcagcggagcacttctccatgatccgtgcctcccgcaacaagtcaggcgccgcctttggtgtggctcctgctctgcccggccaggtgaccatccgtgtgcgggtgccctaccg

SEQ ID NO: 2905 - DNA, 2300 bp, Homo sapien
ccccactgtgggacagctcctcccccaccccacacctccccagcccagcctctttgcaatttccaaatcctgccccccacactctcctttgagaagccaggagagggaagggtccccaagatcccgtctgctcaatttggaccttcaccaacacccccactcacccacccagggatgctggagcagcagagggtgtggtaccagacatactacgctggattaattctgcaccccctcccaacacacccagacacacgccctccaccaaatttccaggtgaaggtttcttaccccccagcattccccctcctaccctgtcctactctttcactaccagagacccctctctaggcctctggcccaaggccgtggccagcccagaacaaaagccagagagggaagaggagaggtccaagccaggacgtagcacttccttggagacaccccttccaaaaccccagagacaatccaactttggggtgtgggtgaccacaggaccccctcctctcagcagcccccctcaccgcctcttccccaggctgggaccctcccctgggccacacccccttccattcctacactcagcccaacaaagagacagatactcagtctggcttcgagggccaggtctcccccaaagtctgtaactccaggcggctgggggccccagggatgccccctccccagcctaggagcagataccagagtacaggcttctgagtaactctttgcacattccgtcagtttttctggttaggagtggacaccccctcaggacagcctccctggattgggagaccgatcccctcccctttccctcttccagtgcgaggatatttctttgtctaaaggcagagtcctgggggaggaaggatctggagaaccgtcccgactaggggtaacggggaactttgtggcactttgaaatcagggtagggggcgggtccccctttgtggggaagggacagagccggaggcgggcaagaagggaagaaatgaactttccgcgctagggacgagggtgcccccactacagtccctctcagtggtcccggcgccccgcttaccttgcctgcccacgatctcggccacgtgctcggaggtgggcacgggaacacactccgtggtgttgctgctgcccttcaggcgcagctcggcctctttgtagagagcgcagagcttggcgtcgctcgcccctttgggggcggtggggggctggggcgtctgcgctgcgggggccgccgtcggggcggccgggggcgccgcgggcggcggcggcggggccggctgcgggggggcggccggctgcgcgggggcgccgccccccccacctcccccgtcctcgcccgccgtgggggcggggggctcccccaaacccaggaggcagagttgatcgagagccagctgaagggcgcgctcgtcttccagcagccctcggtccttagcgcttcccccgaaacatcctagttctccaaagcccccatttctttccattattccagataccactagactaggcatggcgaaacaaaagctgggggagagagagagggagagagagagagagaggtggtggaagggaaaagaggagagaggaggggaggggagaggagaggagggggtgtgtggggaggggggaacaaagaactggggaggggggaagaaagcgagatagaaagatagaccctccccctaagcccccctccccaaacaccctgtaacccgactcccctcgccccagcccccggggtgggggtggggggaaagagaagcaaaaccaagaaagcagatctcctctcctctccgggggtgacggggggcggggggctgcaggatctctgcccccacccctcccgcctcggacctgggagtctctagcccccgctgtccaggcgcccccgttaggctcccgcaccgagccccagtccgggagcggcgctcagtggcccccaatagagcccagccccttccagcgctcaaactcttttgttttaaatgaactggatggagcagcatgaaactgacgggaggggggcgcgccgggggcgcccggggcatgccgggagttgtagtttcccgcccttgggggcgcggggacaaattccttgacccgaggaggatagggatgtggccttcggtctttcctcgcagctccggggcaagctaggagtgggatggaagtcgaggtccctaattttttaaggggagggtgcggggagaaggggtagtatgcggaaacagagcgggtatgaagctggctaacgccgcgcgccccctcccaggacccgctcctgccccgc

SEQ ID NO: 2906 - DNA, 2300 bp, Homo sapien
cgggaacacactccgtggtgttgctgctgcccttcaggcgcagctcggcctctttgtagagagcgcagagcttggcgtcgctcgcccctttgggggcggtggggggctggggcgtctgcgctgcgggggccgccgtcggggcggccgggggcgccgcgggcggcggcggcggggccggctgcgggggggcggccggctgcgcgggggcgccgccccccccacctcccccgtcctcgcccgccgtgggggcggggggctcccccaaacccaggaggcagagttgatcgagagccagctgaagggcgcgctcgtcttccagcagccctcggtccttagcgcttcccccgaaacatcctagttctccaaagcccccatttctttccattattccagataccactagactaggcatggcgaaacaaaagctgggggagagagagagggagagagagagagagaggtggtggaagggaaaagaggagagaggaggggaggggagaggagaggagggggtgtgtggggaggggggaacaaagaactggggaggggggaagaaagcgagatagaaagatagaccctccccctaagcccccctccccaaacaccctgtaacccgactcccctcgccccagcccccggggtgggggtggggggaaagagaagcaaaaccaagaaagcagatctcctctcctctccgggggtgacggggggcggggggctgcaggatctctgcccccacccctcccgcctcggacctgggagtctctagcccccgctgtccaggcgcccccgttaggctcccgcaccgagccccagtccgggagcggcgctcagtggcccccaatagagcccagccccttccagcgctcaaactcttttgttttaaatgaactggatggagcagcatgaaactgacgggaggggggcgcgccgggggcgcccggggcatgccgggagttgtagtttcccgcccttgggggcgcggggacaaattccttgacccgaggaggatagggatgtggccttcggtctttcctcgcagctccggggcaagctaggagtgggatggaagtcgaggtccctaattttttaaggggagggtgcggggagaaggggtagtatgcggaaacagagcgggtatgaagctggctaacgccgcgcgccccctcccaggacccgctcctgccccgcgccggccggtcctgggggcccgcttttttatggaaatgaggagggggggccggggccgggggcggggagccgggagccgtccccgctcgctcactgcggctttctctctcgctcccctctccccgctccctgccgcgctcactctccgcttccccctcccgctctcccagagtcgatcccggagcccggccgcggggagaggttctcggcagagaagacaaagcccgcagcagcgatggggggagagctgggctctgcgtgttgtgggggccaggaaagggtgccaggctggggctggaaccccctggcaaaggatggggtcccctcatccctaaacagcaagccatctcccctcgcccgccccccgcccccccagtctcggagatctcagaggcaccgactgggaggtgagttagttcacgtccttctgctcggtggagggggtcgggagggcggtggagtgatgaagtgcagaggttgaaggagtgcagggacagaactgggggtcggacggagagtgggcaggcaggaaaagtcttaaaggcctggggtgacttaaccgtttggggtgagggccttgagctttggatatgacaggagggaggagagaccaggatggactgggaacccaggcttccttcaggcctgggctgtgaatacagcttggggtgatctgtcctttagcactcatcgtaatttccactctgtttcctccacctctctcccattgaaaacctattcagggccgggcgcggtggctcacgcctgtaatcccagcacttcgggaggcagaggcgggtggatcacctgaggtcaggagttcgagaccagcctgaccaacaaggtgaaacctcgtctctactaaaaatacaaaaattagccgagcatggtggcagacgcctgtagtcccagctactcaggaggctgagacaggagaattgcttgaacccgggaggcggaagttgcagtgagtctagatcgcagagtgagactccgtcccccccacaaaaaaacaaaaacaaaacaaacaaacaaaaaaacccattcagtcccgtttgactccggaaattcggtgagaatgaaaataagtttttaaggcttggagagtt

SEQ ID NO: 2907 - DNA, 2300 bp, Homo sapien
tgggaagctgagggtgggtgccacgccctgggggagagaagccatattctgggccccctcatccgggtgcatccctagtgctcaccatgctgcccaggcaccctcactgagatgagaactttccttgttcccctcccctaataaccaaagttcctgccttaatcccactccagtccctcatccaccccgaggccaggcttcagaacccagaactgagggcctgtccagccctgctttccttgtgtttgagggaagccctgatatcttggagctgtacaaggtagcaacataatttgatttccctggttgctcatcggaggataagctgtgggaggcagttgggcagggcatgcaggcagatgggacccaggcctcaatgctgtcacctcttagagaggataaggtgggacgggcatggtggctcacatctgtaatcccagaactttgggaagctgaggcaggcagattacctgaggtcgggagtttgagaccagtttggccaacatggtgaaaccccatctctactaaaaataaaaataaaaaaaaaattagctgggcttggtggcaggtgcctataatcccagctactcaggaggctgaggcaggagaatctcttgaacccgggaggtggagattgcaatgagctgagatcatgccactgcactccagcctgggtgagagagcaagacttaatctcaaaaaaacaaacaaacaaacaaaaaaaacaaacaaacagaggatgaggtggatggtgggaccaggataggggccaggatgaggggaggggagtggaaggcttatcaaaagggtccttggtgaggcctgaggatggaggctccagagcctgaggtagcgaaccctggggacctgagtgatctcgttttgtgagagagcctggcccctccccagagccagctgcagaatggacctggccagagaggaaagtagagatgagtatggtgctggcctttgcagccagcaaggctgtggggtctttgctgttcctgtcccccactaccttcttgccccccactaccttctttctggctgaaaccaggatagagacccaatattggctgtccagcccccagccctgcttcccctttcaggcccctctgggaaccacagaaatctgggacctagtgtcttggcaacgtaatgaatgcatgcacagctctggtatctgttttaaattatccattaaaataagtacagttctgggggaaaaaaataagttgactgggtgcggtaagcagtagaaagggactgaagggggaaggaacccaggcagtgcttgggtccaaaggaaggggacaggagatggaaggggcagtgcctggctcctattcttggctttctttaggggacttctttaggggactgtggcttgttgcttgggtctaaaaacgaatgcttggctttgaagagagatagattggggcaaaagaaagaaaaaaagggaccccccaaactccttgatccctggccccaaactgggggcataaaggaactcaggttccagaactttgctccccccagggaacccaggcattccttctccaccccactcctggcacactgagatgcagctctgaatgggctgcccacgtgtggaggggggttggggtgactcactattactactgggaggacagggggagccagtggtggaagaagggtgagtcacactgatgggcaccagcctcagccctccccccactttcctggctcccagccctgcctacctgaccctctcccttgctttgcgcccacttccctctctttctccccgacccttttgcccacccactctccctccttggctctgccctctagcccagaaggtctgaggcaatgggggcaagcttggagccgacagtgctgagcaggcaggagccaagagaggggaagcttgagcctcacgcagttaggggtgcgctggagagggtggggcccgactccgccacaccccaacggtccttccccctcctcaccactcccgcccccacccccaatggatctgggactgcccctttaagagtagtggcccctcctcccttcagaggaggacctattagagcctttgccccggcgtcggtgactcagtgttcgcgggagcgccgcacctacaccagccaacccagatcccgaggtccgacagcgcccggcccagatccccacgcctgccaggagcaagccgagagccagccggccggcgcactccgactccgagcagtctctgtccttcgacccgagccccgcgccctttccgggacccctgccccgcgggcagcgctgcc

SEQ ID NO: 2908 - DNA, 2300 bp, Homo sapien
acgcccaagggaagcgtgtggaagcagagccatgcctgctgtgggtgcacatgcccgcgtgagggagtcggggtgtttcatcctggggcacctgtgggcttttgaggtgtatgatattcagaacttcacaggttggggtttggggaaggctcaaggggcttctaagtccctggaacagctgcccccctcagttcctctctctctctctctttttttttgagatggagtctcgctctgttgcccaggctagaatgcagtggcgcgatcttggctcactgcaaactccgcctcctgggttcaagtgattctcctgcctcagcctcccaagtagctgggactataggtgcccgccaccatgcctggctaatttttgtatttttagtagaaatggggtttcaccatgctggccaggatggtctcaaactcctgacctcgtgatccacccaccttggcctcccaaagtgctgggattacaggcgtgagccactgcgcccagcctcagttcctctctttaaggtctcctttccagagagggatagcacctcaaatgccagggaggggaattctccacatcctgcccttacccgagttgtggcagacccacagactagccaagaaaccaagcagtggttactttgccgggttgggggggaggtaggggctatcaaacctcatgattggccgcacacaaaggtgtgagtatgtgtatatttgagggtgggtgggagtggcactttcactaggcctccgtatcactctctgactggggtatctcccagcaagcgagacagaggcagacacgcttcccagactgtcttactgggtctctctgtgttattctctgcagtgtctgtgtgtatcgtgccattttctatgttttgcaccaatctgctgtgagtgtcctcaggtgacctgggggcaggtttttagtgcctgagcctacccgtctccaggctttagtttccccctgtaaaagtataggagttggttcaagagaaggttcctctagaagccttgagcctgtgaaccgtctagtctccgggtatttgtgggacacacagaaaaagccccacgacccaacaggtagaacactggctgaaatcagcagggcagagctgagacaggctcaagtaggctgaggggtagggaggttttgggtgaatgggagggagggacagagagaaggaggatatattgcagtaggaggagttgctggaacaaaaggaggggtggtaggagtggcttggggtggcagcagaagacgccctgtcacatggcgggaagtcagcctgggcagaggtctaggtgtccaggaggggctgggtgtggtggctcacgcctgtaatcccaggactttgggaggctgatgcaggaggatcacgtgaggtcaggagttcaagaccagcctggccaacatggcgaaaccctatctctactaaaaatgccaaaaattagctgggtgtggtggcaggcgcctgtaatcccagctactctggaggctgaggcacaagaattgcttgaacctgggaggtggaggttgcagggagccgagatcgcgccactctactctagcctgggcaacacagtgagactctgtctcaaaaataataataataggggctgggcgcggtggctcatgactgtaatcccagcattttgggaggtggaggcgggtggatcacctgaggtcaggagtccgagaccagcctggccaacatggcaaaactccgtctctactaaaaatagaaaaattagctaggcatggtggtgcaggcctgtaatccagctactcgggaggctgagaagcaggagaatcacttgaacctgggaggtgaaggttgcagtgagatcacctgggcgacagaatgagactccacctcaaaataataataatagtaataataataaatgaaaaattttaaaattaaacaattaaaaattttaaattaaaattaaacaaattagatgcccaggaggatacaggagagcatttgccaccaggcggactccctgtacccacccggccacagggggcgatgttcctgggagacaggaaatgcccaggggctgggagaccctctgctcttctgctcccttcctgtgtgctgcctggcaatggggaactctgagggctggtgagcagggctgctgaggagtgggtctaaggagtccctgcagggctgggccagctcctccacctcccctttgtcttcccctcccacttgttatttttagctacagtgtctgtccctcttgcttctcccccagattgggagaggaaacggaggcctctccctccg

SEQ ID NO: 2909 - DNA, 2300 bp, Homo sapien
atttttgtatttttagtagaaatggggtttcaccatgctggccaggatggtctcaaactcctgacctcgtgatccacccaccttggcctcccaaagtgctgggattacaggcgtgagccactgcgcccagcctcagttcctctctttaaggtctcctttccagagagggatagcacctcaaatgccagggaggggaattctccacatcctgcccttacccgagttgtggcagacccacagactagccaagaaaccaagcagtggttactttgccgggttgggggggaggtaggggctatcaaacctcatgattggccgcacacaaaggtgtgagtatgtgtatatttgagggtgggtgggagtggcactttcactaggcctccgtatcactctctgactggggtatctcccagcaagcgagacagaggcagacacgcttcccagactgtcttactgggtctctctgtgttattctctgcagtgtctgtgtgtatcgtgccattttctatgttttgcaccaatctgctgtgagtgtcctcaggtgacctgggggcaggtttttagtgcctgagcctacccgtctccaggctttagtttccccctgtaaaagtataggagttggttcaagagaaggttcctctagaagccttgagcctgtgaaccgtctagtctccgggtatttgtgggacacacagaaaaagccccacgacccaacaggtagaacactggctgaaatcagcagggcagagctgagacaggctcaagtaggctgaggggtagggaggttttgggtgaatgggagggagggacagagagaaggaggatatattgcagtaggaggagttgctggaacaaaaggaggggtggtaggagtggcttggggtggcagcagaagacgccctgtcacatggcgggaagtcagcctgggcagaggtctaggtgtccaggaggggctgggtgtggtggctcacgcctgtaatcccaggactttgggaggctgatgcaggaggatcacgtgaggtcaggagttcaagaccagcctggccaacatggcgaaaccctatctctactaaaaatgccaaaaattagctgggtgtggtggcaggcgcctgtaatcccagctactctggaggctgaggcacaagaattgcttgaacctgggaggtggaggttgcagggagccgagatcgcgccactctactctagcctgggcaacacagtgagactctgtctcaaaaataataataataggggctgggcgcggtggctcatgactgtaatcccagcattttgggaggtggaggcgggtggatcacctgaggtcaggagtccgagaccagcctggccaacatggcaaaactccgtctctactaaaaatagaaaaattagctaggcatggtggtgcaggcctgtaatccagctactcgggaggctgagaagcaggagaatcacttgaacctgggaggtgaaggttgcagtgagatcacctgggcgacagaatgagactccacctcaaaataataataatagtaataataataaatgaaaaattttaaaattaaacaattaaaaattttaaattaaaattaaacaaattagatgcccaggaggatacaggagagcatttgccaccaggcggactccctgtacccacccggccacagggggcgatgttcctgggagacaggaaatgcccaggggctgggagaccctctgctcttctgctcccttcctgtgtgctgcctggcaatggggaactctgagggctggtgagcagggctgctgaggagtgggtctaaggagtccctgcagggctgggccagctcctccacctcccctttgtcttcccctcccacttgttatttttagctacagtgtctgtccctcttgcttctcccccagattgggagaggaaacggaggcctctccctccgggcctagcctgttgcccccagcaaccgggcccaaacaggcctgtggccggccctggcttccatatctggcatcagagttgggctgagcagggtgactcagagggtgggtcagcgcctggcccggtgcccacctagcccctttgctgtgctggtgcctttcttccccaaacagccccaagggcccgggcctgctgcagctggggagccggacttccttgtcccaccaggcacagctcttcagacccctgccttgggtcacatttgcaagtgccaactctcatttctaccttattcttttcctctctgttcccctccccaccccctctcttccctctttctgagatcagatttgccagtgatgggaag

SEQ ID NO: 2910 - DNA, 2300 bp, Homo sapien
ctccagcctcccagttgtacccttcccccagcccttcctggatgcactgatcagcctgtgcttccttgccctgtttttctttataaatagagccatgttctcctctctctctctctcttttttttttttttttttttgagatggagtcttactctgtcacccaggctggagtgcaatggcacgatctcagctcactgcaacctctgtctcccaggttcaagcaattctcctgcctcagcctcccgagtagctgggattacaggtgcccaccaccatgcccagctactttttggatttttagtagagacagggtttcaccatgttggtcaggctggtcttgaactcctgaccttaggtgttctgcccgcctcagcctcccaaagtgctgggattacaggcgtgagccaccacgcctggcaagacgtgttctctctatgttgttgaggctggtcttgaactcctggctgcaagagatcttcctgcctcagcctcccaatgtgctgggattataggcatgagccaccacacttagcccagcctgtgctttcttaaatgaaaatctaagcatacggctgggtgtggtggctcacgcctgtaatcccagcattttgggaggccaaggtgggcagatcacgaggtcaggagatcgagactatcctggccaacatggtgaaaccctgtctctactaaagatacaaaaattagctgggtgtggtggcccatgtctgtagtcccagctactcgggagactgaggcaggagaatggcatgaacctgggaggcagagcttgcagtgagctgagatcgcgccactgctctccagcctaggtgacagagcgagactccatctcaaaaaaaaaataaaaataaaaaaaagaaaatctaagcgtggtgctcccctgctcaaacatcctcaggttcttttcatggcagataagggcatctcttcatgagccagcccctgcctactgacccagccacctctcccatcccttcccaccccgtacttcaggcttcagcagtactgatctttccaaagaccccagaacacacatgccttcatacctctgtgcctgtacatgcttgtttctgcccttgaaatcatgacagtagctctctgtaggccccgctagcctgtcccttgggtcttagcctcttggaggccttcccagagccccccaaaagtaccccaggcatactttggttccttctctcatgtcccctcagtactttgcacatacctcctttatagcagttgctatgttgtgccagagaagggagtcctgtggctggggggcatatatcttttctttttgagacagagtctagctgtgtcacccaggctggagtgcagtagtgcgatctcggctcactgcaacctccacctcctggattcaagcgattcttgtgcctcagcctcctgagtagctgggactacaggcgtgtgccaccatcatgcctggctacttttttgtattagatatatattttctctcttagcacagtacctaccaagagtgagtgagtagatgtcctgacccctgcaggcatccaaggccctccttccctggacctgtttccacatgtgtgaaggggtgcacaggcagcagcccacctctcagcttccttccagttcttgtgttctgtgaccccttttcctcatctctgcctgcttcctcacagcttgaggcagccctaggtgaggccaagaagcaacttcaggatgagatgctgcggcgggtggatgctgagaacaggctgcagaccatgaaggaggaactggacttccagaagaacatctacagtgaggtggggactgtgctttgcaagccagagggctggggctgggtgatgacagacttgggctgggctaggggggaccagctgtgtgcagagctcgccttcctgagtcccttgccctagtggacagggagttgggggtggccagcactcagctcccaggttaaagtggggctggtagtggctcatggagtagggctgggcagggagccccgcccctgggtcttggcctcccaggaactaattctgattttggtttctgtgtccttcctccaacccttccaggagctgcgtgagaccaagcgccgtcatgagacccgactggtggagattgacaatgggaagcagcgtgagtttgagagccggctggcggatgcgctgcaggaactgcgggcccagcatgaggaccaggtggagcagtataagaaggagctggagaagacttattctgccaaggtgcttgctctcgattggttccctcactgcctctgcccttggcag

SEQ ID NO: 2911 - DNA, 2300 bp, Homo sapien
aggccccgctagcctgtcccttgggtcttagcctcttggaggccttcccagagccccccaaaagtaccccaggcatactttggttccttctctcatgtcccctcagtactttgcacatacctcctttatagcagttgctatgttgtgccagagaagggagtcctgtggctggggggcatatatcttttctttttgagacagagtctagctgtgtcacccaggctggagtgcagtagtgcgatctcggctcactgcaacctccacctcctggattcaagcgattcttgtgcctcagcctcctgagtagctgggactacaggcgtgtgccaccatcatgcctggctacttttttgtattagatatatattttctctcttagcacagtacctaccaagagtgagtgagtagatgtcctgacccctgcaggcatccaaggccctccttccctggacctgtttccacatgtgtgaaggggtgcacaggcagcagcccacctctcagcttccttccagttcttgtgttctgtgaccccttttcctcatctctgcctgcttcctcacagcttgaggcagccctaggtgaggccaagaagcaacttcaggatgagatgctgcggcgggtggatgctgagaacaggctgcagaccatgaaggaggaactggacttccagaagaacatctacagtgaggtggggactgtgctttgcaagccagagggctggggctgggtgatgacagacttgggctgggctaggggggaccagctgtgtgcagagctcgccttcctgagtcccttgccctagtggacagggagttgggggtggccagcactcagctcccaggttaaagtggggctggtagtggctcatggagtagggctgggcagggagccccgcccctgggtcttggcctcccaggaactaattctgattttggtttctgtgtccttcctccaacccttccaggagctgcgtgagaccaagcgccgtcatgagacccgactggtggagattgacaatgggaagcagcgtgagtttgagagccggctggcggatgcgctgcaggaactgcgggcccagcatgaggaccaggtggagcagtataagaaggagctggagaagacttattctgccaaggtgcttgctctcgattggttccctcactgcctctgcccttggcagccctacccttacccacgctgggctatgccttctggggatcaggcagatggtggcagggagctcagggtggcccaggacctggggctgtagcagtgatgcccaactcaggcctgtgcctccacccctcccagtcaccacagtcctaaccctttgtcctcccctccagctggacaatgccaggcagtctgctgagaggaacagcaacctggtgggggctgcccacgaggagctgcagcagtcgcgcatccgcatcgacagcctctctgcccagctcagccagctccagaagcaggtgataccccacctcacccctctctccaggggcctagagtctgggccggatgcaggctggaagcccagggttgggggtgggggtgggggtgggaggttcctgaggaggagagggatgaaaagtgtccccacaaccacagagaagggtcgcaggatgtggagtcagatggcctgtgtgctgtttctgtacactcttacctcaccttcacttctcagggctttggttttcccattcgaaaatggaggctgttcttaatctccctaactcagagttgccacaggactctgcaatgtgaggtgttaaaagcatcagtatttttctagttggctgtgctatttgtgacaggagaaaaagtctagcctcagaacgagaggtttcagttagacaaggggaaggacttcccagttgccagccaagactatgtttagagcttgtgatgttcagagctggctctgatgagggctctggggaagctctgattgcagatcctggagagagtagccaggtgtctcctacaccgacccacgtccctccttccccatacttagggcccttgggagctcaccaaaccctcccaccccccttcagctggcagccaaggaggcgaagcttcgagacctggaggactcactggcccgtgagcgggacaccagccggcggctgctggcggaaaaggagcgggagatggccgagatgcgggcaaggatgcagcagcagctggacgagtaccaggagcttctggacatcaagctggccctggacatggagatccacgcctaccgcaagctcttggagggcgaggaggagaggtgggctggggagacgtcg

SEQ ID NO: 2912 - DNA, 2300 bp, Homo sapien
gtggctatggccaccaccctggactatgtccctactctctcatcaagactatttagctcttttctggaagttttgattctcatatggcaaggccaggggaggcccccaaagtccggctgggtgacctggattgaagtggagccaggtaggatctataggctcccccattcccttgggttatttcagaaaggtagctccttccttctctgccacagagactggatccaattcccctaaaagggaagaaaataggggcagggacacaaggatgtccaatgggggtgtgagggcttcctgcagttcacctgcttccttcctgttatcatactagttcagggtcctctactccccaccatcttaatttcaaatcatgtgtcccagtcccaggggagagaagcctgaacaggcaggtcctttctgagtccccacagccgagatgcagagaggcagtgagggtggagtgtcaggaatcagtggggacatggcggccccgttcagggtccacttccgatttcagcacatgccatgccctccttgcttcaccacaaagcaaatgctcaaccaccaccccagctcagatatgaaggggaagcagtcttggtccatgaaaccctctacccagggccgacaccagcacactcatttccttcctcttaaaaatactatgaagtctggcggagccatgctgctcccaggcaggttaaaaagccattattttatggatgtgaggcagggagggtaaatgctctgcccagcatcacacagcaggctacaggcaaccaagcctgggatctagggcccttcgccccagactcatggtgccttttctagtcccctgccagctgacagagaggccagcctggaaggggctttttcttttttcttttttttttttttttttgagatggagtttcgctctttttgcccaggctggagtgcaatggcatgatctcggctcactacaacctccgcctcctgggttcaagtgattctcctgcctcagcctcccgagtagctggtactgcaggcatgcgccaccatgcccggctaattttgtatttttagtagagatggggtttctccaggttggccaggctggtctcgaactcctgacctcaggtgatccgccagcctcagcctcccaaaatgctgggattacaggcgtgagccaccgcacccagccggaaggggctttttcaactcctcattttgccaacaaagttagggcccagtagagacataagggagctctagtaacaaggctgtttaggatcagggctgggagagggcacaggcttggctctcaaaaaggctccatacaaaccgctgcctgcctgtgctcctccccgaatgggaaagaatccggctgtcttctttccctatgtccatctagtctagacccttggaaagtcctgtctgaagtctgctctctacagcacaaaccttccccttttaatacatctcagagggtgttagccacagaaggcttctgggggagccaccttcttctcaggcagcttaggaaggagaggcagaacctgaacctggcagtggaccccctccctcagaagtcaggatactgtaaatagaagagggctccttggggttcttaacagagtctgtcccttggcttatttgcatagttgcatagatatttgtgggctcattcgtgtcctcattggcaaactgaatttgcatggggttgggctgcggtccagctgtgtcgccccggcatatacacagttcccggggtagagggaaacccagaggaactggttgtaaagaggaatgggccccagctgaccccctgaacccaggtggtgacatgtgcacggtggtgcctgctgaaggtgggcaagggagctgagcagggaccgggggctactgtacctccttttcacctcctcccgcatctggagcccctcctcctccacatgtgcgaatccaggagccacagaaggtggggcgcagtgggacatgggtaggaggaggaagaatatggggagattctagtccctcccacttagagatgcggtcgccatggtgactgaggaccagtgaggcgggatggggttgagaatgggggtgggggtgtggcaggggctgaggcactgagagaccggaaagcctggcattccagagggagggaaacgcagcggcatccccaggctccaggtaagggagcgggggagctgacagttctgaagggagggggcggggccattgtctggtgctggctctgccctaaagagggggctgacagaggggtcgggctattgtgtgtgatactcagcgcagcc

SEQ ID NO: 2913 - DNA, 2300 bp, Homo sapien
ttcaagaaggtttctgttccctctgaaacgctttattgacacaaataagcttgcccataagggccacgcttggggctgggcacagtgtctcacgcctgtaatcctagcagttttggagtctgagtcaggcggatcacttgaggtcaggagtttgagagcagcctagccagcatggtgaaaccccatctctactaaaaatacaaaaaaaattagccgggcttggtggcacatgcctgtagtctcagctacctgggaggctgaggcaggagaatggcttgaacccgggaggtggaggttgcagtgagccgagatcgcaccaccacactccagcctaggcaacaacagagcaacacttcgtctcaaaaaaaaaaaaaaaaaaaaaaaaaagcccactcttggtttaatgctgtgcggttgccctgttgaaagtcctcagaaatcaccccagagatctgatttcttagcctagagtagataaagctcactaccctcccagcccacccttgccttctctatccaagtggctcagaactgtggactggggcaggagggaggactgagggactaggactctgtagagtctttgtagctaagagatttgctattgaatgaggcagatctgaatttaacttggcttctagctgtgtaacctcccttcttgatctgtaaaatgggattatggcagtacctagctgctaaaattgttgggagggctaaagcctgatagtgtgaactattcatattggctagaggggctggggaagaggacgtccggagttgggagaattctggatgtctggaggaagaactgggggcagggcatggagtctatgacttccagaaaggtgggaataggacatcaggctgggagtgtagggctggaactcccccagcctccccgtatcagaactcttcccagtgacccaaatgagccaatctgtttaagcagagaggcccaggggcagactggcttcccaaatctgagctgggggttggggagacacagaaggtagggtctggataaatgggagtttctcttgattctaagaaactggaagggacctggcaaccagcctctgggagagtctgggggagtcctaggcaagtcttgacagaaacgattgtcaggcaggatatgtctgagaccaacccccggggaaactgagagagatgaaagaaggctgagtacctcagatgaggaattataaggagtagcctgagctgtaacatcccccatgttggctggtgctgtagcaggagggatggaagttacactacaggaaggacttcctgccagggaggaatgtgcatgtcagatggaagtggattatttattagagttggattagccctgggatgtctgtgctctttaacctgcagtcagctgaccatgtcgagtgggcaggaacctacccactttgtaggccacagagttcttggcgctggatgcctcattaaccccgcgttatgaggctccccctggagcctttagggaggggtgagcagccacctttgggggttgggtgcctccaaagtgtggtccagtgagcacgagttcagatgggaaatgttctgggctttctactggcctgatttctgggcttcctattggcctgatgtcaaagagtgatggagattagactgcaagggggacttcctcagcaaaatcatggataagagcctaatacaattattttattttatttttttaaagactgtggcccagctgagagtgggaggtttaaaggttagaccactgcagggacttcccagtaggtaggagtagagagaccccaccttgtgggtaagtgaaaagaagaatatgtcatgtcccctatctgggaaatcttaagcaagagaagaaaccactgctaggctggttatactggctgtgacatgatggagaggcaggggaatcgctgaaatgacctagaagggcctcttaaactttctggttggaccgagcagaggagggagagagaggtgtgtctcttgtgaggtgggtgaacgtctttttattccctcccaatccaccaacttccgcccaagccaggatctgtcacaactcgagaggtggaaattccggtttccctggcctagagctcccagtgctggctttggcatgatgggcacctggagggccgcactcccgttccagccaggctgagccttctgtcccctgcctctggggcctgggaaccccccttcttctttctcctgaatggcacccccgccctagaatccagacaccgagtttcccactgtggctggttcaagggtatgtgaggtgagatgggtgg

SEQ ID NO: 2914 - DNA, 2300 bp, Homo sapien
aggaatgtgcatgtcagatggaagtggattatttattagagttggattagccctgggatgtctgtgctctttaacctgcagtcagctgaccatgtcgagtgggcaggaacctacccactttgtaggccacagagttcttggcgctggatgcctcattaaccccgcgttatgaggctccccctggagcctttagggaggggtgagcagccacctttgggggttgggtgcctccaaagtgtggtccagtgagcacgagttcagatgggaaatgttctgggctttctactggcctgatttctgggcttcctattggcctgatgtcaaagagtgatggagattagactgcaagggggacttcctcagcaaaatcatggataagagcctaatacaattattttattttatttttttaaagactgtggcccagctgagagtgggaggtttaaaggttagaccactgcagggacttcccagtaggtaggagtagagagaccccaccttgtgggtaagtgaaaagaagaatatgtcatgtcccctatctgggaaatcttaagcaagagaagaaaccactgctaggctggttatactggctgtgacatgatggagaggcaggggaatcgctgaaatgacctagaagggcctcttaaactttctggttggaccgagcagaggagggagagagaggtgtgtctcttgtgaggtgggtgaacgtctttttattccctcccaatccaccaacttccgcccaagccaggatctgtcacaactcgagaggtggaaattccggtttccctggcctagagctcccagtgctggctttggcatgatgggcacctggagggccgcactcccgttccagccaggctgagccttctgtcccctgcctctggggcctgggaaccccccttcttctttctcctgaatggcacccccgccctagaatccagacaccgagtttcccactgtggctggttcaagggtatgtgaggtgagatgggtggcttggggtgggtggtcttggggaagattatgtagaggcccagggaggcagacacaggagcaagagacaagggggccggggagctgcagaggctgggagccggccagccacccctgcccaggcagctccccgggaaatgctgataaccaacctggtgggatggaccctcattgcctccctggaagtatcaggccaggcaggcctgagcctcaaagaccctgaacccagctggggctgggggagaggttagagcaggcagactcaaacccagtctgcctacctgggtcagagctgagtatgaggcacaggtgtcaacagatctgaaagtgacaggagagtaaggtctgaggaatttatattttgggtacaggaacctgctccccaaaatgttccctgcccagagccaggcaacggtttgggcttgggctatgagaagagggaaggcaaaggaggaaagacaggaaagacttcctgagagtaaggcaaaaaaaggcaaaccagagctgttggtgagaagacaacagaagaagcaggataggggagacctgggctcctacccataggggacagtgaggtgacaggctgaggcctggaaggatgatgaaagtgagaccgtcttagggcccttccagatagggaaccttctctgccccaatgccccacccctgccaccaatacacacgcttctgctgcctggggctctcctattggtcctcggggggatgtggtaagaactgctcacccagaaagtgcccgggtgcctgtttccccagagctccctggtgacagtctgtggctgagcatggccctcccagccctgggcctggacccctggagcctcctgggccttttcctcttccaactgcttcagctgctgctgccgacgacgaccgcggggggaggcgggcaggggcccatgcccagggtcagatactatgcaggtaagtgtccgacagcaggaagtgtggggatagcaatagagagctggaggtgggtggaggaaggagagaggaacagaggaggggaggaaatggatatggagaaacagggacacagagagagatgccagggagaaacagaggatctcggagaaagagagacacagccagaaacagaagtccaaaaggaaagaaaagccactggagagcagattgaggaaaacaggtggccacggggccaggggcacgcttcttccagttctccatgttggtaatttttctttccttccttaaatatcactgtcaccaagctgggcacctcaaactcctaactgcttcacactcccaggtaccccaaagtc

SEQ ID NO: 2915 - DNA, 2300 bp, Homo sapien
tggcacacacctgtggttccagcttctcaggaggctaaggtaggaggatggcttgaggccaggaggtcaaggctgcagtgaaccaagatcatgccactgcactccagcctggatgacagtgagaccctgtttcaaaaaacaattttttaaaaaaaaaaccctttgacctataatcccagcactttgggaggccaaggtaagaggttcacttgaggccaggagtttgagaccagccttggcaatatagtaagaccctgtctctatttgtaaaaataaaaaacaacaaacaaaaaaaccctttgggaggacatgagagtaggtgcatgtgctcattctggcatcaaaatgagatgtagatgttattacctattttgcagatgaggttgaaggtcagagaggtgaaacagcttgtctaaggacacagcttataggtgacagagttggggctggccctaagacagtgctcttggagaacaaggatcctgactgaagatcaagacacgggtgtcccagagccacagcatcctcatattagcagggcctttagagaacagttggtccaaccccctcattttatgggtgagaaaaaggaggctcagaatggagaagggattctcccagagtcatgcagcaagttcgtgcaaaaccgtgaggagaaatgctccgtgctacaccacccctttctgtgacatccattcagtcattgactcagcaaacatttattgagcaccaactgtgtgccagatcctgtgctatgctgggaaatacagacatgagtaaaacttggtccttttttaaatttcttttttgagacacagtttcactctgttgcccaggctggagtacagtggcacaatcttgggtcactgcaacctccgcctcccatgttcaagtgattctcctgcctcagcttcctgagtagctgggattacaggtgcctgccaccatgcttggctaatttttgtattttttaattaattaattaattaattaattaatttatttattttgtttttgagaccgagtctcactctgtcgcccaagctggagtgcagtggcgcaatctcggctcactgcaacctctgcctcccgggttcaagcgattctcctgtctcgccttcccgagtagctgggactacaggtgcctgctaccacatccagctgattttgttttattttttgtagagacggggtttcaccatgttagccaggatggtctcgatctcctgacttcgtgatccgccagcctcggcctcccaaagtgttgggattacaggcgtgagccactgtgcccggctgtttgtttgtttgtttatttatttatttatttatttatttatttatttatttgagacggagtctctctctgtcgcccaggttggagtgcagtggcacaatctcggctcactgcaacctctgccttctgggttcaagtgattctcctgcctcagccttctaagtagctgtgattacaggcatgccaccacccccagctaatatttgtatttttagtggagacggggtttcaccatgctagccaggctggtctcgaactcctgacctcaggtgatccacccacctaggcctcccaaagtgctgggattacaggtgtgagccactgcgcccagccataaaacttggtacttgcctataaggaggcttcgtcctgcttcctgctggctgccaggcctccttgctggaggtgcaaaggaggagaacagtaataacagttaacatttgctgagtgcttgcttcatgccaagcactgtttgaattatttttcatgtattagtgcatttcattttcccagcgagcctatgaggcaggtcttggtaataggcccacttcacagctgagaaacttcaggcatgcagaggctgggacgcacaatcaggcagctccagagtcggagctttaaccaccaccctgaaatgaggactgccatgagggagggggtaaagggagaagagcaggcgttggagggagggtgagctgaggggaaggggcaaaccaacctgatctgcctccctcctcctttagtgctcagtgggcccctcctctgataaggccctgaccttcatgaaggaccatttcctgatggatgagcaagtggtggggacgcccctgctggtgaaatctggcgtggagtatacacggcttgcagtggagacagcccagggccttgatgggcacagccatcttgtcatgtacctgggaaccagtgagtaaagagttccgggacatcccccagaggactagagcagaggatgcccccaggttgaggagggaaacccttgagt

SEQ ID NO: 2916 - DNA, 2300 bp, Homo sapien
cagggatctgctccctcctgcttcccttaccagtcgtgcaccgctgactcccaggaagtctttcctgaagtctgaccacctttcttcttgcttcagttggggcagactctgatcccttctgccctggcagaatggcaggggtaatctgagccttcttcactcctttaccctagctgaccccttcacctctccccctcccttttcctttgttttgggattcagaaaactgcttgtcagagactgtttattttttattaaaaatataaggcttatgtatgatgggtgctgtgtttgctggagcagagtgctccggcagagaattgctgggatgtcaagggagcaagcagtccaagcacatcagttgggaggaggactaggtttgtggggggattgttctctccaactccagactacctcctctgccctgccagctccccacccagaaccagcccacccagaaccagcccacagcactttcctccactctgagcattgctagagggtgctgcaaacttttgccttttgggccaaccacaggttggtgttgaccaggctcagcttgtatccttctgctagacaggcgatacctcatccatcactaactcccctgctgcggcccccacagttgctgtccacacctctcccacacttctcgtgactccaattcagccctgcttccccactgcagcagttggcttcaactgttggtagacaaatttatagaaagactgtgcatccacccccatcctggccacatctctctcagtatctgataatgctctgtccacacctccacaccaccttcctcctctaccctctgtcacaaaggcacaggtccctcttccaccaagactaaccagcacatctctccccccatcactgccagggatctgttctctaatcatctgacctccagcatccccactcgctttacccacttcctcatctttcatctctcctctcccacctacaggtgtgttcaggcgttctctagataaaaaaacaacagaacactaatcttaccacaaactctatccattcacgtcacccccactcagtctctctttcctggtaccaccaaacatgggagtgagtccattctggctgcccccacctccctccagtgtcgcctgagctctctccaatcccctgaggtctagcttctttccccacctttctgctcaaatggctctctccgaaactacccataaacccctaatgccaaatctgaccttggtgtgtgtatgcccctcacatattgaccaccccattctcacaattttcttctattatgtgttctcaaattttttttaatttaaatcttggttaaaaaaaaaacaaaccatacaacgtacccccttagccataaaaaaaaaaaaaaagaaaaaaaaaaaaaggcctggcacagtggatcatgcctgtaattccagcattttgggaggccgaggtgggtggatcacctgaggtcaggagttcaagacccacctggccaacatagcgagaccccatttctactaaaagtacaaaaaattagccaggtgtggtggcaggcacctgtagtcccagctactctggaggctaaggtaagagaataacttgaacccaggaggcagagtctgccgtgagccgagattgcgccactgtgtgtgtgtgtgtgtgtgtgtgtgtgtgtgtgtgtgtgtgtgtatgtgtgtgtgtattttttgaaacagagtcttgctctgtcgcccaggctggagtgcagtggcactgtggggaaaagcaagagagatcagattgttactgtgtctgtgtagaaagaagtagacataggagactccattttgttatgtactaagaaaaattcttctgccttgagattctgttaatctataaccttacccccaaccccatgctctctgaaacgtgtgctgtgtcaactcagagttaaatggattaagggcggtgcaggatgtgctttgttaaacagatgcttgaaggcagcatgctccttaagagtcatcaccactccctaatctcaagtacccagggacacaaaaactgcggaaggccgcagggacctctgcctaggaaagccaggtattgtccaaggtttctccccatgtgatagtctgaaatatggcctcgtgggaagggaaagacctgaccgtcccccagcccgacacccgtaaagggtctgtgctgaggaggattagtaaaagaggaaggaatgcctcttgcagttgagacaagaggaaggcatctgtctcctgcctttccctgggcaatggaatgtctcggtataaaacccgattgtatgc

SEQ ID NO: 2917 - DNA, 2300 bp, Homo sapien
ttgtatatcttctttggggaaaggtctattcaagtcttttgcccatttttctttccttttatttcttttatttcacctgtgactatagacaggctccaaagaggagttttccagtctctttcctgggtttaatggagacttaccttacccttctgtgttattttttaatttggttgtgtgggcggcaagccacccaggtgccgacacaagagaccgaggacatgagctgttccagtataataaaatataaaagaagaatagttataccagatatagatcttagatatgattatatatatcattaatcagtagtttgtagcaattactctttattccaatattataataatcctcgctctataatcataacctaggaaaaaccaggccatacagagataggagctgaggagacatagtgagaagtgaccagaaaacaagagtgtgagccttctgttatgcccagacagggccaccaaagggctccttggtctagcggtaatgccagcgtctgggaagatgccccttgccaagcggaccgtggtctagcagtagcggaccgggaaagggagtcttcctttccccgggggagtttagagaagactctactcctccacctcttgtggaaggcctgacattagtcaggcccgcccgcggttatccggaggcctaaccgtctccctgtgatgctgtgcttcagtggtcacgctcctagtctgccttgatgttccatcttgtacacctggctctgccttttagttagcagtagcaaattagcgaaaatactaaaaatctctgataagcagaaataatagtgtaagctgtttctctctttctcctctctctctctctgcctcggctgccaggcaggaaagggccccctgtccagtggacacgtgacccatgtggccttacctatcattggagatggctcacactccttatcctgcccctttgtctcgtatccaataaatatcagcgcagcctggcattcggggccactaccggtctccgcgtcttggtggtagtggtcccccgggcccagcggtcttttatctctttgtcttgtgtctctatttctacactctctcgtctccgcacacgaggagaaaacccactaaccctgtcatttttctccaccttaatgtcatttttctccaccttcaggttgtcccccattgctgcagttttttgagttcccaaacttcaaaattggctatgtatcctcagtgattcctgctgcatgttgtcctctactattttggctctataaataatgagaaatgtggcaagcgcagtggctcacgcctgtcatcccaccgcttcgggagactgagtccgcagcatcgcttgagcccaggagttcaggttacaatgagctatgatcttgccactgcactatagcctgggcgatagagtagtattttgactctaaaaaacaaaaaagaggaaagaagaaaaagttatacaaaaatcacacattagatttgttcttttttttttctttttgagacagtctcgctctgtcgccgtccagtggcacgatctcggctcactacaacctccgggttcaagcgattctcgtgcctcagccacccggctagctgggattacaggcgcgcgccattactcccggctaatttatttcgtatttttagtggagacggggtttcgccaaggcggccaggctggtctcgaacttcggacttcaggtgatccgtccgactcggcgtcccagaattctgagattacaggcgtgagccaccgtgcccggccttgatttgaatataaaggttccaacactcccaaacacaaggtgaccccatttacaactggatcttcaataagcgtctggtgattcaatttccgccaattagaaagagcccaaccagaacacgcaggcgccttaacgctgagggcataacgaaggtaaagaaggcgtggctactgcccaaatccaagatggctaccaggaggccgtcagttctcggaagtgcggcacatcctcactcctgggaggctcaaaggctcaaacgccattggcagaatccccgacagctcatcctccgccccctgcagggggcggtaatgacagagtcctaatttccggttccggcagtaccggtagcccagtcgagatggaggaagatgcgaccggcagacggcattcgctgggaacgacggatagactgggggctgcggcctagaggtccgggcttggagttcgcctcagacgcggtggagccgccggagtctgagaaggtaagaagccgccggcttgaggtccctgacaactaaggtct

SEQ ID NO: 2918 - DNA, 2300 bp, Homo sapien
agctgcccactagatgactctgcttttccctgcatttggggctaaggtgccaggtacttatttgcacagggagcaggagcagcaaaaaatctctggttctccagagcactcgtcctctctttggaggggttattaggttgggagaaatgttgatacttttgttttgtgtgtgtgtgtgtgtgtgtgtgtgtgtgtgtgtgtgtgtgtgttttaacatctgtgaaccaggctattagtcctgctaaagcgccaatcctgctgtcagagctcacccccttcctaagacaggtagaaaaatgtaatgtagctttttccacaagccacttccctgtcccttcagtctcaggagccctaggagagtctaagctggggcatcccctggcccagaggactcccgtggtgggcacagttctaagtggatcaggctgtcttgggtgcactggacttggagcactaccttgagaagtcaggttgagaaagtagttgatctagaaggcaacaagtgggcatgtgttccccagcacattacccaggccagcagagccaaacctaggagagggcagtgggtagattctctgccccaggcagccatgacatacacataaataccccaatcactcagacttacggcaacaagtgttgtctcactatggtgatctctaagatccacatcactggatgcgtagtcatcccagtcatggtaccctgtggaggaatgctggaagaacataaagagcagttcagaaagtcacccaataccaggaccactgcatttaccagcctgatactgccaagattatctgatgctctcctcaggagctaggagaggagtgctccttcctccctaccgctactctccccaagcctgtgttgcaggtagagaggtgcagcaaatagagaaggcatgtcaaaccctgcatttctacctgagacgtgtgacctggatgatcctccaaaccctattggtcccaccccctgggaaaggccatggtgccagtttgaaaggtgctagctacctgaagccttgatatttcttcatggctgccgcacattcttccaccttggccagaacaggttctgaaaaccacttctctaccttcaccaccaccactgcccatcttgatctctttgagggttttcccatttcacttgatcttatttttgtttatcccttcctgcactttgtcaagagagtcctccagtttctatccaggaatgttcacatccaaagggttggacccacggatcattctgaatcttcctgcccctcctcactgcttaaccctgagaaccacaaatataatggaagcagttccccccaccctcaccccatctctttaagctcatcctagcaagacctctagagaccctagagactcgactttagtccttccccgccatggcacagtggggaaggtgtcaatggggagtgtcacggacaggaggtaggatcctgccgctcgcgtcttagtgtttctccctcaagactttccttctgttttgttgtcttgtgcagtattttacagcccctcttgtgtttttctttatttctcgtacacacacgcagttttaagggtgatgtgtgtataattaaaaggacccttggcccatactttcctaattctttagggactgggattgggtttgactgaaatatgttttggtggggatgggacggtggacttccattctccctaaactggagttttggtcggtaatcaaaactaaaagaaacctctgggagactggaaacctgattggagcactgaggaacaagggaatgaaaaggcagactctctgaacgtttgatgaaatggactcttgtgaaaattaacagtgaatattcactgttgcactgtacgaagtctctgaaatgtaattaaaagtttttattgagcccccgagctttggcttgcgcgtatttttccggtcgcggacatcccaccgcgcagagcctcgcctccccgctgccctcagcctccgatgacttccccgcccccgccctgctcggtgacagacgttctactgcttccaatcggaggcacccttcgcgggagcggccaatcgggagctccggcaggcggggaggccgggccagttagatttggaggttcaacttcaacatggccgaagcaagtagcgccaatctaggcagcggctgtgaggaaaaaaggcatgaggggtcgtcttcggaatctgtgccacccggcactaccatttcgagggtgaagctcctcgacaccatggtggacacttttcttcagaagctggtcgccgccggcaggtaaagtggacgcagc

SEQ ID NO: 2919 - DNA, 2300 bp, Homo sapien
tccagtcaaggcttcagtcgtggtcctctgggagcatccaggctggggtggtttggcaaggggcttactagaccatcatgtgcagagagcagcagagccccttgtacaaaaaccaggacccctgggttccctgtggataggatgagctgccaaggagatgtcactcttggcaccctccaagaatcattacggccgggtgcagtggctcatgcttgaaatcccagcactttgggaggccgaggcgggtgaatcacctgaggtcaggagttcgagaccagcctggccaacatggtgaaatcctgtctctactaaaaatacaaaattagccaggcatggtggcatgtgcctgtaatcccagctactcgggaggctgaggcaggagaatcacttgaacccgggaggcggaggttgcagtcagccaagattgcgccactgtactccagcctgggcaacaagagtgaaactccatctcaaaaaaaaatacagaattagccaggcatggtggcgtgtgcctgtagtcccagctactcaagaggctgaggcaggagaatcacttgaacctgggaggcagaggttgcagtgagccgagatcgcaccattgcactcctgcctgggcgacagagcgagactccgtctcaaaaaaaaagaaccgcgagcactttgtttctcttgcttcttccacttcactcttcttcagccagggcagccaaaggcaggatgggtgcttcccggatccaccagagggggaaaggggttgggcgtgtatgggggcagaacttttccctagtgagagccttggtgaggtctgctggaggcacactggggacacaggcaagcatcaggtggtcccaacttcccacccccctcccataaacggcacttggctcagtctccctctgcccaccttgtcaccatggagctgtggcattcaagcatccaaatgccctgcttctgtcaggcctgccccgtcgggtgctttgtttacttgtcaggttgggcagatggtctcaagccctggttggtgggtgggtgagtgaggagacaggttagacaggggaaggtcccaggacatgtcttccctctctgggctgacctgaggcagtggaggctctcaggtgtgggatggggttttcaggctgggatgttctgtaccgtagaggataggccttcctattacttatcggagcactacgggagggcaggtccctccccagggtgtttaacactggaggctgcagggtcaggaggagaatcgtggggccaggagggcagaggcacactccatcttcgtgctcctcacaggccctgcctccctgcctgctaaggacacagggaagggggtccccacctcagtgcctgcctcccttccctgtgcctgtgtacctggcagtcacagccacctggcgtgtcccagaaaccaaccggctgacctcatctcctgcccggccccacctccattggctttggcttttggcgtttgtgctgcccgaccctttctcctgtccggatgcgcagggcagggcctgagccgtcgagctgcacccacagcaggctgcctttggtgactcaccgggtgaacgggggcattgcgaggcatcccctccctgggtttggctcctgcccacggggctgacagtagaaatcacaggctgtgagacagctggagcccagctctgcttgaacctattttaggtctctgatccccgcttcctctttagactcccctagagctcagccagtgctcaacctgaggctgggggtctctgaggaagagtgagttggagctgaggggtctggggctgtcccctgagagaggggccagaggcagtgtcaagagccgggcagtctgattgtggctcaccctccatcactcccaggggcccctggcccagcagccgcagctcccaaccacaatatcctttggggtttggcctacggagctggggcggatgacccccaaatagccctggcagattccccctagacccgcccgcaccatggtcaggcatgcccctcctcatcgctgggcacagcccagagggtataaacagtgctggaggctggcggggcaggccagctgagtcctgagcagcagcccagcgcagccaccgagacaccatgagagccctcacactcctcgccctattggccctggccgcactttgcatcgctggccaggcaggtgagtgcccccacctcccctcaggccgcattgcagtgggggctgagaggaggaagcaccatggcccacctcttctcacccctttggctggcagtccctttgcagtctaaccaccttg

SEQ ID NO: 2920 - DNA, 2300 bp, Homo sapien
tgttgacccaccagcttaggagcacccaccaagctctgggtaaggaagctcaccttctggggctcttctgggaaaatagaggtaaagcatcttgctccagccacccctcccccatttccatagcaactgcacacactccactccagagatctccaaaccctactactaagggaaggcaccgtgagggcagctagaccccagcgtattcctcactcctcccccagatagatgggcagcactcagggtaggggagacccccgaccatcccacttgtgggagcgagcaagggataccctgggaggccctcatccatctttgttctgctggggtgcagggactagggccaggtttgcctttgcccagcagggtctccagcacccatctcgggcagaggctgggggagtgactgctggtgcaagccccaaagtgcatgcggcaaaaacatggatgcagagctggtggcaagaagaggggctaagttatagagttgctgcaaagttttggcctggggaggtggggggagtgtcctagtcctcctcctggggcggctccgcctgcccagctggcccagcccctccacttgtgccaaggaatgtgccgggagaggcgggcggggcagcagagctgcggccacccggaggcagtgcacaggtctggggctgagggatacctgggctcaggaggggcagggaccccaaaattctcctgggggcacaagtgtagtcctcagagaaaagccaggcatccccctacctccttgtcccacctgatggcatctggcttctccagagattcggagtgccaagagtgttctgtgctcagttcaggcgctgtgggcgaagcacattctggtgggaaagggagtggtactcaggctgtctctgtgctggcctccaggagtcaggattcttcctgagacaaaaactggggcctgcggggctggatcactatttgaggcagcctcccggctgggaggaccccgccactctttgctgggctgaggccgccaagcccctcagtgtggggactgaatgccccaaggagaacaggggttggagttaagtggtgcaagggctggggaaggtggaccagcttccccaggcctgaaggaagcagctccaggagggagggtgccatctgcctcccacacgcacagcccatcctgcggctgaacccaggtgaaaggggcctgtggatgggggcagttatctgatcccctacctcccactctgtctctaggtcaacgtggaggtaccaggccaccatgctcagtctcaagctgccccaacttcttcaagtccaccaggtcccccgggtgaggggctccacccactgacccaccaacccccattccctagaggactgactaggggctgacgttcttctcttttagctattggggcagcccctcctgcaggcgaactcttaccctcccattccagtgtgagactcttcctctgttctctgaggaacaagcttgtggccctccatctggagtccccttccccagagcgccctgtgtgctgcgctccacccccatcccaccccaatctggctcttcggtttcctatttgttttgtgggttgtgggtactgggacctgtggtaacatcagatcagatttagtttggcttgggggccacgttgatctccagcccagcctctttgaccctgcttccagagatctcagatggagggaaagggtccgggcacagtgacgcccttcctctcccaccactaccctaggtgttctgggaagatggcatcatgtctggctaccgccgccccaccagctcggctttggactgtgtcctcagctccttccagatgaccaacgagacggtcaacatctggactcacttcctgcccacctggtgaggggaggctccgccccaggccgcggccttgagctcagagggggtacccaggcgggcagggaccgtccaggcccacgggctgcagcggcagtcgcgggggtccgcggcggcctgagcacgcgcccgccgcaggtacttcctgtggcggctcctggcgctggcgggcggccccggcttccgtgcggagccgtaccactggccgctgctggtcttcctgctgcccgcctgcctctaccccttcgcgtcgtgctgcgcgcacaccttcagctccatgtcgccccgcatgcgccacatctgctacttcctcgactacggcgcgctcagcctctacagtctgggtgagccggacaggcgcgggagcgcggggtctgggcgtcccggagcggggcgaggggtgggacgcgggacataggggcgcgcccct

SEQ ID NO: 2921 - DNA, 2300 bp, Homo sapien
gaccctctaggtcttgggggaagagctgggtaatacctggtgtctgagtgattctctgcagacccttcccctcctcaaggatcacccatcctcctttcagccccctttatggggaccaggcagctctggagccagccacaggggctgttagagaagcaaggcctggagtggcctgcaccgagtagcagggtcagggttcgtgtgctcctcctcctgctgcaggggctgcacatcccattgccccacttctgctttgtgtctccctctgtctagcttccagggcagggagcaggccccacctagggctgcaggcagtctggcctgtgccagcacggtctcctgtgcccaccagccccacaggtgctgtgctttgtgctcttggctgctgtgctgggacagaatgggatgccaggaagagaagaaagggggtgcagtctgaggccaccaccccccttcctatctaagggagggctgaagacaaggggccggcattcagtgggcagcagaaaggagaggctccttgaagctgctcagtcagaggcccccgtccctccttttgccttccgcaggactgaagacctgaaggggctggcttttggagtgttgaggtgaatatctgggagcagagatcatgaatagctcagggcagtgaatggcgcaccaagagcagggctgtgtgtgggaggctgcagccaggattgcctcagctcctccccctcaggctgggaggatagcacaggctaggggctcggggtggagggtctcagctctgctgcccccaccccagtactagcctagcttcccaagctgtggcttagaggatagttggcttcctgcctctctcctctaaaatagcaagtctgggaaatcctggggtgagtggagtcaccccactcccagttgctggcagagactgagactaaagcatcacttaataaaccccccaagcccaatccctgtctcctggtgcctgtctgtacagaagtttcattggggggtggggcactgaagatggcatcctgaaatgcattttggaaaggcttctttgaagtggatggaacagaacaagaagcaggcaatttgagtgaaggccctggagatggtttgataggcactgtcaagttccttgactgtaaactgaggcggtgcctttgcaggggtgatagtgaaaatctcttgccagcaacatcgctgcctggggttggttcgctgtcactagctgggtcctcttccccaagggggtggggaggtgagccttgaaaccagcctctggccaggcgtagtggctcacgcctgtaatcccagcactgggaggctgaggcgggtggatcacaaggtcagatcgagaccatcctggctaacacggtgaaaccccatctctactaaaaatacaaaaaaaaattagctgggcatggtggcgggtgcctgtagtcccagctactcgggaggctgaggcaggagaatggcgtgaacccgggaggcgaagcttgcagtgagccaatatcgcgccactgcactccagcttgggtgacagagcgagactccaccttaaaaaaaaaaaaaaaaaaaccagcctctgagtcctcaagtgcctgtcctgcaaggattggcatctcaaattgtattcggggggggggggggggggagggggaggtggtgagcctggtgaatcccccatgatagaaccaacatttaccaaaggcagtttgctctgagccctaggcagcaccaggtgctaagaggcagcaaagcatggtgagagatggcttctgaaatctgttctgcatttggggatttgggttcctctgccagcctaaggcagagctgtccccaactgctgggagaacctggaacgggaacactgctctgagtcgccggggggactctacagcaccatggccacatcctgccttgggcccctaccctgttctagccagtcagcacagggagtttgggtcgtgctggaggagctggctgtgtgcaggcggccgagtgagctgcctgctaatggggctgggccaccccgtgctgctccctggaggctggacaaggctgggattgttccctggctcccctttgtctccccactccccgcccaggcctggcccgcctgcctggccactcttcctccatcagcctggctggcagcagccttggactccgcccgtggagccctgggcctgttgacccaccagcttaggagcacccaccaagctctgggtaaggaagctcaccttctggggctcttctgggaaaatagaggtaaagcatcttgctccagccacccctcccccatttcc

SEQ ID NO: 2922 - DNA, 2300 bp, Homo sapien
accccaactccttacagctcattttttccctcataggcacaggaggaagctcgtcggaacaggctcatgagagacatggctcagctacgacttcaggtaggaaatcaggacccaagtgcttcttctgcacttggtagagcttttgtgtcaaccctactggcaggtctcccccttccgctgtagtccccctgctctgttgcctctgtgtccctccgcctctcccagatgaccctccttactactcactcttcactcagccatttgcctcctttctgccttcatttctgtctctccctctttaactcttatttctgtttacttttcccccaaagccattggtagagagggtcctctgatccccttaacaacaggaggagccccatagagccaccttgagcaccactcttcccccggcccggctgcaggggtcccccacagctgtacccaccttgccctctctcaccagctcgaagtgtctcagctggagggcagcctgcagcagcccaaggcccagtcagccatgtctccctacctcgtccctgacacccaggccctctgccaccatctccctgtcatccgccaactggccaccagtggccgcttcattgtcatcatcccaaggacaggtaagtacattggagaggtaaggagacagagtatgactaaaagagattctgggcttgggattaagagaccttatttggggcccagtttatatgcagtaaccttggtcaagtcttactacctttgtgaacccgtcacttcatctgtgaaatggacataatccctattctgccttacaagacagttgggagaaacagaaaatgtaagtgaatataatgagaaagcacttggtaaattgccaagtatattgctggcagaaggtcatgttttcagagaactttgggagccctctagggagccagggtcccttctctgcctgaagagtgtactgaggtgagctcagatacttcctccagagccccttgtcacagcagtctgagcttatctgttttgtctttccctaccttgcccaccagtgatcgatggcctggatttgctgaagaaggaacacccaggggcccgggatgggattcggtacctggaggcagagtttaaaaaaggaaacaggtgagtgtggcctggctggacctgtgctgagccctgggtctgtcttttggataacacatgcttatgaaagccccttgctccctatgggtaagacacatacatacccgtctctactcacagttagctcacctcactgcctggggagtgataccagagataattagaagtcaaggttgtagctgctgaaatagagggtgaccaaagggatcaggagccctgtggggagcactgagctgctgtccttcctctggggcaagcctgtgatcagcacccactggggagaagggagcagacctccctcccccaactttagactgtgaactcctttataggaatttctcctgctttggggttgggacaggtgatcaggtttctcagagtgtgagggcctcatccaggctgcccaggggcttcccacctccctgctgagctgagggagtggtaagaccgaagccagccagggaggggcagctggcagcatgtgcagatgctcagccggtacaggcctgcccttctggcctttggggctggaggagaactaggcagagggtgtagggaataaggagaaagcttccctctccctgctagctggcccaccccctcctctgcatctgctctggctggccaggaagctgcacaaggtctgattgttcggaccttgtctccagaagccctgacttgaaaagcatctgctgcttctcccctcccagctcctcccctgagaggaaccaaataattgatgttatcaggaggaaaagtgagctgggcccagcagccaggaagccacttaagaatggctccagagctgtggtgggagagacatgttccccagccccgcctgcaaaaccaggcccccagagccacaacagactgctttgtgtaaggcaccctgccagtctcctgctcctgacctccactcgcacatctcctctgcaggtacattcgctgccagaaagaggtgggaaagagctttgagcggcataagctgaagaggcaggatgcagatgcctggtaacattttagccctcacccctagaacctcaggccacctgccttgctcctccacgagcattcctagggagaacgggtagggctggataattctgaggctccacacgtagcctgccagggccctcctgcaggcctcaccttgcgaggagtacgaagtt

SEQ ID NO: 2923 - DNA, 2300 bp, Homo sapien
ggccgaaggtctgcttcctgctgtgaaagtcttcctggactggcttcggaccaaccccgacctcatcatcgtgtgtgcgcaggtgtgtcagtccactccattgcccctgtcaggtcccagggtcttggaggaggggatgagccaggatggggcctgaggatcccccctgatggccaaggcaagaattattgccaagcaattaatcacctatctgtgctgggcccttatgctctgacagggaaggattaggcatgatcttggccctcacaaagcctgtggccagggaacaattagcgagctgcttattttgctttgtatccccaatgctgggcataatgcctgccattatgagtaatgccggtagaagtatgtgttcaaggaccaaagttgataaataccaaagaatccagagaagggagagaacattgagtagaggatagtgacagaagagatgggaacttctgacaagagttgtgaagatgtactaggcagggggaacagcttaaggagagtcacacaggaccgagctcttgtcaagccggctgccatggaggctgggtggggccatggtagctttcccttccttctcaggttcagagtgtcagccttgaacttctaattcccagaggcatttattcaatgttttcttctaggggcatacctgccctgctgtggaagactttcttccctgtgggtcgccccagtccccagatgagacggtttgggtcagggccaggtgcaccgttgggtgtgtgcttatgtctgatgacagttagttactcagtcattagtcattgagggaggtgtggtaaagatggagatgctgggtcacatccctagagaggtgttccagtatgggcacatgggagggctggaaggataggttactgctagacgtagagaagccacatcctttaacaccctggcttttcccactgccaagatccagaaagtccttgtggtttcgctgctttctcctttttttttttttttttttttctgagatggagtctggctctgtcgcccaggctggagtgcagtggcacgatttcggctcactgcaagttccgcctcctaggttcataccattctcccacctcagcctcccgagtagctgggactacaggcgccaccacacccagctaattttttgtatttttagtagagacggcgtttcaccatgttagccaggatggtcttgatccgcctgcctcagcctcccaaagtgctgggattacaggcgtgagccaccgcgcccggcctgctttcttctttcatgaagcattcagctggtgaaaaagctcagccaggctggtctggaactcttgacctcaagtgatctgcctgcctcagcctcccaaagtgctgagattacaggcatgagccagtccgaatgtggctttttttgttttgttttgaaacaaggtctcactgttgcccaggctgcagtgcagtggcatacctcagctccactgcagcctcgacctcctgggctcaagcaatcctcccaactgagcctccccagtagctggggctacaagcgcatgccaccacgcctggctatttttttttttttttttttttttgagaaggagtttcattcttgttgcccaggctggagtgcaatggcacagtctcagctcactgcagcctccgcctcctgggttcaagcgattctcctgcctcagcctcccgagtagctgggattataggcacctgccaccatgcctggctaatttttttgtatttttagtagggatggggtttcaccatgttggccaagctggtctccaactcctgacctcaggtgatccgcctaccttggccttccaaagtgctgggattataggcatgaaccaccgtgcccagccagcccagctaatttttgtgttttttgtagagacaaggttttgccttgttgtccaggcttcttttgttaattttaaaatcaaacccccacaggcctctgaacataggccagatccctcagggtggtgctttccttgctcactgctgttctccaccactgtctctagctgaaggcctcctctcccttctctctccccagagctctcaaagtctgtggaaccgcctgtctgtgttgctgaatctgttgcctgctgctggtgaactccaggagtctggtgagtgggtccctggcactaccctcctttctttgctctctcattgtccccactaagcccatctcccctccccataacccagcccttggggtaaggaggttaatgggattcactgccagcctccctagcacacagcagtcattgtgtggtctaggc

SEQ ID NO: 2924 - DNA, 2300 bp, Homo sapien
gaagaagtgtgagactcggaaactgtctcctggcaaaaagcggtgagtggggcctgtgaggaggacgggttttttctgcagttggtgcagtaggaccatagggactgcgggaccattcagcatttactttgggctcttctcatttcagatgtaaagacattaaaaggttgctagtgaactttatgtatctgcaaagcctcctacagcccaaaagcaggtgagtggaagagagcatgaacctgaactatcctgtgagccccagccatgatgctttacagaaggaaccttgacaagggtggactgtcgagttctgccctcagtttgaacatccgtaaccaattcatcctttcttggcattcctcactgtttctcccaagggtcctatgcccatcctcctcccagcagctctccctatggcacagaatgggtgcttaggagatgttgaagagggaatggctgaatgggaagcctactcacatcccttcccctgttttagttgctatggagatcaatccagcactacccttccctggtgtgctctcaggtctcccctgcagcatcccatagtcctttctctgaatcttgtattccctgctcttctccttccccagcccccaccactgacctcccctgttactcctgcccctctgtagctccgtggactcagagctgacctcactttgccagtcagtcctggaggacttcaacctctgcctcttctacctgccctcctcacccaacctcagcctggccagtgaggatgaggaggagtatgagagtggatatgctttcctcccggaccttctcatctttcaaatggtcatcatctgccttatgtgtgtgcacagcttggagagagcaggtaaccttccctatgttcctcttttctcttccactggctttggggatcctcactccccttttctgcagctccttattcataaacttccttccacaagcagcctcttcactcctgtgtcactgcttggctgtgggcaagtaagggccaagggatcctaccctaaaggaggtcctggtaattgagtacaagcaacagcacatttccttcccccttctccttactgcctcccataaatatgcacacccttggccagggcctgtgcagacacaagggtcagggtacttagtgatcatccagacagaatttcagaccttctgttggaggcatttaggcaattctggaagcctttctggcagaagtgtatgtagagcaagattgggaggtaaggagggataggactggatgtgaaggctcttgaggcatggggaggaacctcagagccagggaggatgagatgggacaaaaggatatgcttatctgaaggagtacaaggtgagatggtaaattctagattatggaagggataataggacacgtacagtgcctcacgcctgtaatcccagcactttgggaggccgaggcgggcagattgagcccaggagttcaagacccagcctgggcaacatagtgagactcttgtctctaaaaagttaaaaaaaaaaaaaaaagaatctttgataagtagttggatccttggaagagttgagaacagatgagatgtggttggaattgatggtgcctactcctcatcagggccctaggcccctaatgcctggctttcctgacttcaggatccaagcagtacagtgcagccattgccttcaccctggccctcttttcccacctcgtcaatcatgtcaacatacggctgcaggctgagctggaagagggcgagaatcccgtcccggcattccagagtgatggcacaggtgggagaatcggggaggtcatcactatggaaaggttggtgtggggcatggggatgaaggaaaggaacacagactcgggggaagtggtgttggagagcacattccagcttccaggctccacctgttcctcgggctccacctgaccttcctctttccgcagatgaaccagagtccaaggaacctgtggagaaagaggaggagccagatcctgagcctcctcctgtaacaccccaagtgggtgagggcagaaagagccgtaagttctctcgcctctcctgtctccgccgtcgccgccacccacccaaagttggtgatgacagtgacctgagtgaaggctttgaatcggactcaagccatgactcagcccgggccagtgagggctcagacagtggctctgacaagagtcttgaaggtgggggaacggcctttgatgctgaaacagactcggaaatgaatagccaggagtcccgatcagacttggaagatatggaggaagaggaggggacacg

SEQ ID NO: 2925 - DNA, 2300 bp, Homo sapien
cgtgtgtttcattcactattgtactctcgggcctagcaaaaacaaaaatgtttttaaaaacaaataactaatgaattggcctaattaattaattggtgcttccaggctcctttctcctgctgccctttcttctgacttaaaatatttcagaatttcatatccgtaaacagctaggtgtgagagttccccaaatttctgaagctcagagtgacaagtccatagtctaacaacacatttatcttgagcagagaaatcagactttcctcctagttccttccactgatcaccactgctataataaattataaaaacagtgattggctgcctcaaatttctaccctgctcaaagccaacaacacaattacaggcagatacccatgtgcacacaggtaagccacacaggcaaacacatcagcttaggttagtcctgtgaatgtagtggtttaagaaagaactacatttgatgacaactggaaggatgaccagagccatccccaaaagctggagacaaggaatattgcagacactgcccacgctctgtctgacaggcagcactgacactcggcagcatgataaggcacacgtgccacccccagccaactcctcacccgcctggggactgcttggggcagcccatagtgggagccctggggccgctagattgaatcacttttctatttttggagcagcctatactcccctctgcctctggcttacaaagccagagaaggcaggatgcctactcaaagagaaaaagacaacatgctcttgactctttcaccgccaaaatgtggccaaggctctgagggtcgtcttctcatgcaaatatccgtgttctataaagcctgagctaaatgaaaaccccaaactctactctgtagtagaaggcacaaaactcagtttccacgcttcatcctattttgacccagttgcggagcccatgttccagttgacctacccaacaaattctccacctttgatgggaagagctcattcgggcctgttgccaacagagggctgaagggctgaagatgtgacttgtggagcgtgggtggcattatggaaatcagaaaccaggaacggaagttgcctggcaagagactacagtcatgaggctgggaggaaggcaggactcaggagtccccaggtgcccggaattgcctcccaaatcccaagaacgctctggacacaaaagtcgttcgtgacccttccaggccaagactttctcattcggactcctcaaaattagagccgtatgggactttagagcacatccaattcaaatcgttctttttaaggataaggaaactgaggcccaaggtcacaccgtgagagagtggcaaaggatggacctgaacctagctccacggacttcagtccaagactcttccttgtaaatcccccaggattccaagcaccgttcccttccgggtttttctacacctgtgaccccaccttcacctacccaacccttccagccttcaattcccaccctattaccccaactccaccaagcttagtgcccgccccaagaaagctcactgcagaggggattcctccacgtgcttccctccaaacctcccacctacccaattcctcctttcagttccatcccgagttactacgggaccccgccccgcctccaaaattgcaccctccttcctcacccgcacctcaccccgacacccgggccccgcccgcccgggaggccccgcccctcgccgtctccccacttccctcggtggctgctctcacgccctggcccctctcaccggtaaagccgcttagtgtggaggacttttgcttcgggctcgctgctctcccctgtgggggggccttggctcatggtgcccgggtccgggggcagctcccggtcacaggcccctgccacccaccactaccgccaacactgccgtctccggccgtagccgcagccgccgccgccaccggccctgctcggccgccatcgctgtgaggcggctgcccgcgacagctcctcctccgcctgccaaatctcgcgatggcagccgcacagttgcggaccagtggcctgctgctaccaaatctcgcgaaactcgttttccctcccgggaagttgccagaactaactctgggcagcatggcgtctttccggcttctccaaacccttgcgaaaaactttattggcaaagctatcagagaacggacagtgtacccactgaggcggccaaagcttaactggatcagggcaggtgagcttacagctaggagcgtgactgctttgtcctacaatggtcatttggtccatccttctgcccctt

SEQ ID NO: 2926 - DNA, 2300 bp, Homo sapien
caagactcttccttgtaaatcccccaggattccaagcaccgttcccttccgggtttttctacacctgtgaccccaccttcacctacccaacccttccagccttcaattcccaccctattaccccaactccaccaagcttagtgcccgccccaagaaagctcactgcagaggggattcctccacgtgcttccctccaaacctcccacctacccaattcctcctttcagttccatcccgagttactacgggaccccgccccgcctccaaaattgcaccctccttcctcacccgcacctcaccccgacacccgggccccgcccgcccgggaggccccgcccctcgccgtctccccacttccctcggtggctgctctcacgccctggcccctctcaccggtaaagccgcttagtgtggaggacttttgcttcgggctcgctgctctcccctgtgggggggccttggctcatggtgcccgggtccgggggcagctcccggtcacaggcccctgccacccaccactaccgccaacactgccgtctccggccgtagccgcagccgccgccgccaccggccctgctcggccgccatcgctgtgaggcggctgcccgcgacagctcctcctccgcctgccaaatctcgcgatggcagccgcacagttgcggaccagtggcctgctgctaccaaatctcgcgaaactcgttttccctcccgggaagttgccagaactaactctgggcagcatggcgtctttccggcttctccaaacccttgcgaaaaactttattggcaaagctatcagagaacggacagtgtacccactgaggcggccaaagcttaactggatcagggcaggtgagcttacagctaggagcgtgactgctttgtcctacaatggtcatttggtccatccttctgcccctttcccgcctccccgtttgagccaagcctctttcagattactggttagagtgactccagctttcccttttcccccataatttaaacaaacaaaaagtgcatgtgaaagtttccttggaaagggccgagcatcacataggagtaaagccccggaagaaatgacttgtacaagcgtctcggcccttcagctcccctcccaaagatttccagcttgcatatctatctcttacgagccagtaacatttattgaactgccatcttccagccacagtgcaagattctagacacacagaggtgagcaagctagacactatccctgccctcccaaagctcaaatgattttagggataaggactcatagaaatgagaagctagtccctaacgtttctatctcctaatcctcacattggaaatcagggcaggtgggcttacagctaggagcgtgactgctttgtcttgttttagcttaaaacctaagttaaaaagcaagggtggtttgttttgttgttgttgtttttgcctgtgtatgaattgtaatgagaacataaattgcccttctaccactatgctcctggctgcagccacccaccttctttctgttcctgaaacagcctaagtctttcccatccattggtctttcacttgctgttcctctgtctgtaacactcatactcctgatttcccatcaggtttcagctcaaatattaccttaccaaagaggtctttcctattaaaattgtctaattgatttagttgctaggcttcttcattatgttaccccaatagaacataagcttctcaagggcagagacctcaactgtcatcttgttctcttctgtgtctgcctagctaataattggtgtccagtaagtatttactgaatgaataagtgtacaaattccatttctgggtatcccagcctactccgagcaccctttgttgcacaaatccacttttctccctctgctttcctgagctgggagttcttacgcattccaggtgcctagaatgtgaacttacccctttgcccagctgcatcccaactttcagaaaggatgacatcctcctctgatgcttttttttgtcggcagattcagcagggcggggcctgcccctttaagctgggccccacctgctctggtcagacaggttttgagacacaggtaaagggagggagacagagagaaatacttgcagagccagcaggtagctgggcagctccttcccggacggacggatggacagacgctggggaccctccactccatatggaaagtaagaggatgtcatgggtccaaactgcaaggtttggagtgcccttgagataaaggaagggaatcagtcccatccagaagcaatgagatggagggcagcagggagga

SEQ ID NO: 2927 - DNA, 2300 bp, Homo sapien
agctgtgaactcagtcagcctccacccacgccttctatgcccctccaccaaaacccctggagtcatggccactctaatgcaggaataggaggcagaagaggtgtctagaactttgccaagtttctttcccactgaggatcttgctgtagacagagaagcttcctctccactgtcccatccctacacatccctgcttggaaccctcctgcattccaagtgagaccagtgatttgccaactgatctgacccaaagagctggcagttccaggcaccctcttccttcactggtacttggtcagttcccaaactcctcactagcccacctcatccatctctgcagggcctgggtctgctattctgatatttaggtctgatcatggctgttttctatgccttctctcctgtctttctctcctccctgctgccctccatctcattgcttctggatgggactgattcccttcctttatctcaagggcactccaaaccttgcagtttggacccatgacatcctcttactttccatatggagtggagggtccccagcgtctgtccatccgtccgtccgggaaggagctgcccagctacctgctggctctgcaagtatttctctctgtctccctccctttacctgtgtctcaaaacctgtctgaccagagcaggtggggcccagcttaaaggggcaggccccgccctgctgaatctgccgacaaaaaaaagcatcagaggaggatgtcatcctttctgaaagttgggatgcagctgggcaaaggggtaagttcacattctaggcacctggaatgcgtaagaactcccagctcaggaaagcagagggagaaaagtggatttgtgcaacaaagggtgctcggagtaggctgggatacccagaaatggaatttgtacacttattcattcagtaaatacttactggacaccaattattagctaggcagacacagaagagaacaagatgacagttgaggtctctgcccttgagaagcttatgttctattggggtaacataatgaagaagcctagcaactaaatcaattagacaattttaataggaaagacctctttggtaaggtaatatttgagctgaaacctgatgggaaatcaggagtatgagtgttacagacagaggaacagcaagtgaaagaccaatggatgggaaagacttaggctgtttcaggaacagaaagaaggtgggtggctgcagccaggagcatagtggtagaagggcaatttatgttctcattacaattcatacacaggcaaaaacaacaacaacaaaacaaaccacccttgctttttaacttaggttttaagctaaaacaagacaaagcagtcacgctcctagctgtaagcccacctgccctgatttccaatgtgaggattaggagatagaaacgttagggactagcttctcatttctatgagtccttatccctaaaatcatttgagctttgggagggcagggatagtgtctagcttgctcacctctgtgtgtctagaatcttgcactgtggctggaagatggcagttcaataaatgttactggctcgtaagagatagatatgcaagctggaaatctttgggaggggagctgaagggccgagacgcttgtacaagtcatttcttccggggctttactcctatgtgatgctcggccctttccaaggaaactttcacatgcactttttgtttgtttaaattatgggggaaaagggaaagctggagtcactctaaccagtaatctgaaagaggcttggctcaaacggggaggcgggaaaggggcagaaggatggaccaaatgaccattgtaggacaaagcagtcacgctcctagctgtaagctcacctgccctgatccagttaagctttggccgcctcagtgggtacactgtccgttctctgatagctttgccaataaagtttttcgcaagggtttggagaagccggaaagacgccatgctgcccagagttagttctggcaacttcccgggagggaaaacgagtttcgcgagatttggtagcagcaggccactggtccgcaactgtgcggctgccatcgcgagatttggcaggcggaggaggagctgtcgcgggcagccgcctcacagcgatggcggccgagcagggccggtggcggcggcggctgcggctacggccggagacggcagtgttggcggtagtggtgggtggcaggggcctgtgaccgggagctgcccccggacccgggcaccatgagccaaggcccccccacaggggagagcagcgagcccgaagcaaaagtcctcc

SEQ ID NO: 2928 - DNA, 2300 bp, Homo sapien
gtgggtcgagatctcgccattgcattccagcctgggcgacaggtgagactccgtctcaaaacaacaacaaacaacaacaacaaaaaacaacaacaacaacaataaaaatccccccagtagagaaaaatttggaagagacagaaaaggaaaaaggaaaaaaaaaatcactatagatacactacttaaatacaaccgctattagcattttgagctatttcctttatccttttttacatagttgagatcttactgtttatatagttttgtatcctactttttcatttaattttataacaaatatttttccatgttataagctcttcataaacattagtctttcttttgcaattaatgtttggggtattttttggcatctttagttccttatcctaacctttgtgcacaagccctgtgttctaaaatcagagtgatggctagtgtggtggctcacccctataatcccagtactttgggaggcccatgtgagaggatcagttgagcacaggagttcaagaccagcctgggcaacatagtgtgaccctgtcgctacaaaaaaaaatttttttaaattagccaggcatggtggcatgtgcatgaagtcccagctacttgggaggctaaggcaggaggatcacttgagctcgagagtttgaggctgcagtgagccatgattgtgccactgcactccagccttggtgacagagcaggatgctgtctcaaaataaataaataaaataaaatcagagtgaagtgaagaaaacaaacactccaaagttttctacaacccttttaaatttcaccaaattttagcccgttctttctttctttttttttgagatagagttttgccccttgttgctcaggctggagtgcaatgtcgcaatctcggctcactgcaacctctgcctcttaggttcaagcgattctcctgcctcagcctcccaaatagctaggattacaggcgcctgccaccatacctggctaatttttgtatttttagtagagacggggtttcaccatgttggtcaggctggtctctaactcctgaccttaagtgatccactcaccaaggcctctcagagtgttgggattacaggcgtaagccactgtgcccggcctagccccttctttctctctctctctctctctctctctctctctctctatatatatatatatatatatatatatatttttttttttttttttttttttttttttttgagacggagtctcgctcttgtcgcccaggctggagtgcagtggcacaatcttggctcactgcaacctctactacccggattcaagtgattctcctgcctcagcctcccgagtagctggggttacaggcgcctgccaccgggattacagggccctgccaccgtgcccagtgaattttttgtatttttagtagagacgggctttcaccatcttggccaggctggtcttgaactcctgaccttgtgatccacctgcctcagcctcccaaagtgctgggattacaggtgtgagccaccgtgcccggccttttctttcaacatttaacaaataagttggcttttttggaagtatgttgttgtcatttagtgacacatctctaaatatttacaatttttgttgaaatgttaggcagggaagaagaaccacattgttccacagggaagaagaaccacagagtttcatgtgctggagtagaaagaaggtgtatgagttccacaatgggacagggttgggaacttaaggcaatgtactggagtagttccctgttgggtttattttctttaacctgtctttgtgtcaaaatgagatttcacgttcctcttaaaacatgccgtttgaatactgtgtttttggcattgtccaaggaaaactgaaaacttgtagcatgaatgttttttttttcacttaaaatcttgtgaccatattaaattgtattacttgtaagagactgacgtttcctgttttaagatagaatacaaagctgttctttaatacattaaatggtgctgacgaaaggaaatttttttaaaaagcaaatagtttggcggctccgcccttgaaagggatcagctgaacgcgagtcatgtgaccctctggcacctcttccgtcggctgaattgcggccgtatgcgcggctctgtggagtgcacctggggttgggggcactgtgcccccagccccctgctcctttggactctacttctgtttgcagccccatttggcctgctgggggagaagacccgccaggtgagggccctggggctacagcgatagaagtttcaggaaacgctacccttgca

SEQ ID NO: 2929 - DNA, 2300 bp, Homo sapien
tggcgggtgcctgtagtcccagctactcaggaggctgaggcaggagaatggctgaacccaggaggtagagcttgcagtgagccgagatcacgccactgcactccagcctgggccacagagcgagactccatctcaaaaaataaataaataaataaataaataaataaaggcacctctcaaagatgggcatgacagtgtaaccaattagggaagggtgggtatatgtaaaataggtgacgcgtggggatcaatcagaggaaagtgcaacaaacgggaagagtggttctcaatcccacctgtgcatttaccgaggacttgtagcttggctttcaactgttttcggcttgaaggtggggtttcatcaggaacctgcccctgtctgcctaggatttgtctgtttgtctgcctcctgttgctatcctcactttgttgcccaggctggagtgcagtggtgcaatgggaggatcaagggatcctctcatttcagcctccggagaagctgggaccacaagcatgcaccaccatgcccggctaatttttgtattattttgtagagatggggtcaggctatgttgcccaagctggtcctgaactccaggactcaagacatccttccacctcagcctcccaaagtgccaggattacaggcatgagataccacactgagccctttggtaccttttggattttgtaccatgttcatttattagtcaaaataagattaaagtaggccaggtgcagtggctcgtgcctgtaatcccagcactttgggaggccaaggcgggcagatcacttgaggtcaggagttttgagaccagccgagaccatgccattgcactccagcctgggtgacagacctagaccacatctcgaaaaaacaaacaaacaaatacaaacaaaccaaaaaacgtaatatttattgaacacttcgttattcgggttctggtccaagaagagttcacaattttattgtggagaaaagataggatatgagaaaataggatatgggggcaatacaagtacttgtcaaaagagggaggtgatatctggtgggatgcactttttttttaattttttttattctttgagatggagtcttgcactgttttgtcgggctggagtgcagtggcgcaatctcggctcactgcaacctccacctcccaggttcaagcgattctcctgcctcagcctcccgagtagctgggactacaggcgtgcaccacctcagccggctaatttttgtatttttagtagagatggggtttcaccatgttggccaggatggtctcaatctcctgacctcctgatcttcctacctcggcctcccaaagtgctgggattacaggcgtgggccaccacagcttttttgagatgcagttttttttcaccacagttttttttttttttttttttttttttttgagatggagtttcactcttgttgcccaggctggagtgcaatggctccatctcagctcactgcaacctccaactcccgggttcaggcgattctcctgcctcagactccctagtagctgggattacaggcgcctgccaccatgcctggctaattttttgtttgtttataagatggagtctcgctctgtcacccaggctggagtgcagtggcgtgatcttggctcactgcaacctctgcctcccaggttcaagcaattctcctgcctcagtctcccgagtagctgggattacaggcatgcgccaccatgcccggctaatttttttgtatttttagtgaagacaggttttcaccatgttggccaggctggtctggaaccccgacttcaggtgatccacgttggcctcccaaagtgttgggattacaggtgtgaaccactgcgcctggccatgaagtgtccaataaatattagattgacataaagaaccctcaggtgtgctatctcatggaataccctcaaattcctctctggatcttcctatcacagttgtattattggggtcccatttggatctctcccactataggtagctcttcagtgggacgggctaggtaagagaggctgggagtaagtctgtctgatctaggatgtcttgcttaccacccaggtagggggttatatactcccagcctttctgattccattgtaactcttgccgaaatccgggtgaacggaagtagtctctttaagaactggtatgggcaggcccaagttgtcaaggcttcggaggtaatgccctggagagcggggaacggggtgggtttagaggcccaggcgggcacccaggaggcaggcccagaagagtactgccaggaagagttg

SEQ ID NO: 2930 - DNA, 2300 bp, Homo sapien
tcactttagacatagcatgccactttagatataggatgtggctagctctgttgtttttctccccttgggaatgctttcagaatggatacagaaatgacttttcacaagaataagggggaaatggctcccagagcttgtttcccagcagtcctaattactagaagtccatgtcttagtatttctttccatgacggtggcctctacaccatcctaaatcagatataaggctatttcactatttcattcaaaagacatttaccgaatatctatccaagatctacggtgggcactaggaatacaaaagggaataaagtacttatgttcaagtaactcagtttagtatgggagacaaacacaaatagaatactataaaacaatacacagcaacagaataatgcacaagttaatacgagaagattatcagtcctaactcagaaggggagggcttcctttcccctaacatcatcaggaaaatgttctgaaagaggtcaacttttcctctgcctatttgcctactctataaagtctagatgcacaggacacatggctatgaccaaataccaggaaagatagctggaggcaaactaccataaacacttaaaagatttgtgaccttggcagcattgatgtttccagattgaacttttcttccggattcacgctttgtgttctggcctaaaatagacaaaaacacaagtcaacagcccaggactgccccatcgtacacaagctatttatttccccgtctttgaaaaataagaatgcaggtttcatggtatatccacagagcaaagcttatcaaactctacactttaaataagtgcagtttattatatgtcaaccatatctcaaaaaactgtaaacatatgtccttatggctgttaacttccttctgtatttcaatccttggtatattaagaaataactttggaatcttggttaatacttttcttctaaccaaatattcctatatttacagcagggattcataacctgagatctatgaatgggccttagtgggatagcgaactccctgagattatgtgagaaaatgagagatactgcaattttttttttttccggaaagaggatccacaactattatcagattctcaaagggctggtgaccctaagaaatgaccattcattgctttgcgtaagcagggaaagagtttggggattcacatttttctgcttggatagggggatcatactctaacaggtccagcataattagtgatagcgcccccacagcatactgtttagaacacactcaacagtttgcaagataaattatatagtcacctcataattggatgtaataagaaggcctcagtaacccatttaccatcactaagaactgactacatactttaactgggaggctaatcggtcacagccaactaatgccagagattaatgcagacctgaaaggagctttgcaaatacaccactcacccccaggccatgtcagtggagacaagccagtggttataaccaaaccaacataatgtttatttccttcctctctctaaattaccttcctttacaatttaagtctgtaaatctttcaatccagtcccatcaaaccaaaacacccacaatgcttaggatttacatctatctcagggagctgtaaccaaaaacctgcatggacctacaatccatcagaaagaaggcggcttttttttttcaaaatagcgtttttattttatttttttccttaaaagttatttcccaggtacagagataatgaataataactctgaaaggcagtcagtatacagaagacggtaagggaggggagatggctagccaggctctgcagatgaggtacagaagttacacacagaatggaaacataccaaaggaagacaatggaggtggtgctcatcagaaaaaaataagggaccgggcgcggtggctcacgcctgtaatctcagcactttgggaggccgaggtgggcggatcacctgagctcatcagcagttggagaccagcctggtcaacatggtgaaactccgtctctaccaaaaatacaaaaattagccgtgcgtggtggcgcgcgcctgtactcccagctactcgggaggctaaggcaggaggatcgcttgaacctgggaggcagaggttgcagtgaacagagatcgcgccactgcaacccagcctgggtgacagagcgagactttgtctcaaaatataaaaagaaaaaaaataagggatcttccaaaaggaaaaggtgaccagtcgagaaatctgggaaaacccaactggttagtgggaaagagtacaacgccggg

SEQ ID NO: 2931 - DNA, 2300 bp, Homo sapien
ctgtttagaacacactcaacagtttgcaagataaattatatagtcacctcataattggatgtaataagaaggcctcagtaacccatttaccatcactaagaactgactacatactttaactgggaggctaatcggtcacagccaactaatgccagagattaatgcagacctgaaaggagctttgcaaatacaccactcacccccaggccatgtcagtggagacaagccagtggttataaccaaaccaacataatgtttatttccttcctctctctaaattaccttcctttacaatttaagtctgtaaatctttcaatccagtcccatcaaaccaaaacacccacaatgcttaggatttacatctatctcagggagctgtaaccaaaaacctgcatggacctacaatccatcagaaagaaggcggcttttttttttcaaaatagcgtttttattttatttttttccttaaaagttatttcccaggtacagagataatgaataataactctgaaaggcagtcagtatacagaagacggtaagggaggggagatggctagccaggctctgcagatgaggtacagaagttacacacagaatggaaacataccaaaggaagacaatggaggtggtgctcatcagaaaaaaataagggaccgggcgcggtggctcacgcctgtaatctcagcactttgggaggccgaggtgggcggatcacctgagctcatcagcagttggagaccagcctggtcaacatggtgaaactccgtctctaccaaaaatacaaaaattagccgtgcgtggtggcgcgcgcctgtactcccagctactcgggaggctaaggcaggaggatcgcttgaacctgggaggcagaggttgcagtgaacagagatcgcgccactgcaacccagcctgggtgacagagcgagactttgtctcaaaatataaaaagaaaaaaaataagggatcttccaaaaggaaaaggtgaccagtcgagaaatctgggaaaacccaactggttagtgggaaagagtacaacgccggggacacggagggaacgattacatctaagatcagtgaggcaagtacggttacttcgggaaaagggattgctgttcaagagactgttactgaaaataaatgtaacgtaaagtgaccaaggatattacctatttaccagaccctctttaagcagtctaccgacttacctcatttaattctcacaattctactaggaaatactgttaactccgtaatacagattgaaacatttaaattaccgctactaagggatgggccaagaatataaagctagacctaactgaaaaaaaaacaaaaaaaaacgttattcgtgcagctacatagcgacaatcaggctagaaagggcgcaggggcgggggaagcgtgggggctgagggacagaacgcggagtgggaaagagcttcccaagacgagcacacgtcaaggaaagaggctcggcgagaataaggccagtttgagtttgtgcagagaagcgaacaggttaagagaagagaggaaagcgggacactgggcttccaaaatgaagacgatgattggaaggctcagtggcccggtcagtgggggacggagctggggcaacactgaaaagtatggacagaagagggcgaaaagggggtccatttcctggcatccccagaactcactgagcacgagcactggacgatggcccatcatggcgacgcgatgcagagccgggtacccagagctgggggaaccggcagaaccttctggagagagagaaccagacagaagcccagaaaacgctgcctcctcagggcttacacctcaacccgctactctcaaggtagtcgccaatcaccgcacccatctcattgatcggcacaaaaacagaccaattgacagccttagtcccgccccctacgcaagaacggccagacaagttagacagagagcgcacgacgaaggcactgggagggcacaggcgcttgcgcagtagggtggccgctcccggccgcgtgcagcgcgaacgtcggcgcaggcgccaaggctctggcagttggccagcacaccactacgcatgtgtgtcaactctagggttgggtgctggggttgcggctttcggttaacaccgcaggtgaggtcgttaaactgtgtattgcgactcggctcctatcggaccgtgaaggctaagaaaggcttcacagttcccactcttttggtctagccttagcaacaggtggactagagaggcgggactccagccagcacatgggggaaagacctgccggcttggcgcaggg

SEQ ID NO: 2932 - DNA, 2300 bp, Homo sapien
ggaggctaatcggtcacagccaactaatgccagagattaatgcagacctgaaaggagctttgcaaatacaccactcacccccaggccatgtcagtggagacaagccagtggttataaccaaaccaacataatgtttatttccttcctctctctaaattaccttcctttacaatttaagtctgtaaatctttcaatccagtcccatcaaaccaaaacacccacaatgcttaggatttacatctatctcagggagctgtaaccaaaaacctgcatggacctacaatccatcagaaagaaggcggcttttttttttcaaaatagcgtttttattttatttttttccttaaaagttatttcccaggtacagagataatgaataataactctgaaaggcagtcagtatacagaagacggtaagggaggggagatggctagccaggctctgcagatgaggtacagaagttacacacagaatggaaacataccaaaggaagacaatggaggtggtgctcatcagaaaaaaataagggaccgggcgcggtggctcacgcctgtaatctcagcactttgggaggccgaggtgggcggatcacctgagctcatcagcagttggagaccagcctggtcaacatggtgaaactccgtctctaccaaaaatacaaaaattagccgtgcgtggtggcgcgcgcctgtactcccagctactcgggaggctaaggcaggaggatcgcttgaacctgggaggcagaggttgcagtgaacagagatcgcgccactgcaacccagcctgggtgacagagcgagactttgtctcaaaatataaaaagaaaaaaaataagggatcttccaaaaggaaaaggtgaccagtcgagaaatctgggaaaacccaactggttagtgggaaagagtacaacgccggggacacggagggaacgattacatctaagatcagtgaggcaagtacggttacttcgggaaaagggattgctgttcaagagactgttactgaaaataaatgtaacgtaaagtgaccaaggatattacctatttaccagaccctctttaagcagtctaccgacttacctcatttaattctcacaattctactaggaaatactgttaactccgtaatacagattgaaacatttaaattaccgctactaagggatgggccaagaatataaagctagacctaactgaaaaaaaaacaaaaaaaaacgttattcgtgcagctacatagcgacaatcaggctagaaagggcgcaggggcgggggaagcgtgggggctgagggacagaacgcggagtgggaaagagcttcccaagacgagcacacgtcaaggaaagaggctcggcgagaataaggccagtttgagtttgtgcagagaagcgaacaggttaagagaagagaggaaagcgggacactgggcttccaaaatgaagacgatgattggaaggctcagtggcccggtcagtgggggacggagctggggcaacactgaaaagtatggacagaagagggcgaaaagggggtccatttcctggcatccccagaactcactgagcacgagcactggacgatggcccatcatggcgacgcgatgcagagccgggtacccagagctgggggaaccggcagaaccttctggagagagagaaccagacagaagcccagaaaacgctgcctcctcagggcttacacctcaacccgctactctcaaggtagtcgccaatcaccgcacccatctcattgatcggcacaaaaacagaccaattgacagccttagtcccgccccctacgcaagaacggccagacaagttagacagagagcgcacgacgaaggcactgggagggcacaggcgcttgcgcagtagggtggccgctcccggccgcgtgcagcgcgaacgtcggcgcaggcgccaaggctctggcagttggccagcacaccactacgcatgtgtgtcaactctagggttgggtgctggggttgcggctttcggttaacaccgcaggtgaggtcgttaaactgtgtattgcgactcggctcctatcggaccgtgaaggctaagaaaggcttcacagttcccactcttttggtctagccttagcaacaggtggactagagaggcgggactccagccagcacatgggggaaagacctgccggcttggcgcagggtgaagtgggagttgtagtcttaccgggccggactgcgcagcctttttccgggcacactgggagttgtggtttatcgcctctggactaatggctgtatgtggacttttcccttcttaggaaat

SEQ ID NO: 2933 - DNA, 2300 bp, Homo sapien
aggcaacaagagcaaaactctatctcaaaaaaaaaaaaaaaaaaaaggccgggggcggtagctcacacctgtaatcccagcactttgggagtccaaggcagttggatcacaaggtcaggagattaagaccatcctggctgacacggtgaaaccccgtctctactaaaaacacaaaaaaattagccgggcatggtggcaggtgcctgcagtcccagctactcaggaggccgaggcaggagaatggcgtgaacccaggagacggagcttgcagtgagcagagatggtgcctctgcaccccagcctgggtgacagagcgagactccgtctaaacaaaaaaaaaattatgtccaggctatggaatggtaggtctttcagataatctgatccagctaaagttaagtggataggctctggagtcagaaggcctcaggcatttccctggcccaccaatggggctgtcccactacaactcagtatctcttcactctagttaacaccatgtcttctaagatcctgtacatagtcttgttctaagtattaagaggagatacaaaggaagaataataaattcatttaacaaataattactgagcatctactatttaacagatccagttctaggtgctgggaatacagcaatgctcccatttagtggggaatgcaaaggaggtcttgctttttaagggaggggaagcagggcctccaacacacaccttttctgttaggatgactagtgtgccgctccatctgaacaccaacaggtgtggtgcctgggaaagaatcatagcatcagatgatcaacaatccatgttagtattttcactatgataatttcctaagttgtctccagcagatctcagcctgttccaatctgcagaggaaaaagtaggaaactctatttcatggccaaacaggtgactgttcttgaactgttggtgctctcacggccccttcactagtttggaaaacagttttcctttagtgcttccttttttttctggacaaaatagtaatttaaccaaacccaaaccttaaacgtctctgacgaacaggcagttactttccgtgttctcaccatgtttaatttccacggtatgataagtccttctcctatcccgaatggtaattttaaaactctggctccccatcatctctaactaagactcaggacagcgggagagggatggatgtgggggaaaaaaatctcaaagcaccacagggaatacttttttttttttttttgagatggagtctcgctctgtcgccaggctggagtgcagtgacacgatgtcggctcactgcaacctccgtctccagggttcaagcgattctcctgcctcagcctcctgagtagctgggattacaggcgcgcgccaccacgcccggctaatttttgtatttttagtagagacggggtttcgccatgttggccacgctggtctcgaactcctgacctcaggtgatccacccgcctcggcctcccaaagtgctgggattacaggcgtgagccacagcgcccggcggaaatacttgggaaaatattttagataggataacttaaggaaacgcaagccatcaccctccggtactgctcacagcctcactgaaagcatttcctaagaagggaaaagtccacatacagccattagtccagaggcgataaaccacaactcccagtgtgcccggaaaaaggctgcgcagtccggcccggtaagactacaactcccacttcaccctgcgccaagccggcaggtctttcccccatgtgctggctggagtcccgcctctctagtccacctgttgctaaggctagaccaaaagagtgggaactgtgaagcctttcttagccttcacggtccgataggagccgagtcgcaatacacagtttaacgacctcacctgcggtgttaaccgaaagccgcaaccccagcacccaaccctagagttgacacacatgcgtagtggtgtgctggccaactgccagagccttggcgcctgcgccgacgttcgcgctgcacgcggccgggagcggccaccctactgcgcaagcgcctgtgccctcccagtgccttcgtcgtgcgctctctgtctaacttgtctggccgttcttgcgtagggggcgggactaaggctgtcaattggtctgtttttgtgccgatcaatgagatgggtgcggtgattggcgactaccttgagagtagcgggttgaggtgtaagccctgaggaggcagcgttttctgggcttctgtctggttctctctctccagaaggttctgccggttcccccagctctgggtacc

SEQ ID NO: 2934 - DNA, 2300 bp, Homo sapien
gcagtgctaccagagtctgccacccagagtcggacccctggctggcacctgagttagggaaactggatacctagaatccaactgtcctccagagcccactgtgtgtcagaggctggagcccctgaggggaggtagaagtgagctggggaaggggcaggaggaaagaaaaggaagaggttaggggctctactcttgaccccatccctgcccattcctgagaagcagccctaccctgcatctgttctggggggaggttgtcccctggggacctaggccatactcatgggagtggcagcttttcctttggactggggtttgtgacaccattacagacactcacgggttccttccacactatgactccctcagacaggcgggcctgggatgggctgccgctgcagcgtagacagagagcctcccctcccaccagccccatggaatacttgccttcaccctgtggaggtgtcaggtgtcagaaccaatagtgccagggttccacacctatttagaacccttcagtggcccagaacccactgagtagaggccctgtgccttagcagggccttcagggccttcccagcaccacccccagcctcccccaacctgagttcctgaacacacgggatgcttacactgccaggctcggtctatgttggtcccacttcttataatgtctcctcttccttcttcacttgtccaattcatagattgtccttccagatcaccttcatacattcattaccttctcaggaagcaattctccatctcagtcccctcccttacccctatccctggggcctctgcggcccctcctcctggacccctgcagtctctgttcttctctgggttggtcgcttatcccactggtaatcaaatttcctcctaagtgtctgtctccacaccagacagtggttcctggaggaaggggctatctggttcatctccaaagcctgcctcacagtaagtgttcaataaatgtctgtctcctccatgtctgtctaccgggcccccagtggatgccaatcttgcttgggtaatgaggaactctggacttggaattgagaagccctccttgcattcagcctccctccgctccagctgcagaggcagcccaggctctctcacatccacagtgggcacacagggaacctgggtgtcagtgtggcccctgcccagcctgcttccctgtggtgtggtacagattgggggtaggaagggggagagtcccttaccttacaccgcttggagcggtgtaagggactccactgcagaggcccagacgccccagcctggttaatcatcagtgcctggagagcactatttatctctgttttccatctctgctttttcagtagggaaaaagattaagtaaaccctaactctctcttgtgttaaccctagaggggccagaccagagttttgtttgtttgtttgtttgttttctgacagagtcttgctctgttgcccactctggagcgcagtggcacgatcttgctcactgcaacctctgccttctggattcaagcgatcctcctgcctcagcctcccaagtagctgggactacaggtgtaccaccaccacgcccagctaatttttttttcttgtatttttagtagagacagggtttcactatgttggcctggctggtctggaattcctgacctcaagtgatccacccaccccggcctcctaaagtgctgggattacacgcgtgagccaccatacccagcccagaccggggtctttaagggccatttattctttgggagacactctaaagtaacatcatgtatgagggtgcgggttctcccacccccaggtcccacagctgtgccctatcagggcagaacacatggcgcctttccagggtcgcgtccaaggacctggcaccgtaacagtgccaggatcagcgccaggactgtgcgactcccttccccaagtcttggccctaccttgggccgagggtccaggaccccccgacgccccgctcctggtccccggggccctgggcctgcggcaggtgagggcggggcctccgtgagcagggcctctgtgggcggggctccgtgaaacctgccctgccgccgggaattgtctgccaaagcctgcgagcgccagccgagatcgcagcccaacccatggccgggtctcctagccgcgccgcgggccggcgactgcagcttcccctgctgtgcctcttcctccagggcgccactgccgtcctctttgctgtctttgtccgctacaaccacaaaaccgacgctgccctctggcaccggagcaaccacagtaacgcggac

SEQ ID NO: 2935 - DNA, 2300 bp, Homo sapien
taggaacccaaggaggaagtggaaagattcctgggacctagccctggaatgaggacaaaaggtgaccccatcaggctccatgctcaccgtagctggagggactgacctgggctggttggagaggccaagccctgaggtgaggagaaggaggttgagggacaaggcttccgtggagccatcccagctcatgtggcccagtctcttcagttcccctccttcctccacagccccccatgcccattgttggctgtggtaggtgtattgggaggagacccttgagtggaggcagaaggatgactgctgggatcacacaaaggttcctgatcactgtcagcccttgctaagaggaagggaggaagtttgggagagctgaggccccaccccccattctacctacggggcctcagttcccagctctgttctgcatgggcccagatacagccagctggcctgttctccccgagtcctcagagatctgaaagaagactttcaggaaagggggattcaaggatagggtgagacctctccctgccccagcccattctgggtgaggaaagctacagatcttcatttattcatggcactagctggatgaggtggctcacacctttaattccagcactttgggaggctgaggcaggaggattgcttgagcccaggagtttgagaccatcgtgggcaacatagtgggaccccatctgtacaaaaaaatgagccaggtgtggtggtctgcagctgtagtccccactaatcaggaggctgaggcagaaggatcgcttgagcccagcagttcattgcagtgagccatgatcgctctactgtactccagcctaggtgagagagaccctagctcaaaaaaaacaaacaaaaattcatggcactagcattttacaacctgaccctttccctctgctggctgattccttcccgactaccactgaatcttttccaggcctgaaaaaatgggcagctctagcccagactggtcattgctggggagagcggcccatctcaatccagagaggcttcctggaaaaggaacaactgagccctctttaggagaaggcagttgcccagccaggttccacaggacaaaagggtataggtctcatcatagcctgacaagatgtcctgagaaaggggcagggagagagctaacccataagaggtggccctgtgtgccccgtagacagatagttccaagctctatcacctccatgaagcctcccatagcccaggcaatgatgctgatccctgcctcaagcccctgcaccctgatcgcattcttattcaggggactgtctgcccaggactgaactttcctaagctaggcccttggtttttcactctatttcctcctctccctcccactactttaccttgagtgctgggatcgtctcatcatgggccctccagaccttgttccacttcataggactgagccattctttgtggtctgggtgtgggtgattatcccgccactgatttcagtcagggagcacagagggcaggaaagacaggtacccttagcgcccctgctcaaatgcgaccaagcccttccctcccctgaagtccctgcctcagcagcattgtcccccacatggtggcccatctattcaggctgggtcaacagggggacaactagtaggtcaaggaggtggtagggacagaggccaagggggctccttcctcaccccttcaggacaatgaggcctctgcccctcagggacagcccctctgatcagcaccattatttctgtcagtgcaggacaatcggacacttgcccgctcatgaactctgtctatccaaccccaatgcctgatctctggggacaatgatggacgaggacacggcccctgcctgcctcccagagaagactgttgcggggagacaggctgcgctggggtcagggtggaagcccgcggggccagcggcgttgagggaaggttctccggaagcagccgctgttctggcttggcgcaagtgcgtgtggacgacagcaggatttcctgcccagggacatctggataagaggcccaaggtccccaggagcccccaggtgcttctgccctgtgtggccagagccccctcggccaggagttagaagctgctcctctgacctctggaggacccggcactccgaaccccgcgcagcctgggaaaggcctgagattccccgctattgggattcacatcacgacgcggcggccccaactcggggaggaattagacacggcgtgagtgtcccaagtgcggggcggtggccgtcccggggcagacgagcgcggctgccgcgtcc

SEQ ID NO: 2936 - DNA, 2300 bp, Homo sapien
aaccttcccaccccatcttcagtcttggaaatcatctccaagaacaaatggcctcaagaagctctgaggatctcaaacacaaaggaatttgtagcttagtatctatgctgcccagagaaagcaaagaattagagagattaatcagggcctttcctaaaagaatccatttatctggcttgacctaaatattttaagtgaaagagtgtttaggtgcgttgaaagtagtatagtctagagtcactttgtggaatagaagtcaatgtagccaaagctagaagtagctctgtctgcatttactacaagtctgcatcccatacgccggcacctggccttcccagacacggggcaggaaggagtaataagggggtggaagaactggacaaaatgaccttgactgactccagtttcctgtgtaaatttaacatttcctcccaggacctgattttatagctagaagataatgattcaattatatattatgtgggagaaatattggagaatccaaactcaaaaaaattgtgcttcagggagcctagaatacatatgtcttcttcctttagagatttagaggaaggcgagattagtagcctcttactttctcagccatttggaatttgggttttctgggggaggggcaggtggagactggattagggagaaagggagcaggttttaggcgaggactaataattcctaacactacttcctgggcgctgggcctgcatccctttctcttatctttcaacactgtgagatagtcattattaaccccattttactgatgaggaaccacggactcaaatgagttgctaatgttactcagtggtttccaatccagtgctttttccttttttttttttttgagattgagtctcactctgttgccaggctggagtgcagtgatgcaatctcggcgcactgcaacctccccctcctgggttcaagtgattctcctgcctctgcctcccgagtagctgggactacaagcgcgcgtaccaccatgcccagctaatttttgtatttttttttttagtagagatggggtttcaccatgttggccagtatggtcttgatctcttgatctcttgatctgcccgcctcggcctcccaaaatgctgggtttacaggcatgagccaccctggccggcctaacccaacccagtgctttttctactgaacttgcctgtgggaacaactggagagacagtgaaacagggagggtaagatggggttgagctgagaaaggaaggcatggggcacgggagggggagggtgcaccaagagaaaagccctgcctgtgagcaggggctgggagctgggatgagagaagaagcaccaagaaagataggattcctttaaaaacaaaaaaacaacaataacgaaagcctttcatgtagcttgttggaaatgtgtatttgggatccactgaggctcattcacatgagacttagaacctgtatcagtaaccacaatgggtttacattattattgttgtctcctattagtgcatttgacctacctcaggatatccaaaggagaacagagggaagtgaggggttgagaactgacaccctacaacgccagcacctcagtggaaaggaggaatagagcccaggagggatgtgggggtgagggtttgtgtctgccttatgtgagcatatggtgtgtgcatgtgggtgtgtgggtggggttgtcaggagagtgatgggtgactgtgtttgtgagctgtgtgtgtctgctttatgagggtgagaaactgagtggtgtgtgacctggtgtgaggttggatgtatgtgcttccatggtgtgtgggaagctcggtcgtgatattagggacacctggctacatataagtataaatccactctaggaacagacactcttggatttggaaggttaccaaatgcagacatcacggtgacactgctgagttctccccaccccctctgtaccagatcgcatctcctccaactgaaccccacaggagaactgtgggactggggtgcagggaagccgtgttaaaaggggctcagaaaggcctcaccagagttaccagttaggaaatttcctctcttgtataatcacacctctgcctgtgtctaagaattttcagttctattctttagatactgctacatctactatttttactggaaaccaaattgtaagctggtttctttattcatttctctcctcagcccctcattttaataccctcctattgaattctaggtccagaaagccaaaggcaattttctctcaaatatttgacccaagtgttgcattatcagccacaccct

SEQ ID NO: 2937 - DNA, 2300 bp, Homo sapien
aaatcagacttccccaaattattgaattagttattatcatctggattcccccacctcctacaatcctgcaccttggggtacaggctggtgggtaggaacaggaagcccccatctcttaggcctgctgagatgtttcagaaggcgctgcctgcgggagaggaagtggagtcctcttccccaaacctgctcctcatgcctcagtctcctggcacactcaccactcgaaggaaaccagggggaagatacacagggggctgtgcaaatttttgggtgatggtggcagaagtggggaggaagcttggaggaacataaaagatgcaatccacagctgtctgcttttaattataattatcccctttcgcttcctttctggctaatgaggggggggatttaaatttttttctcccttttctcccccttcctcctttccctggaattgaggggtggggtgagttcaggatcctcctccccttcctcccttatcccctggttactgggagaaaggcagactccagagggtggtgacagtatgaagagatttgcaggaacaaaagaaggacaggtttggattgctggacacgtcccagagttggacagagccccccccccattccactggcacccccctcccatcaaccccccagctccctagacaaggaactcaatgtcttccagccggtgagaaaggagctaacgggagccctggtctagagagaagggggagggaaggggtggggagatgggggggtgcaaaattagtctcaaaggatctttatttctgagctagtgaagcagatgtaatcaaggggagagcaaaataatcataatgggaggaatgggggaggggaagcggggctggaattgggggactgggccaggacaggactgagaattggggggcagagaacattgagtggggagagtctgttgccttctctcacccctctgaagtctccctgctttgaggtggggaaagaaggacccggtctatagactctgaccttagccctcagaatccctcattcagagcttagggatcgccaggccagaaggtggctgggaaggcaccagggagaagacagcctcccgcccccagttgagggaggtggtgaagagaggggagactgaaagcagtgggggagggtgagagaggggagccagcagagactcaagtggcctccaggtctgtgggacaaaagttggagggagatttgtgtatgagagaggagggaagggggccgtggggaagggggggctttgacaatgaacttgagacaaacttcattagcatgcaggcctgctgtctgtcacgtcgagctcagaccgagttcccatgcagaccaggaagagtgggagggagaaaaagggaggggctgaggatgggggttagagagagaaaagagacccgaccgttgtaccattctgggccccagcttccaccaaatatcgggaccccagccctggaaaccaacccccaaattgctctccctcctctaggaaaaagataatttatctcccactttgactctgtggtcccaccccttctcttctcttgtctagacttccaagtgctggccttcatctccccgcaagatgcgccccctccaactctcagccttcatcttcctactgtcactgtctccttcacaagtaagatctggatttgtgattagttaagctgaccgggataggagttgaggggaggcctgggaaggggggcctggaatgccctaagccttcaaatggcaaactgtgtcaccttctcatgactccttatcagctcagcgcctcaccctccacacaccacttaatcactctatcaagttccaaagcgaattaaaactcggagactagggaccgagtctttccatcacaccctttctcttgcttcccttggggacgagggtggcctggaggaacaatagcttcccttagccccttcttcctgcctcaggttagaaaaggcagcaggggaggtggcaagcagagtggaggtgacaaagacccctgcccacacaggcattggaaggaagaaggaggggcttcgtcagagtgggctgttattttggtggtggtggtggtggtagtgtctccagagaggggcagcaccccctttttgctgcctttccagggagagcagcaagagaaagaaagagagaggcaagcgaaattcctgaatggatagacagatgctacgtcatcggagctgcatcctccactccacaagaggctaggagctggggggagagaggcagtccagccgcaggggccacccgaacagtctctcctcctcacagaag

SEQ ID NO: 2938 - DNA, 2300 bp, Homo sapien
gcggctcaatcctggtgggagaaaggagggtccagagtcggaccatgtccacgtggtttctgctcgtcatgtgttggttggaatgaatgcatgaacacaccaaaagccactgcttggggtcccatggccatttactaggtggtgggaaaaggagaaaggatttgataatatggaatgggctctggattaagactcagactcagcctctaaaccaacatggggtggcccccatcctggccccgtgccgaataaacctggagagctcatcccttccaactccaaataaacagctccttgttttcttgccagatctgaattctctgtgcctcactctatgtgctctatgtgagtttgtgactctatctctggttcccctactctctgtgagctgcagttctgtccctcttgtctctgtcattgcttcgaagcttttctggcttcatctgtctctgttttcaggtctctgtctgtcccctcctgcccgcccccccgcccccgactggaattagcctttgttaattcaaaggcttctcactgagctcctccccactcttcccagaataacattgagtaaaatgagataaaaccctcccgcccctaggtttttttttctgtcctactcccctcagccccctcctccagggctacaaccccctcttataatgtcagataattgctggtgtgcggctctgaggagccagagctgataccagggaaggagaaagggggagagaaataaataataatctgtctccattcagcgtatataggttacctgatttgcatatatgctaataacgctataattaccctgctgttctggcctatgatcaagttctataaatacataggatagcagagctaggcctagcaacaccacccccaaaatcatggagtatatgtatgtatatgtgcgcattttatgtacactctaaacctatgagcctctctttgttagaacacactcccttacagatcccagctcttcagacgttcagctacccctcttgtgttttgaagctactttggaggcgggaagacatgcctgaatgagaaaacattctaggttttacttaattcttagtattaatttcattatcaatattatggctatttttcggaaaatcagacttccccaaattattgaattagttattatcatctggattcccccacctcctacaatcctgcaccttggggtacaggctggtgggtaggaacaggaagcccccatctcttaggcctgctgagatgtttcagaaggcgctgcctgcgggagaggaagtggagtcctcttccccaaacctgctcctcatgcctcagtctcctggcacactcaccactcgaaggaaaccagggggaagatacacagggggctgtgcaaatttttgggtgatggtggcagaagtggggaggaagcttggaggaacataaaagatgcaatccacagctgtctgcttttaattataattatcccctttcgcttcctttctggctaatgaggggggggatttaaatttttttctcccttttctcccccttcctcctttccctggaattgaggggtggggtgagttcaggatcctcctccccttcctcccttatcccctggttactgggagaaaggcagactccagagggtggtgacagtatgaagagatttgcaggaacaaaagaaggacaggtttggattgctggacacgtcccagagttggacagagccccccccccattccactggcacccccctcccatcaaccccccagctccctagacaaggaactcaatgtcttccagccggtgagaaaggagctaacgggagccctggtctagagagaagggggagggaaggggtggggagatgggggggtgcaaaattagtctcaaaggatctttatttctgagctagtgaagcagatgtaatcaaggggagagcaaaataatcataatgggaggaatgggggaggggaagcggggctggaattgggggactgggccaggacaggactgagaattggggggcagagaacattgagtggggagagtctgttgccttctctcacccctctgaagtctccctgctttgaggtggggaaagaaggacccggtctatagactctgaccttagccctcagaatccctcattcagagcttagggatcgccaggccagaaggtggctgggaaggcaccagggagaagacagcctcccgcccccagttgagggaggtggtgaagagaggggagactgaaagcagtgggggagggtgagagaggggagccagcagagactcaagtggcc

SEQ ID NO: 2939 - DNA, 2300 bp, Homo sapien
agccagggcttctgatagccaagggcccctgtccattgctcttgtttagatgaccaaattgggttaggtaacagtggaagattggctgcggtgggagggatggccgttagatagcaggaaggacttcctaggattggagaccactgctgggcttcattgtttcagaagatatgggagaggtgtagatactctggacaaatgtaggtcagacttaaaggtaggtaggagattggttgtctgcagctcccattggttggcatacaatgctggggcctccatgccctcccacgtgtcaccagcctcgcatgcttggttggagggcttctgacaaagcaagtttgagccccagagactactttgagtccaaggactcagccctgagaagttctttctgtagtcttatatctgtcctacctgctgtcctgggccatttactcccaccctgcactgtggatgcgttttggaaatggagctagaaatggaagtaaaggacagctcacctccctcctgctgctgccgccccaaccttagcactaaagaggggaatgggattcttctcctgtgacgccccaaggcagtgacagagccacacttcaccctgtgaatcttaccaaactcctgtagctgccatgcttgcttattcctcgtgatttcacaccccttccccatctctgcctagacaagagtaggggacccagttggactgagagctctatactgtatcactgggagttactataaatccaagaatgctttctggaggggaaagatgggaacaaaggcctgaggtgccaagaactccacttggtgtccgcaagtgcctacggatcctgggtgggggtgacccaggtcctggaatgggaagttgagcctgaaggaataaggtcagagacgctatgcaaatcctcatgcaaatgagtggtggtgagtcattgcagctcggcctgctgggatggagtatgaagacagccttaggcttgggttctagagctggtcccaccagggaccaaacagtgaccttgggctagttgctgctcagtaaccacaagcaggtgggtctgataggcattcccagtgtgtgaggggattgggatgactgagcctctgccacaagggccttgtgtgccccacttggtacttgttctggctgaccagagcctttgtgaacccttggccatctgttggggggttactgtttagaaggcacctgccccttcaccagccccatcctgactgtcttctagcgccctcattgcctttcctccccagcaggaggatgacagacccagccaggccatctcttcagttcctctccgtgacttacacaattctgatctcccttccctttgggcctccccagagagcacaggagccatgtgtttgggccagaagggcatttgggtacctagtccacccagctacccataatactggccagtggggtgaagcctgtagaaggcagtgacttactcaggatcacatcttagaccagagcagggactagaacccaggtatccagaatcccagcttagagaccccatatttccctaagctgttcattgccctacctcacccatcccttctctactgggactcaatctcctgttgcccccaaatacttctgagaacagtctggctagctctaggagcttgttttgtgggggtgcggggtggttacctaggagccagcccagaggccataaggggaaggtcagagctgcagtgggaagtgctggaccctggcggacaggctgctgccttgtagagagccaaatggcctcacagctgctacaggaaggatgagagctagactacaggaagaacaagctggggtgaggaagacatggaggaggctcaggagacagaccctcactggagaggcatctcctgggcagagaacaggatgaccccatcccaggagacttgccagggagaagagggcgggaaggctagggtggggctcgggagagttgtccagcggaagctagggggagggctcagccctgctctccataccgtgtgctccccttggcaagtcggttcctgtcccttaagctgagactgcagggcctgccccccatttgagttcttagggtgcctggggcctgagaccacccctgccctaggcccagctttcctggactgcctgcccccacaaaccaacagcccgcccccaggtccccagtcggtgagttaaaattagctcagtgcccaggctaaaaatagcccctgcccagccctgaggctgctggactgggggaggggagtccccgagggagggaaagacggtgggaaccagg

SEQ ID NO: 2940 - DNA, 2300 bp, Homo sapien
ctgaagtcttttgggcaaactagccctgcctggcaggggtaactcacatcttctggtgttggggccccagcctcccagatccaatgaggaactgagaagctgtatttggggacacggtgggacactgtttcctgaaaggggggggtcaggtagaagggttggaaactgaggccaaggaagtaggagcttgctggcttcctgtcttaggacacacaagataagtctccaacctatttgcagagcaattccactgaactcacctcctttaaggcttgcatgagccaatggaggcctagagggttctttgcagaccagcccttggcccaatggtctggtttgggttattatacagcataagacactgtactaagcaatctgcttagaagaactaatttaatcttcacactaaatttctgagttagctactattatcaccatctctagtcatggtcaccatgaggtaggggaaagttaaataatatgcctgtgttcacagctaatgaatggtggagtgaggatctgaaccaggacagcttgacggcaaagttgacatttctaaccacaatgacatgttgcctctctctatatattggagtctttgtccggtaaatcagatccagccagaaatcagggtgtgtgtctgggcgcggtggctcacgcctgtaatcctagcactttggaaggccgaggcgggcggattgcttgagctcaggagttcgagaccagcctgggtaacacggtgaaatcccatctccactaaaacacaaaaaattagccgggcgtgggggcgtgcgcctgtcgtcccagctattcgggaggcgggaggggaggcgaggcaggagaatcgcttgaacctgggaggcggaagttgcagtgagccaagatcgcgccactgcactccagcctgggcgacgaagaaagactccgtctcaaaaaaaaaaaaaaaaaaattcggggtgtgtgaagaactgagtgagtgcccttctgttctgcaaggttctttgagatctaagccagatgccatcatttccttacgctcttgggagaaagcagcaggacttggaagtaacagggatgctgaagcctgacgggtcagttgtccagtaggcatggcacccacactcctgttgtagggcacgtaaatattcaccacaccctggagcaaccaggaatataaaaataaaaaattttaaagagctactactgcttctttaataagacatttctgggtgtttactgtgcggcgggaggtggggaggaattagggtcccgcccctttaaattgccccctcggcagtaagtgctgtggggccccgcaagcactggagattaggtcacccaagaactatgagctgtcgctttaaattgctgggcgtctgccgagccgggccctgggaccggagggggcctgtcacaggtagagggagcaactgagctccctaggtaacaccccccaaccccaagaatgtcgcccgtgagtggggctttgtcacacaccaagtgggggagatgggagcttttcaccacttccagtctccccttaatttatctacttagactcccacctcccaactctcctggggcccggggccgcgaggaggtgccgaggtggcgcgtgttgagagtgtgcgtgcagctcgcacggcctccccggaaaggacctcctggagcacgcggtggcagcagcgccaggcgggcgggcgggcggccggcgtgctccgaggggcaccgtgggagcggaccgatccctttaaaggcctctgggtctcgcctccctactttgcctcgcttcgtcccttcctccctccctcccggcaggcggagggatccgccgctcccagcgccgcagcctagcttgggagggcggtggggtgggggccgacccggcctggcccggccagccctggggaagcgaggggcggggccgcgtcctcgggaccgccccagccccggctccgccccgccacccccacaggtgcctcccattggcccccacgcctgtccgtcacccctttccccccacccctcaagctaggctgagctgtgcctacgtcggcctcgactcccgggggctggaggagttacctttggagcccgaaaggaggaaggaagcaaaatatcaacaacagccgaggcggctcaggcgctcggccccggttccccgcttgcctgccgcccgcctgctggcccccgcgcccacgacgggggcccaggcctcacggcgccgcccagggcccgcgcggacgccggcctcatttattattctccccgcccggagctgcggcttcccggtgttgaag

SEQ ID NO: 2941 - DNA, 2300 bp, Homo sapien
atcacttgacgtcgggagtttgggaccagcctaaccaatgtagagaaaccccatctctactaaaaatacaaaattagccgggcgtggtggcacatgcctctaatcctagctactctgggagctaaggcaggagaatgacttgaacctgggaggtggaggttgtgttgagccgagatcgcaccattgcactccagcctgggcaacaagagcgaaactccatctcaaaaaaaaaaaaaaaaaagaaagaaagaaaagaaaagaagaaaagacatagagaaaaataaaatagggcaaagtgggtaatgggtagagacatagtagggacagtttttctgttttacataatgtagatctctttgctgaggaggtcattttgaaagagacctaaagggcataaatgattgccatgaggctatctggggcagaggccttaagaaagcaatgtgcatggtgtgttcaaagaacatcaggaagccagtgtggtggagtgaagtaaggaagaaagaggagtgggagatgaagaccaagtagccgaggccagaccacgtaggactctggtttttactctgagtgaggaaggaagccacgggagggttttgagccgggagggagttgatctgacctacttcttttttttttatttttagagacagggtcttgctctgccacccaggctggagtgcagtggtgcaatcacagctcagggtctggttctgtcacccaggctggagtgcagtgatgcaatcacagctcagggccttgctctgtcacccaggctggagtgcagtggtgcaatcatggctcactgcatccctgaactcctgggctcaagtgatcctcccaactcagcctcccaagtagctaggactacaggcacatgccaccatgcctggctaattttttaattttttgtagagataggatctctgtacgttgcccaggctggtcttgaactcctgggctcaaactgtcctcccatcttggcctcccaaagtgttggaattacaggcatgagccaccgtgcccagcgatctgatctacttaatgggatctttctggctgctgtgctgagaactgactgcaggagtacaaggggaaagcagggagacctgttagacagctattggagtaatccaggcaagagatgatgggggcttggccttgggcggtagcggagatgggaaaaaggagtcagattttggatacattttgaaagcaaactgacaggatttggtcatataatagatatggggtagaagagagaacagaattaggtatgactccaagatttggggcaagatgggagagacggtgggacatgcaggttaagcaggggaaccagttcagatgtgagctgttgggtttgaggtgcttgttagacattcacttggaaatcacaaggagctggctgggataaatgaatgggctggaggtgtgctttcgggagcatatggtgttaaagtcatgagattgggtgagatcatctacaatgtaagtatggagagagaagaggtctgaagactgaagattgggatgctcccatgtttagatgtcagggaggaaccagcagaggtgtctcagaaagaatagcctgtgaggcaagaagagaactaaaagagtgtggtgtcctggaggtcaagtgaagaaaatcgttcaactgtttcccctgacttctggctgatgattcacatgctactcacctctctgcccttcaccccactgccagttacttcgatgccctgctgaaattgcgacaggagcgtgggatgggtgaggacttcctgagctggaatgacctgcaggccaccgtgagccaggtcaatgcacagacccaggaagagactgaccgtaagtatagtctggagctgggtggagatggcccaacttaggcagtcctgtcccttagccattaagtctaggggccccctgcccacctagatctctctttcttaggggtccttgcagtcagcctcatcaatgaggctctggacaaaggcagccctgagaagactctgtctgccctactgcttcctgcagctggcctagatgatgtcagcctccctgtcgcccctcggtaccatctcctccttgtggcagccaaaaggcagaaggcccaggtgaagttagggctggttgggttggtcatcagagcaggaagaacattctctgtgggttgcactgtacccagtctggcagagctctattctgatggacacaatggcttctgggtgggggtgaggggggtgttccaatctggtaaagaaggatggccctgttgccagggcagtgggcagtccatg

SEQ ID NO: 2942 - DNA, 2300 bp, Homo sapien
atttagctctagtctctaccagttattagctgtgtgacctttctaagtctcagtttctaatctgtattgtaaagattaaataagatagttattgtaagatcatgctaaatatagtacccatcctatagtaaacactataggtgtgttggtccataactctggtgtggaagaaattaatctctactcaacttctgtttcaagccctgattccactgggatgatggaaacaatgtgaacaagtctggggatttgccccctccttttccccagggtggagtctaagtagggggaggtatatgaggccaagatgaggctcatctggtcctcagccgtctattcacaaaggtgtccactgacaccttctttcttctcatctgcctggccctttcaagcccagggtccaagcagaagaggggagtaattcattcggatacttcctttctgtctaggtcaggaatttctgcaaagctgtctattgtctgcctggctaattatataactgttctttctcagggtcctgtacacctagggtcctttccaggaagcagagaatgggaccccagttgccaggagccaccaacatctagattctgtctcccccagctggtgagaggtaaggggaatccctcagatcttcaggggggcatccactcttcaaattacacttttcccagttttgtctcagcccctgagtctcctctgttcctctgaaggctctaggtatggatttctgttttctgttctttcacattctcctctcctacctgcccaagctataagcctaggctgcttggttgtttggatggagtgtggggaaagggtaaaaggagaaatacaagatggggaaacctatcagataatattttttcagcatagttgttggtgtcataattattttttattagttcaggctcttttttttttttttttttttttttttgagacggcgtctcactctgtcgcccaggctggagtgcagtggcacagtctcagctcactgcaacctctgcctcctgggttcaagcgattctcctgcctcagcctccggagtacctgggattacaggcataccccaccacgcctggctaatatttgtatttttactagagatggggtttcaccatgttggcctgtctggtcttgaactcctgacctcagttaatctgcccgcctccgcctcccaaagtgctgggattacaggtgtgaaccaccgtgcctggcctagttcaggctcttattatctctcttctgtgctactgcagtagccttccaactggtctctgcccctagcctcacccccttccaatcccctgctataagatggctctttttaaaggacaaatctggctctgacctatgtctaaagtgttccttggctggtgactgctcaccagaccccatgccagggccctagcatggtgcccaaggtgctactggacctggccctgtgcctccaggatcccttctggcctctccctggctgagctttgttctcctctaaaactgaaccaagtttaagttcccgaactcacctcctcgttcttgcacatgctgtctccactgactgcactgcctctcttcttcaatctgatgaattctctttcacttctcaacccaaatcagctgtcacttccaccaggacgtcttccctgtcattcgctgctcttattcacagcaatgaccccctccctctgtgcatcaccgacctctaatttatttgactatatgtctatcacttgtgccagaacagcaaactcttttagagcattcactgccctcatacatctctgcattcgcatcacctagcttagtgcatagcgccaagtaggcccacaagttagccggactcgggaacacataggaagcagagtaggggttaatgggaatactaggtggagatgacagaggcaatggcaggggcagcagctagaataagactgttaagcagaaaaggagcctggaaggaacaagacgaggaactgctgtaaggggagcggtactgccccggcctggggcgcctcttctcccagcacctgggcggcccggctccgcggccgggaactacaaatcccaggattctcagcggtgtggacgggaagtgtcctgtctggcggtgccgacggtgaggggcggtggcccaacggcgggagattcaaacctggaagaaggaggaacatggagaggagagcagcgggcccaggctgggcagcctgtgagtgcggagagggtcagagaagggtctcgcagtggtgccgctggtcgggggcttggctgtcccgggagagattggggcgtgtgtc

SEQ ID NO: 2943 - DNA, 2300 bp, Homo sapien
tattttaacaaggtctgtttgtacagaattctctcagcttcgactccctgtctctggtgataagaatgtttctttcctcctggaggaaggcattcattgttcacatgggagttttgtttcctgctttcaggaagaaaaggggaggttagagcactcttcttatacttaccgtttttctttttcttttcttttttttttgggggggggggatggagtctggctctgtcgcccagactggagtgcagtggcatgatcttggcacactgcaacctcctcttcccagattcaagcgattctcctgcctcagcctcctgagtagctggggttacaggcgctcgccacccacgccctgctaattttttttgtatttttagtagagatggggtttcaccatgttggccaggctggtctcgaactcctgacatcaggtgatccacctgccttggcctcccaaagtgttgggattacaggtgtgagccagtgcatccagccctaatttttgtatttttagtagaggtggtgtttcaccatgttggccaggctggtctcgaactcctgacatcaggtgatccacctgccttggcctcccaaagtgttgggattacaggtgtgagccagtgcatccagccctaatttttgtatttttagtagaggtggtgtttcaccatgttggccaggctggtcttgaactcctgacctcaaatgatccactcaccttggcctcccaaactgctgggattacaggcgtgagccactgtgccctgccaagacctcgcttctacaaaaaatatgaaaattagtcgggtgtggtggcacgtgcctgtagtcccagttactggggaggctgaggctggaggatcacttgatcccagaggtccaggctgcagtgagccatgatcaggcggctgcactgcagcctgagtgacagagcgagaccctgtctaaaaaacaaaaaaaaaccttccctttacctgtgtcttagcttgggctatcataataaaatatcatagattggatgctcaagcaacaaattaatttcctgacagttatggggactggaagtcagattagggttccagtatggtgacagagaggaggggcagtgagaggaagaaagtcttataagggcactaattctaccagttcagggactacctcttatatcccaactaatgctaatcccaaccaccctgtctccgaataccattacactgggggttagggcttcaacatatgaatttgtgagggaggaagggaagggaacacaaacattgaatccatagcagtctggataattatctttatcttagtgccttgatggtaactggtttgttactctccaaccttttcccctaaccacgcaagagagtgtgtttgcattctcaaaaccactagcctaaactctactcctcctctcaagacttctagtgaaacatcatcgtgacctggagcctatggtttcaattacgttttaaaccatagcttacccaaactatttaaggataattttatatttccatagctattatctcagtaaaggggttaagcatgactcgggaagtacagcatgataccctggtaaaacagaggtaggggaagctaatgtagtgtagagggggcctaagttacataggcttggtggtgtaaataagaacagtagcttaatttctataccacgccctctgcgacggtttgcaggcattagcacctatggaagtatgtactcgtttccctgttgtataggcgaaaaactgacaccagcagttcccacattcactcagccactaagcagtggggcaggaatcaaggctaactgctatgccatccatacacctttctgaaagagttacaaaatcagcacttattatcaaagggccgttgggagcaaggcatttcggcgtatctggaaatgtgtggcgatctgtaaacgctcctgaggagagctggaatcccaagtggaagggaagctggaccgggtgggaactgctccccagcccaagggctgctagaaccccaagactccagccccgagcggcttccggaatccgcgcgtgctggcccggcctcttcgggggcggggcgagcgccgcacatgcgccggggccgggccgggccgggggcgcgcgctctgcgagctggatgtccaggctgcgggcgctgctgggcctcgggctgctggttgcgggctcgcgcgtgccgcggatcaaaagccagaccatcgcctgtcgctcgggacccacctggtggggaccgcagcggctgaactcgggtggccgctgggactcagaggtcatggcgag

SEQ ID NO: 2944 - DNA, 2300 bp, Homo sapien
aggaatttcttcaaaggcctccaaggaatatcttctaatttgtattcaggaccttcccaggctgggaacagagatgccagtcaggatttatctctaggctaggagcgcaagctcatgtttattcattcatttggtagcgctagaaactggcaactgtgggctaaatctagcccatagacctaaatttatgtttttcttaaccttcacaatatttagaaatcagagcacttcacataggtctacattttcagcttcttttagcaggaatgctccttcaaagggtatctgcattcctgttcccacagcccccagcattccttgtcctttagctgcctggcttctctaggcacctgagttcatggtcctgggttagaagctgcagaaaggactgtgctgactccctcaactaaggggtggtactaccgcttgctcctctcagcagctgacgtcccagagatcagtttcctttctgggagggactcctcattgaggggggtgcagaagacctgcagacctgcatcaaccctggtctttgaggcttcaactcctgaaaatcaatcaattgagccctacctttaccagacctttagtctctcttcttctgtttctttttggctttctggacagtgctgactccagctctttccttcttgggatgctgctgcctcttcctcttacctctgctgcttgagccagtgtgtgctctgctctctgcttccctagccccgccatccttctcatcccttacatccaagatgtcctcctcctcttgatgctgctgtcttttcttcttgcttttcctgcttcttccatcactgcatgctctgctctctgcttccctggttccaccacctaaaagtttcctcacctctatcttctaggttcaagtcctcctcctcctgttgctgcctcttctttcttcggctgcatgggtcagcatatgccctgctctctacctcctctgtcctgacactgcctgcagcctccttgccttttcctccttcctccaagacccccatcttctcctcttcatggtgccacctcttctttttcttccctttcctgagggactgattggtttgctctctgctattcaattccccaagcccacttgttcctgcagcgtcctccttctcattccctttagttgtaccctctctttcatctgagacctttccttcttgatgtcgccttttcttcttcttgctttttctgatgttctgctcagcatgttctgggtgcttctcatctgcatcattcctttcagatgctgtagcttcttcctcctctttctgcctccttttctttttcttttttttggggggcttgctctctgactgcagttgaggggccccagggtcctggcctttgagacgagccaggaaggcctgctcctgggcctctaggcgagcaagcttggccttcattgtgatcccaagacgggcagccctgaaacagacagggtccaagtcaaagcgagggtatcgggggaaatgggcctagtccttaagcctgcagggaaagttggtggagggtaggagtggggagctgcctatcttcaggcaatagatgggtaggtaataggaatcatttccctggggtaaaaagaaccaagaggtggcacaggccatggtcaaaggtggggagaaaagggagctcaaggagctgaccactacttacttgtgtgctgttcgcccctcacaggcttggagcagcatctcatcagtcagactgttaggggagatcagcagttacaaacagacctggtggaaaggcttgacctctcctccttctaaaacattccttcaacactgaattcttgttcaggacctggcactttttgaggtactagggatacaaagattagtacaacacagttccacccacccccaagaagcccccagtcaagcattagatttagccctttctcttgccatctgaagacatctcttcccacattccccaagagctaaaatgaagtctcacatctttggggacttggacccctggttgtcgtcatcactgcagctctccaagtctttgtttggcttctctccacctgaagtcaatgtagccatctaggaggggtcatgggggtagataaggccttctcaacaccatcaccatccctattcccttgtggaagccccctaagaatttatagctccaggcagtggtttgccagcccccaccattgctccttgaggagccacagggaggtgtgccatcctgcatactcgaacttggataggagatgggctgctgctgctgggatgtgcagcagctttggcctctctcac

SEQ ID NO: 2945 - DNA, 2300 bp, Homo sapien
tcggaattttaaaacttcttatatatttcatatatatacctgtatatgtatatgtacatacatacacacatatatgaaatattctatataacatacaattttgtatataatacacacacacatatattttagatagaaggggtagaagagatggagaggtgggggtgggtggaaattgaagccctgtctgtggaattttctcagtggctgcaggacactgcagcgaaactcaagtttgccccggcacagtggcatgcacccgtactcccagctacttgggaggctgaggcaggaggatcatttgagcccaggagtccaaggccagcctgggaaacacagggaaaccccatctcaaaaaaaaaaaaaattgttcaaggtcacacaatgagtggcagaatgggaaaaggagtcagatgtctctccacaaaatgtttctctgttgaatccatctctaaggaatgcctttgaagcatcccacatcccttctgcaagtgtctaaaattccagtaattaagatcgatcgtttaaagtattgtccccatgtagcatgttttgaaagtaaaattaattttatggaaaaaattatggggatgaatgggtatgacatacagggcaattatgacaaggctctcctgtgaaatggcgatttttctgtttggaagtttctagggggcgctaagtcaacggaaataccgatatggggaggcagaaaaggatacttttctcgggttttagttcttgggtggctcagtgaggccaaggaacagcttgcaggggtaggggcatgtgcagtcccttttgctgtatcttctttccctcctttgctcaatacatcctcataccgacagggcaagtccaaactcctcagcctggcatgcattctgggatcctgctttttttttttctggctcactgcaacctccgccctcccctcactcccacagcgggctgaagggatcctcccacctcagtagctgggacccacaggcgtgcaccaccatgcccggcttttttttttttttttttttttttttggtatttttagtcggtgtctcgccattttgcccaggctggtcttgaacttctgggctcaagctatctgcctgtcttggcctcccaaagtgctgggattacaggcatgagccaccgcgtctcacccatcctgtatctttctccaagtcccactggcatgtcctccatctaatcccactcaaggtcccaagtttcccaggctagactgggtgttcccctaaatcaagacctgtgtcttatgcgtctttttatcccccagtaccaaagggacaagttctggcacacaatggtgagtcaaaaagtgtttgatgaggccggtcacggtggcttacgcctgtaatcccaacactttgggaagccgaggtgtgcatatcacttaaggccagggattggagaccagcctgtacaacatggcaagaccccttctctacaaaaaaaatacagaaattagccaggcgtggcggtgcatgactgtggtaccagatactcacgaggctgagatgggaggatcacttgagcccaggaggcggaggttacagtgagtgagtcgatatcgcgccactgccctcaagtctgggcaacagagcgagaccctgtctcagaaaaaaaaaaaaagtgcttgatgaacctattgagatgtctagtctctaggctttcataaataactgttcctgtgaaggctgagtattcatgagtattcaaccctgaaaaatcaggacacagctatcacctactctgcctccacgaatttctcaggctactctcaatgcttccctggagttttccttcctcgtatttgcgcccgggactagctcagtgtaggacgcggagccgttcttggcatcctgagagggccagttagtactgaagtcccttggctgctcaaggattgcagggatgaggcaagtggaacagcctcggaacctccgaaaatgggcacgctccaggtcccagtttctatggcaaccataccggcaaattgggctccgcaatggtttctcctggaaaaaccgtgattttggttcccgcggacgtctctatggtttcgacagcctagaaggaacaaaacggcatttccgggaagatggcggcgcacaagtcaggtccggcacatgtttccgcggagcggacccagcaatgacggtaaggggctcccttcccccgaacggtggtagtcggagcccgggcttattagcaaacgtgagaggagcagagtatttttacccaagtggcactggggtaggagggctggaatttagccctcaaga

SEQ ID NO: 2946 - DNA, 2300 bp, Homo sapien
agagaggcagaagaggattagtggaaaaagcagaaacttctaggcttgactcaatgactgtattgtgcgtgatttggggcaagccaccttcctctccatctcctcctctagtaaatgttcagcatcctgaggtctccagttctgaaagggtatggttctttttttttttttttttgagatggtgtctcactctgttgcccaggctggagtgcagtggcacgatctcagctcactgcaacctcctcctgggttcaagcgattttcccacctcaagcctcccgaggagctgggattacaggcgcacaccaccatgcctggctaatttttgtatttttagtagagacagagtttcaccatgttggccaggctggtctcgaactcctgacctcaggtgatccgcccacttcggcctcccaaagtgttgggattataggtgtgagccatagtgcccagcctctttttttttttttttttaactcacagaacatgaaattatatggttttaataatgcaaagctacttccatggggctacagcagagagaaaataaggctaaaatggaacttaaagctcaaaacatttctacatggctgtttacaggggcaggtggagggagtcctccctctgcattaatagaaaacaaaaacaattgggcctattcggcattgttggaaatgttctatgtcttgatctggtgggtttttacctgtgtacaatatatgtacacacgtaaaaattcatttagctgtacacataatttctatgacttttttgtatgtaaattatacctcaatggaaaggttttaaaatggacttaattaggcccagcatggtggctcacgcctgtaatcccagcatttggggaggctgaggtgggcggattgcttgagcccaggagttcaagaccagcctgggcaacatgatgaaacctcatctctacaaaaaaatacaaaaattatcttggcgtggtggcgcacgtctgtagtcccagatgctctgaaggctgaggaaagaggaggatggcttgaacccgggaggcagagcagaggtagcagtgagccgagactgcgccactgcactccagcctgggtgacagagccagactctgtctcaaaaaaaaaaaaaaaaaaaagttaattagacgggtgtggtggtgcgcgcctgtagtcctagataatttcgaggctaagggggaagatctcttgagcccaggtgttcgaggctgcagtgagctatgattgggccactgcactcctacttgggcaacagatagaggccttgtcttaaaaaaaaaattttaaaaaggccgggcacggtggctcacgcctgtaatcccagcactttgggaggccgaggcaggcggatcaccaggtcaggagatcgagaccatcctggttaacacggggaaaccccgtctctacttaaaatacaaaaaattagccgggtgtggtggtgggtgcctgtagtcccagctacttgggaggctgaggcagaagaatggcatgaacccgggagtcggagcttgcagtgagccaagatcgtgccaccgcactccagcctgagcgacagtgcgagactccgtctcaaaaaaaaaaaaaaaaaaaaaaaaaagacttgagagaaagtgaatttccatccaggaagattaaggatccccttctgagtactttaaaaaggttatctatttgtgctgagggaagaggtagaatattagggaaccaataagataacttctcttttggagaggtttccaaagtccttctgtcctcagaaattctcatgttcctccccagggacagaaaaatcctccttgctgtctaatctccatctctcctattgcaatgctagccactccctctgccctcatggagcccagcctttcccctggcctcagacaaaatctctttagagccctgtaatttggagtgttgagagagattccatttcaaccttttcaccatccgttctctgcccctcaccctattctcttcttcttggggatgtcaattcctgttctgagcccgccccccacccaggcccttttccggtggtatgtgccagccggtcctgcatcccacatccccagctgttgacatttcattgccattacccacagaataaagaaaggggccctgttattcaacaataggggaaaagacagagacaatgggaaattgtgcttccgatggggtggggactgagaaggaaaggacagacagacagacagacagggggttgtacagaagaggtccggtttcttgaagcagctggaagtcctggatagttcccacctgaaagtc

SEQ ID NO: 2947 - DNA, 2300 bp, Homo sapien
aagggtggattcccccagggcaccgaagtgagtgccaatccttctggtcatgaggagaggtggtaaggaaggtcactttctctgccttctctggtcacagccaggtttccctgaggcaagaactgtggttacatctgagccaccactgggattaaatttcagccgcttggttgcctggctcagcctggctggcctcaagccctgtagagccagtgtggaggtaggctggacacatgcatccatgctgagactgtcctgaggaaggggggttttcttgcagctctgaaatgcaacttctaaggggagcaaaaagacatcctaaggctgcccagatctgtccccgaaggccttctcagatccgctctttctactagaagaattggaactgcatttccaggcctcgagcagttcctggtccacagctggaattcaattcaactcatattggtctaacgaagtaaatagatcgaggtcccttcctccccagactgtcccaggcaccttcctctgtccccttcagtcttgcatcctttctggggcatttttcttttcttttcttttcttttcttttttttttttttttttttgagagggagcctcactctatcacccaggatataatgcagtggcacgatctcagctcactgcaacctccacttcccaggttcaagcaatcctccctgcctcagcctcccaagtagctgggattacaggtgtccaccaccacaccggctaatttttgtatttttttagtagagatggggtttcgctatgttcactaggctggtcttgaactcccgacttcaggtgatccgcccaccttggccttccaatgctgggattataggcatgagacaccgcacctggctggcatttttcttggtaaggaaatttaccatctacccctccctaccccccaggtcttcttttcctgtccctacagtagatgggtctctgggaaggggccagaatcttccctttagaccctcaaagatttggagtgggtttttatgtgaggttctcaaagccctttggaaccaagtccatggcactgggagtgaaagccaggcagtggtgagtgggggcgttggcacattcagtggggagcagtccagagttcccaagagggacctagggtgcagtctagatggaaggctggggatctgccttgaggttgcatttgcattgaatgcaccttactttacttggggtattttgaagatgctgtggagattatgaggatcaaagccctccaaagctatccttggtgccaatattggtatccaggggagggaatctaggcatctggctgtcctgcccactgtccgtgccaggggctttgcctacagtcccaggagggaggagggaaaagcaaagagagcctgggaaaggagagggaagcagaggccctggagctgggggaaaggagggtcattggtattctgggcgctgaggagttcctggctgggcagcactcaaggcccaccccctggcatcaggctgcacattcagcatcgacagccctggccagtaggccttctgggctcccagcaacgcctgcattttgcacattggtttgcatgactggtaatgtcccttcacagggccaccctcaccccacccccaccccaggtctagagatttcctgaattgctttgcttaacccatgattctgctgtctaacctccatccttccagctgcaaagtcagctcctcctctgtgcagggagtgggagcaccacaggagccaatgcccaatcatagctgcctccagggaggtagctacggtcctttgcaccccattctgcctccagaaaagagttttccattttttttattagaaagggtgtctcttttcaggagcaaagcccccattctcccttcatccacttcttacagtctaattgactccctcctccttcttctttgaacaacgagaagactctccagttgtccaacttccacccctccagctgcaacatcgtcatcctttagctcagcgaacgctgggcgaacgctccctccccgcccctcctgcccctcctccctactccaagccctcggcttctcatccgctgaacgatgtcctacttcgctcgtccttgctctcgccgctgctgccggagccgaagcagagaaggcagcgggtcccgtgaccgtcccgagagccccgcgctcccgaccagggggcgggggcggccccggggagggcggggcaggggcggggggaagaaagggggttttgtgctgcgccgggagggccggcgccctcttccgaatgtcctgcggccccagcctct

SEQ ID NO: 2948 - DNA, 2300 bp, Homo sapien
gccaccagcacctctgcctcccggccccgggacaggaaagtccacttgacccgcggagagcccagcacagcccggcggctcggcggtggccgcaggtagtggacgtggcaagggatggtgagggcgccgccgagcacgccctgcagtggcgcgtcgcccgcgatgcgcacgcgaaaagcgcggtcctctgtgaacgggtggagccggctggaacttaacgctgtcgaccctcagagtcccacccggtggcctccaagccccgctccaggatccctccttccggccccaggattccccggcccccctaggaccaggggccaggggccaggggccagggtcctgcagccctacctctaggtcctccaggaccaccccgacggtctccagacccatcccccaaagtctcccagtcaattcagcccccaggattccttgccctgctctcagagtcttccacttcctctccaaaattcctagaccacaccccagggtcctccaacctcgccccctgagtcctccagcccagtttcccagtctgctccctttagggcctccttcagggtttctcccagttccacccctttcccacctcctagcttcaggatcccctatcctccaccttaggggcccaaagccttgcacccagtgcccttccctagtcctgccccatgatttctccaacccaccagatgctcacagctcagcccttatttccaagtgttccagcctggacgcttccccacagccctccaattctctctcttcctggggcccctaagcctggaagcagttggttagggctgaacaagacagagacggtgaccccaagtggggttgcttacctgagctgtctccttccagaacatctgctaaagctgcaggagcctgggccaggaccagggctgccagcaggggcaggaacagctgggccatgctgcaggctgacagagggacatgagaaggaaagatggggttagacttcaggatggacttcccccctgctccctaccacacccatgtgggttcacacatatcctggctccagaagtcccctaccttcacatcaccatggactctctgtttctgatccccatcttcccagcaagtgatttcttctcagaaccaaaacccgagtcctagtcaactcactgtgtgacctaagccaagctccttaccttctctgagcctttattttcttacttataaaaaagcatcatcattactatctcatgagttgagataggaccatgtgctttgagagtgtttagtatcttaaaactcctgtacaaatgcatagcaccaggcagacagtaggagctcagtttacagcatgaatggtgggtgctcttatactcagaattccatctgctcctcccagtgccagactccttcctcgaacccagagccttctcccatagtatctctttagcctcttctgccttctagactgtccctgcctccagggacaccatactcacctggccttttccaggagggcctcctagaccgaacgcaagtaagcacagcttctcctgagcccaccctctcctctacttcctccccaccattatttgtaaggaaactcctctctttactccccaacattctccatcccccttccttggctgcctcctcccttcttcttcccagcctctcctttctgcctggcacgggctttcccaccggaactcttggctcagaaatcagttgggacaaagcccctgtctctgccagtctggcctctatccagcccctcccttcccccaccctaccttttgtgaaagccttgggctggagggtggactaaggggggggagaataaatgggaggggctaccccttcctacccctggctatcagaagctctagaacccagaatattcctccaaagatctcgaagcacttacactctcataaaaaggatgtgttgtgacattgagaaatggagactgaggctcagagaaggatagggctgaccctggatccctagtaaagccaagtcaggcacgagggcaatgtgctcccaggagagaagactcagagctacatcatctttaagggttgggctaaacttagaagagcatggagatccaggtatgccatggaataggccaatgatgcagcaagagaattgaaggttagactacaggcaggacttcctagagatcaggtttattccactggctgtgcactcccattccaggcccactgtttatcccccatcttccctgccctctcagcatctgccttcatacctgtccctgcactttcctaagcctgagatgatgggaaatttcctac

SEQ ID NO: 2949 - DNA, 2300 bp, Homo sapien
ttggctttactagggatccagggtcagccctatccttctctgagcctcagtctccatttctcaatgtcacaacacatcctttttatgagagtgtaagtgcttcgagatctttggaggaatattctgggttctagagcttctgatagccaggggtaggaaggggtagcccctcccatttattctccccccccttagtccaccctccagcccaaggctttcacaaaaggtagggtgggggaagggaggggctggatagaggccagactggcagagacaggggctttgtcccaactgatttctgagccaagagttccggtgggaaagcccgtgccaggcagaaaggagaggctgggaagaagaagggaggaggcagccaaggaagggggatggagaatgttggggagtaaagagaggagtttccttacaaataatggtggggaggaagtagaggagagggtgggctcaggagaagctgtgcttacttgcgttcggtctaggaggccctcctggaaaaggccaggtgagtatggtgtccctggaggcagggacagtctagaaggcagaagaggctaaagagatactatgggagaaggctctgggttcgaggaaggagtctggcactgggaggagcagatggaattctgagtataagagcacccaccattcatgctgtaaactgagctcctactgtctgcctggtgctatgcatttgtacaggagttttaagatactaaacactctcaaagcacatggtcctatctcaactcatgagatagtaatgatgatgcttttttataagtaagaaaataaaggctcagagaaggtaaggagcttggcttaggtcacacagtgagttgactaggactcgggttttggttctgagaagaaatcacttgctgggaagatggggatcagaaacagagagtccatggtgatgtgaaggtaggggacttctggagccaggatatgtgtgaacccacatgggtgtggtagggagcaggggggaagtccatcctgaagtctaaccccatctttccttctcatgtccctctgtcagcctgcagcatggcccagctgttcctgcccctgctggcagccctggtcctggcccaggctcctgcagctttagcagatgttctggaaggagacagctcaggtaagcaaccccacttggggtcaccgtctctgtcttgttcagccctaaccaactgcttccaggcttaggggccccaggaagagagagaattggagggctgtggggaagcgtccaggctggaacacttggaaataagggctgagctgtgagcatctggtgggttggagaaatcatggggcaggactagggaagggcactgggtgcaaggctttgggcccctaaggtggaggataggggatcctgaagctaggaggtgggaaaggggtggaactgggagaaaccctgaaggaggccctaaagggagcagactgggaaactgggctggaggactcagggggcgaggttggaggaccctggggtgtggtctaggaattttggagaggaagtggaagactctgagagcagggcaaggaatcctgggggctgaattgactgggagactttgggggatgggtctggagaccgtcggggtggtcctggaggacctagaggtagggctgcaggaccctggcccctggcccctggcccctggtcctaggggggccggggaatcctggggccggaaggagggatcctggagcggggcttggaggccaccgggtgggactctgagggtcgacagcgttaagttccagccggctccacccgttcacagaggaccgcgcttttcgcgtgcgcatcgcgggcgacgcgccactgcagggcgtgctcggcggcgccctcaccatcccttgccacgtccactacctgcggccaccgccgagccgccgggctgtgctgggctctccgcgggtcaagtggactttcctgtcccggggccgggaggcagaggtgctggtggcgcggggagtgcgcgtcaaggtgaacgaggcctaccggttccgcgtggcactgcctgcgtacccagcgtcgctcaccgacgtctccctggcgctgagcgagctgcgccccaacgactcaggtatctatcgctgtgaggtccagcacggcatcgatgacagcagcgacgctgtggaggtcaaggtcaaaggtgagagggcagggaggttccagagggagggagggagggagggaagggaggactcttgccttcggggatcccacagtgtgagagggaagcaaaggtagctggaaggcgcagcct

SEQ ID NO: 2950 - DNA, 2300 bp, Homo sapien
tgaaggtaggggacttctggagccaggatatgtgtgaacccacatgggtgtggtagggagcaggggggaagtccatcctgaagtctaaccccatctttccttctcatgtccctctgtcagcctgcagcatggcccagctgttcctgcccctgctggcagccctggtcctggcccaggctcctgcagctttagcagatgttctggaaggagacagctcaggtaagcaaccccacttggggtcaccgtctctgtcttgttcagccctaaccaactgcttccaggcttaggggccccaggaagagagagaattggagggctgtggggaagcgtccaggctggaacacttggaaataagggctgagctgtgagcatctggtgggttggagaaatcatggggcaggactagggaagggcactgggtgcaaggctttgggcccctaaggtggaggataggggatcctgaagctaggaggtgggaaaggggtggaactgggagaaaccctgaaggaggccctaaagggagcagactgggaaactgggctggaggactcagggggcgaggttggaggaccctggggtgtggtctaggaattttggagaggaagtggaagactctgagagcagggcaaggaatcctgggggctgaattgactgggagactttgggggatgggtctggagaccgtcggggtggtcctggaggacctagaggtagggctgcaggaccctggcccctggcccctggcccctggtcctaggggggccggggaatcctggggccggaaggagggatcctggagcggggcttggaggccaccgggtgggactctgagggtcgacagcgttaagttccagccggctccacccgttcacagaggaccgcgcttttcgcgtgcgcatcgcgggcgacgcgccactgcagggcgtgctcggcggcgccctcaccatcccttgccacgtccactacctgcggccaccgccgagccgccgggctgtgctgggctctccgcgggtcaagtggactttcctgtcccggggccgggaggcagaggtgctggtggcgcggggagtgcgcgtcaaggtgaacgaggcctaccggttccgcgtggcactgcctgcgtacccagcgtcgctcaccgacgtctccctggcgctgagcgagctgcgccccaacgactcaggtatctatcgctgtgaggtccagcacggcatcgatgacagcagcgacgctgtggaggtcaaggtcaaaggtgagagggcagggaggttccagagggagggagggagggagggaagggaggactcttgccttcggggatcccacagtgtgagagggaagcaaaggtagctggaaggcgcagcctgggttggaaaaagagtgaggagacacgggcctttgttgtctcctttctctcttcaggtggaggacattctacccacaatctaacttaagtccctcatgctgtagagtgagcacaattgaactttatttacccttgtgtacagaggagtgacaaggagggtgaggggaggccagcgtgctgggtgctcacctggctcaggggtcctctctgccccacaggggtcgtctttctctaccgagagggctctgcccgctatgctttctccttttctggggcccaggaggcctgtgcccgcattggagcccacatcgccaccccggagcagctctatgccgcctaccttgggggctatgagcaatgtgatgctggctggctgtcggatcagaccgtgaggtgggcaggggctgtggattggggcttctattggcccctgaggtggccatggccccccttctgctgggtgctgcctgctgtgtcaggctggacatgcagggctttttgcctctgggggatgaggctggtctgaggaggggaggtgaggaccctgagcatgtgcatccctgcagtgctagaaggacagccagctgtcagcaagtgtctgcactgtggtggcagtggggttcaatagaatcaatatgggctggctccctggtgaaagcatctgtactaagtgattctgtccttcctccctaggtatcccatccagaccccacgagaggcctgttacggagacatggatggcttccccggggtccggaactatggtgtggtggacccggatgacctctatgatgtgtactgttatgctgaagacctaaatggtgattaggagtgagaggttcccaggggacaatttcctactcccatgctgcccataggtcctcccggggcctctgcaggaccttactatccctcctgagtttaagggggcaagcag

SEQ ID NO: 2951 - DNA, 2300 bp, Homo sapien
tcccttgcctacttgccccaccactgagatcctcaggtgatgcctgaagttattcctgcactctgccctccagctatcctgaggggatgacagcctctccccttctatttcaagaattttggaggctcggtgcagtggctcatgcctgtaatcccagcactttgggaggccaagaccacttgaggccaggagttcgagatcagcctggcaaacacggggaaaccctgtctctactaaaaatacaaaaattagccagttacggtggcacatgcctgtagtcccagctacttgggaggctgagacgggagaaccgcttgaatccaggaggcgaaggttgcaatgagctgggatcgtgccactgcactccagcctgggtgacagaaggagactctgtctaaaaaataaaagaatttggggatacctgggacacctcacaccttgccccaagcccaagatcacaaggtggtaaagctatttcatccatcctgctggctccagcccctccccctagggaatatctctcacctgagcctttcctgaccactccaaagtagtattttccatcactccatcttctaactctgctcaagtgttctttatcttgtaagattataatatatgtttgtttgtcatctgttctagaatataatttcccttgagggtaggaggtttgctattttgttctgcactgtatcctcagtgcccaggggaatgcttggcatgacacactgtaggcacttgatgaatgcttgagaaatgagtgacgaagttctgggatgctccctgggccccagtaggtgctccacagggaagatgtgagagaattgagagaattccatggtgcaagctgtgacctgggagggcagagctacctattcaggctcgcatcaatactttcctcctgccacagactcggcccagccttctgccatccctgaggcctccaacccagcctccaacccagcctctgatggactagaggctatcgtcacagtgacagagaccctggaggaactgcagctgcctcaggaagccacagagagtgaatcccgtggggccatctactccatccccatcatggaggacggaggaggtggaagctccactccagaagacccagcagaggcccctaggacgctcctaggtaagtcggatcccttatcctaaggatgtcttgattgaaagaagttgggggcagaagaggcaagcccaggttgatgctagggtgatggatgacatgactctgccctgtcctttctcagtagctcaggggtgcagggcacctttcctgtccctctcccaacctttgcttttccagtaaattccacccccaactctatggagctagagatgcttgcactaaggagctgcgccctggaaaggtggaacctgccttctttggtccctcttccgcctcacacacccaaaacagactagagttttgacagagtaggagggagacaaatgaccatgttctccggggctaatgatggctcacagagccttctcaagtgttgcctcaacaatatggctggggtcaagttcttccagtgtggcgcaaggaccacctgtcctcagggcggtctcttccctattccccagggctcaccctcctgagccctacttttctccccttccctttttcctttcggtccttggacagacgctgtccctggtgctgaaccgtttgtgctttgcctagaatttgaaacacaatccatggtaccgcccacggggttctcagaagaggaaggtaaggcattggaggaagaagagaaatatgaagatgaagaagagaaagaggaggaagaagaagaggaggaggtggaggatgaggctctgtgggcatggcccagcgagctcagcagcccgggccctgaggcctctctccccactgagccagcagcccaggaggagtcactctcccaggcgccagcaagggcagtcctgcagcctggtgcatcaccacttcctgatggagagtcagaagcttccaggcctccaagggtccatggaccacctactgagactctgcccactcccagggagaggaacctagcatccccatcaccttccactctggttgaggcaagagaggtgggggaggcaactggtggtcctgagctatctggggtccctcgaggagagagcgaggagacaggaagctccgagggtgccccttccctgcttccagccacacgggcccctgagggtaccagggagctggaggccccctctgaagataattctggaagaactgccccagcagggacctcagtgcaggcccagccagtgctgcc

SEQ ID NO: 2952 - DNA, 2300 bp, Homo sapien
atggcttgggtaggggaccaaagaccaagtttgagagcctctgtcccccagggttggagggttgaatgggaaggagcagaaaggacaacaggagggacaggaaagtgtgaggagtgggaggggagttcagaattctaccctctgtggggcctggtgcttaatgggttaaatgaaatacctcttcctctggggttgggaggtgggcagcaccacaagctgggaagaaactattggcaggagggaagatgacagaaggagtgctgctggaaaagctgattcatttcacccaaaacagctaggtcatcccagcaaaattctttgaatccactccagcttctcctctctccacccctactgattcccaccaggcagtgggacctgtggccaggccagcgggaagcactgtggaccttggccatggcttctagaggtggatggtaaagtctgaagggttctgccctggagtggttttgcctctcatggctgagggccttgaccttaccatggctgagggccatgacctacacagttggtctgtggagccatcttcctttgggtcatctgaaccagaaaggattggaaactgacagctcctgtagcacccaagcacatcctaaggacagccacctcctaccccaggatacagagagaaaaagtccagtaaagcagatggcctagccagatggagctagatccaggcaacagattgcagaccttcagggcagtgtgttagtctaagaggactgcctggaggagagggagccagaaggagggattgagatggattctaggttggagaacctgcagaaggcccaaagtggagttgggagagggagcctggtaagtggaagagtctgtggatataagaaggggaagtgagaggttgggtgatattgagagaaagctgcatgtgtgaggccagtcagcactgcaggacaatgggagctgctgcgacttagttcctaagctgggggagaaggggcagggcctagagtgaggaaagtgggctggatctccactaaccacttctgggactggctgactgcccagtggacagcaggaggaatggttagtattcacctggaccacaccaatatcaggtctcaggagcagtcaagggataccaccctccactgttgctgcggtaatccttctgtcccctccttcacttccattcattccacctggactatacagaactgtgctgggacctggcacaaagacaagggggtgtggcactaaactccaagcctagagaaggaaaatgacctgcccaatatcacacagaagccagataagagtttagagctataactttctgtgcccagtatctttctccattgtggggctgggttctcagggctctcctagcctcttctccccagccccttttgggctgggctcacactggtggccataacaatggaaggctgagccaatgctgaagtcgggagcgggaagaggaaagaaacccagaactcagggctgggttgtgaccagagacaggctctagggagaacttttagggtgctgttatagcttccaggacagagagaccagggctgggggaccctctgcaccctctcctggagggctcaggctgcagagtgcggctgcctcgctccccccgcctcacttctttccccctctcaggtgactgtgtccccagcccctgccacaatggtgggacatgcttggaggaggaggaaggggtccgctgcctatgtctgcctggctatgggggggacctgtgcgatgttggtgagtgttgagggacggggggcaggtttgaagcctggaccctgccacaacgtgctacttctggaggggggagggagaacattggttttggccttgtcattaatgagtccctgttttaggcaagttgcataacttctttgagtcctaccctcaattttcttatctaagtgaaaccacaatgcctctcatagggggtccatttgagaccagtgcaaagcatactcctggcatttaatcggtggtcaatacatgacaggctccattctcctggagaggagagccactgctcgttaggatggagacccaggccggaactccatccctcaccctggttcctgtctcttagaaaaggcaccagcgcccctgcccaagagcccctccaggctcctgctaccccctcattctctactagctcttttgcaccgccctcctgtcccccttagtcccgcccctctcggcctgcggtagtggaaggagaccagccccttccaggggacctggccctctgggttttggggccctaagatgcccgcccttat

SEQ ID NO: 2953 - DNA, 2300 bp, Homo sapien
aagaatcccaggggatctcaaacatttagcatccctctcctcccagacagaaagtgaaagaaagaaggaggtcgggtgcagtggctcatgcctgtaatcccagcactttaggaggccaaggcgggtggatcacctgaagtcaggagttcaaaccagcctggccaacatggtgaaaccccatctctactaaaaatacaaaaattagcctggcatggtggcaggcatctgaaatcccagctacttgggaggctgaggcaggagaatcacttgaaccggggaggcgaaggttgcagtgagccgagatcacatcactgcactccagcctgggcaacagagcaagactccctctcaaagataaaaataaaaataaaagaaagagaggaggagattccaagcaagctctgctggccacaactctggggagccctcagcccaaaccaaacagcaggatttatgaggtaatgcaaggttgaaggagcctgggcatcccagatcctcagcctcccggcctgcactgactctcagtcaatgtcctgtcactaacccctccctggcctctattctacatattggtggtgaattccaaagccccattggcctggggacagggatggggtccttgagagactcctcaaggggaggggatattggagggatgacttcctggttattgacccggctgtaccctctactcagaaaaccctctccatcctctgtgctgcctggctctgtccccagcaccttggaggctgattaagtattgtagtcatctttttatgtttacctccaccaacagactatgagtgcccatcactgttgacctcacatcaccaaactataagcatttccagggctgggacagagttcctgcaatctctttggtgctgacacatagtaggtactcaattaacacttgagctaaattggatttagcagcttgatcagaaacgccttccccaaagatcccctccgtctcattatccctgcatctcctccccagccctacttctccttcactgtaaatcccccaaatcccacctgtcctttacctcccagctcaaggatgcactccgtccagaaagccttccctactactctcacccttggtgagctctctacttcataaactgtagaatctttaaaaggttgttttgaagattaagtcagatcatggaagtaaaatattggaacacgactgggcacatcataaaggctggataaacttgggctagtcgttaggaaggaaaagaatggcctcttcctgctgcttccacttctgaaagccgccagagggcgtccactacccaacattccctggcagggggtgcgggagaaggggcccttccccaagaacagaacttcctaaagcggatgtttgaacctcgcagttatacagaagacttgtaggaaggatggacaaacgttcttaagcccatgacggcccttaacctggtcgctcccttttctgatggagactcaggcaatagcgtgtgtgcgtgtgtgtgtgtgtgtgtgtgtgtgtgtgtatccgtgtgtcctaatatcagacatttgttcttgttttccaggcagcgtctctctagcttctttctgcaatgctgtagtactctctccagtatttcaggaggaggagcatttgctatttcaaaaacgaaaaacaaaaacctggccacatccatttttttcagcagccatgcgatttccatcattgctcacattttatggatgaggaaactgagtcttagaggaattcagtaagtgatacctctctcggatgtgttgagtaactgagactgcactccctcccaggctggaacgtcctggtactcccacccccacaggctcagttctgtgcattatctgcctttttcggggattgtgacccttcttcacagcctcctccctcagaaagccaccaccatcagatccgattctccatggtacagcttcttctttggttccactctccagcaccctggggaagcaggaacagaggctgctgccactctctgacctctaaggggttaaggcctgggtcccgcccctcttcccgcccgcctggcgggagtatgaatagcctcgctcccactcccgactctcagtcgctcaggctactcccaccccgccccgccccgtcattgtccccgtcggtctcttttctcttccgtcctaaaagctctgcgagccgctcccttctcccggtgccccgcgtctgtccatcctcagtgggtcagacgagcaggatggagggctgcatgggggaggagtcgtttcagatgtgggagctcaatcggcgcctg

SEQ ID NO: 2954 - DNA, 2300 bp, Homo sapien
aggaggggcagcaggaatctggtttccaccatgttccctcctctagcctctcctcatccctttggccaggagcctgatttcactgtcagagcctaatccccctcctttacctacagcattgctgagcagggaggatgggggaggagctggggctgtgcctgcaaccccaggccctaagcacttcccagggaaccccccaccccgccccaccccgcttccttccaccatctctgcttttgtctgtccttcctcagagagctccttgacctgctgccctcttccttgcagaagcccaggcctcccaaacacccccaagtaagctctcccacacaaaacctggacccctaaacccaggctgaagtattcaaatctcagtttgttggctattgcgggcggggccccatagagaagtcctatgcagtggaatctccatccctcctgctgcccagtcagcccagctgctttattttctcacccacccatttctgcagatttccctctctgcaacccggaggcccgaccccccagtacattctccagccttcagttcttaatgctgaggtcactctggcccctctcctttggtcatcttcctccagactcttccccagctcccaccaaagctcccaactccctagatcgcccctaggttctaaacataagggctcagagatctgagagcgactgcctgctccacccttggccacgctggcgaggaggggccagggcagggacccagggctgggaccagatgtagggtttttctttccgcctcagaaggagctgggagggagagtctggggagggtgggggatgggatgcggcggggccacgtgcatcggttcgctcagggccaccgggccgaaggcccccccgcgttggacaggccgggacggttcctttggctccaatcactgcatcccgccaggcttcgctcctctgcggtttccggcctcgggtcccaggcctgtccccgaggctccccgcctgacctccgtttctgtttctccgtctccctgccatctccactggggtctcgcccactcccactcgggtctctgcaggaagccgtgccctcctcccaccctctttgatctcccgtttcaaagccgctctccaagggaggggaggtcgctccttccgcccgttttacagctcaggatggtgacacctgagaccctgctccgccttctcccccggcacccatcctcccgcctatctaggtggtggcgcagctcgccagggctccgcgcctctgtccccgcctccctcccttccccctactgagaccccctcggggtctcgggagtgaagcgacagagaaagcgttttaataaagaccttgcgtcaagtgattggctgtgacctctgccctcccagcctcgcgccctgggctcctgcttaacccttcaatgtccgcccagcgcattaaggggagcgagtcgcctggcgactacttccagagtccccaggcattacgtgagcccgaagcagggtggaggggtggggggaccgtgccgcccccgcccagcctctccgagttgttccagcagggggcgccgttgcctcacttagatccctaacccccggaaccccgcagctcccaagcccctctctgagtacggagtggtcccactggatccagttcagggttcaatggagctagggccagctacggctcaagatctggggtccgcctgcgggtggggtcgccaggtgtccggcaccaaggagttgaatgcaccgagtcaggttggggatgggtggggaacaggcgagacgtgaggaactcgggtgggggacagccatacacgagccctgagcatctgcgcccgcagctagctccccccgcctctgcggagagcgcgattcaagtgctggctttgcgtccgcttccccatccacttactagcgcaggagaaggctatctcggtccccagagaagcctggacccacacgcgggctagatccagaggttggtggcgggggcgcagggccccccaggtgggggggggcggagcgggaggcggggccacttcaatcctgggcaggggcggttccgtacagggtataaaagctgtccgcgcgggagcccaggccagctttggggttgtccctggacttgtcttggttccagaacctgacgacccggcgacggcgacgtctcttttgactaaaagacagtgtccagtgctccagcctaggagtctacggggaccgcctcccgcgccgccaccatgcccaacttctctggcaactggaaaatcatccgatcggaaaacttcgaggaattgctcaaa

SEQ ID NO: 2955 - DNA, 2300 bp, Homo sapien
gctggagtggagttcagtggcacaatcttggctgactgcaacctctgcctcccgggttcaagctatcctcctgcctcagcatcccaagtagctgggaatataggcatgtgccccatgtgctggggatttttttgtatttttgtatttttagtagagatggggtttcatgttgcccaggctggtctcgaactcctgacctcaagtgatctgtcttagtctctgtgttgggattacgggcgtgagccatcacatccaacaagaccttagatttaagccaaaacaggacttgctgactggggttcaggcagcaatctacaatagggtttgtccactatcaactggatgaagtcaggacagagacagaacaggaaggggattgaagtacaggggattcccaggcacccttgctaggtaagctgggctctgacaaggaagtgtgatgagggtaaacagttaaggaattgcctgcaaggtcttctcgtctcccaggtttttcttggtgagcaaaagtaagaatgagctcttttctctttttttttttttttttgagacggagtctcgctctgtcgcccaggctggagtgcagcggtgcgatctcggctcactgcaagctccgcctcgcgggttcacgccattctcctgcctcagcctcccgagtagctgggaatacaggcgcccaccacgacgcctggctaattttttgtatttttttagtagagatggggtttcaccgtgttagccaggatggtctcaatctcctgacctcatgatccacccacctcggcctcccaaagtgctggcattacaggcgtgagccaccgtgccaggcagaatgagctcttttcaacattggactgagatcaagtacttttgttttgaggctgtagcagtcatgtgcccttttagacacagggtgtgggggtagggggatcataaaagccagttgctactttaccaagacacatacaaagccagggttttttttttttttttttttggtagcgatggggtttcactatgttgcccaggctggtctcaaactcctgggctcaagccatcctcctgcctcagcctccccaaagtgctgggattacgggtgtgagccactgcaccggcctgacaaagttagttttgtttcagccagtaagtaccctaatgagaatattgtcgttatcttcatttactgattacaatgtagttaagaatcgcttgcatgtgtgtattcttaccagtttctgttgcggcctccttgcactattcttagttcttgctgtgcaaggatacctggcacccctttgtgaagtcatggacattaaatatgttgggccccacaggaaccaatttgctcagagcacaatggctgcctgtgcaacagaccccacagtgcaggcctcaacaagaccatgtctgggtctggtctggctgcacgaaattcacttctataggcagctgtgaccgtgactctggcccctggaaccagaccagccactcaagaatgcaaaagtccttgtgtagacatggagtctgcattctctcaagaaagtgcagataatgatcctggacacaaggtcagactggtgactctttcccaagatggggtgtgtaccaccaaaagctggcagcaggaccaggctgtcatcaccaagcaccctttctcccctgctctgcccctccttcatgcccactctctctatctcactctcctggtcacataccctgtgtgtgtcagggggagttgcatggcttggggtgtcattttaggtgtgctcattccttttttttaaaattgagatggggtctattttgcctgggctggatttaaattcctgggctcaaggaatcatcatgccttagcctcccgggtagctgggattacaggcgtgagctgccatgctcagctctgatgtgtggtagggatgaggacaaggaaccatatgtgtcacgtgggttacgcacaaaggcttggtcagttctatgacttccaggaagggccccagttagtgtcatccagtgaacctggaaatcccctaagaaaactacagctccacaatactttgtgatagagctatttaacataaagaagaaactgtacataattgcttttccattataaaaatttatcaagggaataatttgagtttttagaggcttggtttagcaaggtaaaaaagacaaccaaattattaaaacactttataaattattttaaaacctaccaactggggcctaaatgaaataaaccccctattaccttaggaaagagacagctttcctaaatcacagaagttggtttccaagct

SEQ ID NO: 2956 - DNA, 2300 bp, Homo sapien
ctctgtctagtttcatcacttgctgttatttttctatgcagattcccagttccccagacccaatttagaacctaaaatagtttttttgtttgtttttttgagacaggatctcactctgtcgctcaggctggagtgcagtggcagtggtgtgatctcagctcactgcagcctcgacctcctgagtagctgggactacaggcatgtaccacacttggctaacttttttgtagatgagttccgctatgttgcccagacagggcttgagttcctgggcttgagcgattctcccgcctcagcctcccaaagtgctgggattataggcaagtgccactgcgcccggctaaaatagatcttgaccaatgaagtttgtgacaccagctaattgtaccttcctgactttcactgcttcttccaccgacagggggccttcttcaacaactgatagattctcctccctccctccacaaacgttggtgtcttcccatagtgatatcctttgctgaaaaatgatttagacctctctccatccacctccctgccaccatcaagccccatgcttcttacctggcctcgagcaatcttgaagggtgtggcattcaccatgtgctgcttccggataccactccacctggttcggtagtccacaatgtggcaggggggaagaatgtactcgtcataaagcacatctccgttgtagttgacaatgctacatcgagccaaggaactaacatgcccctttggtcctgtgcccaccatctcacagtcaattgccaccatcttccgtggcaacttctgggatgctccggagcatttattctctgaatgagcttgggtggagttctgtggggcattcttctgaggatggttctttttagaggatttcttctgggagctcttcttctgagagcgggttgggtggctattgatctttggaagggcactctggaactcccccagcaaatctactttagcagcaacagaatcagccttttttgaaggggcaggggtcaaccaagacactgcagctttcttgtccaggggctgtcctgacccattgctggaagcagctgtcttcttttttgggaaggaaggggtcttccaagtgccatcgaccgtaggagtttcccctttctttgaaggttcagagtgcaacttaggcgccttgctagggggttggttctttttactcagaaagcctctccgttctaagagcctccgcttcttgacaaaatttcggtgcttggcatttccttctaatgcctttttgggaggaggttccccaaaatccagattgagcagtaaagtagacatagggacaatggaaggcggaagagtagttgggaagagtggcttatggatgaaaagaggatgtgggactcattctctgctgaatcctactgtccaacatgtggaggtctgtagtacaccctggggaagaaagtgatcctggtaattgagctcctaggcctgggagaaaaatgaggtaagctcgatctccgtaggacttatggaaggaaagacatcagagcaatctctcagacagaggggaaatgaaaacataacatgaaatgatggagggagcattggtgttagccagcaagcctggattctagtgaagcccaattcaccagccatttggtcttagtaaggtcattaccgcgctctaggtttgagtctcatttgtaaaatgaagggagtggaggggcttatagagctcgaaccctctgagtctaagaggctagaacacgtgcgatctatactccgcctaggaaaggaacatctaggtatgctcaaaaacagtgagaagtatggcgtagataacctctgggctacccaggcatccgcagcgtggaccaccaatagagacacaaatccaggcatccctttcccttggctccaggccggaattgggggcaatctccgcatgcatctcacccaagtccttctcccacgcaaggaccttgacaccatctaccagcgcgggggtgggatcgaggcttgaggcagcccacctggataagcatacttcggatccccgcggtacagatcgatctctcacgctcacaaacctacctcccagacgggtccagctaagaccggaagcgtccggagccggatgcggaaatcggtgcgcgccgacgaagcccgggaaggcaggcgcgcgggttagaacgcgccagaggtcggcgcgcgcacacccgcaccgccccgaccccaggtagtgaggccagtgattccgagtgtgtgaggagcggcagtggcggcggaggagggggcggcgtgggtgggggcgggggcgg

SEQ ID NO: 2957 - DNA, 2300 bp, Homo sapien
gagaggcctcgggcggagatgcccggcatcccggggtccagcagggagcgcggggagcgagaacgcagtgaacagggatccagggtcagtactacgcgggtccaggacccggacggggctcaactctgcaggcagaacaggaagagttttgggtccagtctccgacgctgcctttccgggatccgatgctggagtggaagatttgaggcgccccccagacgtcacaggtcgcgacgtttcacagtgagaaggtgtcagcgtcagagacacgtagggcggggtaacagtgcagtgacgccacaaaagcgtgccgctgagctcagctcacaacgaggcgggccaagttccagttcccgccccttgccgtacactcctctcctcttacggaagtgaagccggaggtgtccggcgggctgcagttccggtttatcgcggccttcccacaccttcgcgttgtaccaccacggggctagaggggccggggagcgcatcccgcccccgcccccacccacgccgccccctcctccgccgccactgccgctcctcacacactcggaatcactggcctcactacctggggtcggggcggtgcgggtgtgcgcgcgccgacctctggcgcgttctaacccgcgcgcctgccttcccgggcttcgtcggcgcgcaccgatttccgcatccggctccggacgcttccggtcttagctggacccgtctgggaggtaggtttgtgagcgtgagagatcgatctgtaccgcggggatccgaagtatgcttatccaggtgggctgcctcaagcctcgatcccacccccgcgctggtagatggtgtcaaggtccttgcgtgggagaaggacttgggtgagatgcatgcggagattgcccccaattccggcctggagccaagggaaagggatgcctggatttgtgtctctattggtggtccacgctgcggatgcctgggtagcccagaggttatctacgccatacttctcactgtttttgagcatacctagatgttcctttcctaggcggagtatagatcgcacgtgttctagcctcttagactcagagggttcgagctctataagcccctccactcccttcattttacaaatgagactcaaacctagagcgcggtaatgaccttactaagaccaaatggctggtgaattgggcttcactagaatccaggcttgctggctaacaccaatgctccctccatcatttcatgttatgttttcatttcccctctgtctgagagattgctctgatgtctttccttccataagtcctacggagatcgagcttacctcatttttctcccaggcctaggagctcaattaccaggatcactttcttccccagggtgtactacagacctccacatgttggacagtaggattcagcagagaatgagtcccacatcctcttttcatccataagccactcttcccaactactcttccgccttccattgtccctatgtctactttactgctcaatctggattttggggaacctcctcccaaaaaggcattagaaggaaatgccaagcaccgaaattttgtcaagaagcggaggctcttagaacggagaggctttctgagtaaaaagaaccaaccccctagcaaggcgcctaagttgcactctgaaccttcaaagaaaggggaaactcctacggtcgatggcacttggaagaccccttccttcccaaaaaagaagacagctgcttccagcaatgggtcaggacagcccctggacaagaaagctgcagtgtcttggttgacccctgccccttcaaaaaaggctgattctgttgctgctaaagtagatttgctgggggagttccagagtgcccttccaaagatcaatagccacccaacccgctctcagaagaagagctcccagaagaaatcctctaaaaagaaccatcctcagaagaatgccccacagaactccacccaagctcattcagagaataaatgctccggagcatcccagaagttgccacggaagatggtggcaattgactgtgagatggtgggcacaggaccaaaggggcatgttagttccttggctcgatgtagcattgtcaactacaacggagatgtgctttatgacgagtacattcttcccccctgccacattgtggactaccgaaccaggtggagtggtatccggaagcagcacatggtgaatgccacacccttcaagattgctcgaggccaggtaagaagcatggggcttgatggtggcagggaggtggatggagagaggtctaaatcatttttcagcaaagga

SEQ ID NO: 2958 - DNA, 2300 bp, Homo sapien
ggggacaaatggatgaatttgggatctattccgaaggcagagccaagaggacttgttgaagaactggattgtggatcaatgaaggacagcactgaatcaatgatggcctctgggtttgtggtctaaacaattcagtggatggtggtgccatttacacattctctcatttattcttcacaataatccttcagactgggatccattgtatagctgaggaaacccggactaggacaagttgggggttagggaggcctaaggttaacatcataggggaggcaggattctagactaagcctttttgattccagagccaggactgtctactataccacaaaaccacgaatttattcaaagcttggatgaataacgtgtgttcttggaacacctgacatgctccaagaagagttcaacatagttgcagcatggttccaatgtccacgcattttattaccttggatctgggaagattacaaaaacaatctaggtaggtactagaaatattatttatgcagtgagccgagatcgtgccactgcactccagcctgggggacagagcgagactccgtctcaaaaaaaaaaagaaaaaaaaaaagaaaaagaaaaaaaaagaaatattatttatgtcagctgaaaaaaaaggagggatcactccagttttaaccccttcttgtacagaaaaagactgaaactcatagaaggaaagagatcagaggctaattctccagattctctccctgacgtgggcacctagccaaccacacgaccagagacatcccacccacgcccctgtggcctcacgatgatgtaggcatccaagatggaacggtagagtgccaggacacgggtgaggttaacagctagctgcttcctcccctcatgagagaggcctcgggcggagatgcccggcatcccggggtccagcagggagcgcggggagcgagaacgcagtgaacagggatccagggtcagtactacgcgggtccaggacccggacggggctcaactctgcaggcagaacaggaagagttttgggtccagtctccgacgctgcctttccgggatccgatgctggagtggaagatttgaggcgccccccagacgtcacaggtcgcgacgtttcacagtgagaaggtgtcagcgtcagagacacgtagggcggggtaacagtgcagtgacgccacaaaagcgtgccgctgagctcagctcacaacgaggcgggccaagttccagttcccgccccttgccgtacactcctctcctcttacggaagtgaagccggaggtgtccggcgggctgcagttccggtttatcgcggccttcccacaccttcgcgttgtaccaccacggggctagaggggccggggagcgcatcccgcccccgcccccacccacgccgccccctcctccgccgccactgccgctcctcacacactcggaatcactggcctcactacctggggtcggggcggtgcgggtgtgcgcgcgccgacctctggcgcgttctaacccgcgcgcctgccttcccgggcttcgtcggcgcgcaccgatttccgcatccggctccggacgcttccggtcttagctggacccgtctgggaggtaggtttgtgagcgtgagagatcgatctgtaccgcggggatccgaagtatgcttatccaggtgggctgcctcaagcctcgatcccacccccgcgctggtagatggtgtcaaggtccttgcgtgggagaaggacttgggtgagatgcatgcggagattgcccccaattccggcctggagccaagggaaagggatgcctggatttgtgtctctattggtggtccacgctgcggatgcctgggtagcccagaggttatctacgccatacttctcactgtttttgagcatacctagatgttcctttcctaggcggagtatagatcgcacgtgttctagcctcttagactcagagggttcgagctctataagcccctccactcccttcattttacaaatgagactcaaacctagagcgcggtaatgaccttactaagaccaaatggctggtgaattgggcttcactagaatccaggcttgctggctaacaccaatgctccctccatcatttcatgttatgttttcatttcccctctgtctgagagattgctctgatgtctttccttccataagtcctacggagatcgagcttacctcatttttctcccaggcctaggagctcaattaccaggatcactttcttccccagggtgtactacagacctccacatgttggacagtaggattcagcagagaatgagtccc

SEQ ID NO: 2959 - DNA, 2300 bp, Homo sapien
cccaggctggtctcaaactcctgagctcaggcaatccacccacctcggcctcccagagtgctaggattacaggtgtgagccatcgtacccggcctgagctgggatttgaaaccaattttactctagagtccttgttcttaaccattctgcgattgcctttctgtggcggaagagcagtgagtgcaaaggtccagatgcctgccatattggcagaacagaaatcaggccagcagaggtatagcacagtgaaatgtgtgagagaataaaatgggatagagttcaagagacagtaggagccagaatatgggttttataggtaatagtaaggagttaggatttcataaaagtatctaggaagcaagggattgtcgtgatcagatttacatttgaatgctatcaatctagctgctcagtgaagaattggtaatggcagggcagaggtaagcacacagcaagatcggttaggaagtagttcagaagagaggtgatggtggcttggcctagggtggcagcaacggaggtggggacaaatggatgaatttgggatctattccgaaggcagagccaagaggacttgttgaagaactggattgtggatcaatgaaggacagcactgaatcaatgatggcctctgggtttgtggtctaaacaattcagtggatggtggtgccatttacacattctctcatttattcttcacaataatccttcagactgggatccattgtatagctgaggaaacccggactaggacaagttgggggttagggaggcctaaggttaacatcataggggaggcaggattctagactaagcctttttgattccagagccaggactgtctactataccacaaaaccacgaatttattcaaagcttggatgaataacgtgtgttcttggaacacctgacatgctccaagaagagttcaacatagttgcagcatggttccaatgtccacgcattttattaccttggatctgggaagattacaaaaacaatctaggtaggtactagaaatattatttatgcagtgagccgagatcgtgccactgcactccagcctgggggacagagcgagactccgtctcaaaaaaaaaaagaaaaaaaaaaagaaaaagaaaaaaaaagaaatattatttatgtcagctgaaaaaaaaggagggatcactccagttttaaccccttcttgtacagaaaaagactgaaactcatagaaggaaagagatcagaggctaattctccagattctctccctgacgtgggcacctagccaaccacacgaccagagacatcccacccacgcccctgtggcctcacgatgatgtaggcatccaagatggaacggtagagtgccaggacacgggtgaggttaacagctagctgcttcctcccctcatgagagaggcctcgggcggagatgcccggcatcccggggtccagcagggagcgcggggagcgagaacgcagtgaacagggatccagggtcagtactacgcgggtccaggacccggacggggctcaactctgcaggcagaacaggaagagttttgggtccagtctccgacgctgcctttccgggatccgatgctggagtggaagatttgaggcgccccccagacgtcacaggtcgcgacgtttcacagtgagaaggtgtcagcgtcagagacacgtagggcggggtaacagtgcagtgacgccacaaaagcgtgccgctgagctcagctcacaacgaggcgggccaagttccagttcccgccccttgccgtacactcctctcctcttacggaagtgaagccggaggtgtccggcgggctgcagttccggtttatcgcggccttcccacaccttcgcgttgtaccaccacggggctagaggggccggggagcgcatcccgcccccgcccccacccacgccgccccctcctccgccgccactgccgctcctcacacactcggaatcactggcctcactacctggggtcggggcggtgcgggtgtgcgcgcgccgacctctggcgcgttctaacccgcgcgcctgccttcccgggcttcgtcggcgcgcaccgatttccgcatccggctccggacgcttccggtcttagctggacccgtctgggaggtaggtttgtgagcgtgagagatcgatctgtaccgcggggatccgaagtatgcttatccaggtgggctgcctcaagcctcgatcccacccccgcgctggtagatggtgtcaaggtccttgcgtgggagaaggacttgggtgagatgcatgcggagattgcccccaattccggcctggag

SEQ ID NO: 2960 - DNA, 2300 bp, Homo sapien
ctgagtcagagccatgtcttctccctggaatgagttgaggccactgtgttccttccgcttggagctattttccaggcttctgctggggcctgggacaactgctcccacctcctgacacccttctcccactctcctaggcattctggacctctgggttgggatcaggggtaggaatggaaaggatggagcatcaacagcagggtgggcttgtggggcctgggaggggcaatcctcaaatgcggggtgggggcagcacaggagggcggcctccttctgagctcctgtcccctgctacacctattatcccagctgcctagattcagggaaagtgggacagcttgtaggggaggggctcctttccataaatccttgatgattgacaacacccatttttccttttgccgaccccaagagttttgggagttgtagttaatcatcaagagaatttggggcttccaagttgttcgggccaaggacctgagacctgaagggttgactttacccatttgggtgggagtgttgagcatctgtccccctttagatctctgaagccacaaataggatgcttgggaagactcctagctgtcctttttcctctccacacagtgctcaaggccagcttatagtcatatatatcacccagacataaaggaaaagacacattttttaggaaatgtttttaataaaagaaaattacaaaaaaaaattttaaagacccctaaccctttgtgtgctctccattctgctccttccccatcgttgcccccatttctgaggtgcactgggaggctccccttctatttggggcttgatgactttctttttgtagctggggctttgatgttccttccagtgtcatttctcatccacataccctgacctggccccctcagtgttgtcaccagatctgatttgtaacccactgagaggacagagagaaataagtgccctctcccaccctcttcctactggtctctctatgcctctctacagtctcgtctcttttaccctggcccctctcccttgggctctgatgaaaaattgctgactgtagctttggaagtttagctctgagaaccgtagatgatttcagttctaggaaaataaaacccgttgattactatattggattctgactgattctttgggggtgtattggttaactgaagacagaaagtggggtaatggaatgcaaatgatttccaggtcatctcagatttaggtagagggtgtcaacctcctccatttttaggcatttggaaatccaaacttcttgtgggcagagtcgtagaataaaccacaccattcattctactcctgcccagccactgtttaacgcacctgggaaagttttttttaaaaaagggtttgcacaagaagtggggtgtgggaggatgcgagtatcggccacagcccaagatggccatgaagtgggagtttggaggctggttgtataaacaatttgaccccaaagtgcaagtcaaataataggataaccctttctccttgctaatgctaggggtacctgccacccttagctggtgatggggtggtagggggagggggttggtagggtgaaattccgccagtactccctgagttaagtggaatgactggtttagatcatttctgtttccttccagatctgacattttgtaactagatcggctactagcattggaagggcccacgtttcatcccttcctctagaaagcctaccggcagtttttgaatctgccctgcccccactccagcagagaaggacagggagagcattggcggtagccctgtctggaaagggcggccctttgccttgaacaggaagccacaaccacctagaaaatggagccttcttctctagaaactacaattcccagcggcctccacgcagagcatgcgcgggaatgtgccaggcgggccagccgaaccagcttgcctttcgattcccgacatgcttcatggtgtgttccggtttccttgatttcctacccccgccaaacttcctgtttccagctttctagcggcggactacaactcccagcatgctgagaggtaagattcgtggttgagcttccgttttacacttggactacaactcccagaaagtcgacgggcgtggcgggggaggggacgctgagggcccatgtgctgaaaatccgaagtgccgcggaaagtggaggtgagggccgcccgccctagaggtgcccgtccgagaggcaggtgcgggaagagcctatccttttccctggccatggctcagtcgcctccccagggtttatttgcaccggaagtttggagcg

SEQ ID NO: 2961 - DNA, 2300 bp, Homo sapien
gacacggtggctcacgcctgtaaccccagcactttggagggcccaaagtgggcagattacgacatcaggagttcgaaaccaggctgaccaacatggtgaaaccccgtctctactaaaaatacaaaaattagccgggcgtggtggcacacacctgtaatcccagctactcaggaggctgaggcaggagaatcgcttgaacccgggaggcagaggttgcagtgagccgagattggccactgcactccagcctgggcaacagagcgagattctgtctcagatagatagatagaataaaatatgacctagatagttaaaggaaacctgttctgatgctggagacttattcttgaaacatcttcaagaacttgtgacaagactctctcctaacaaaaagatttagcctgatagaatctggactattacactgactgcatttcaaaatggaatgcattgtagagtaaacaccaactagaacctagttgctctgttgcaacaagtttgaatttgctatggaaacaaattgacaagcttgtggctgagggcctgcttggctgttttcttgcaacaggaccttccagaatgcccccctgtgccagcagcctggtgtgcctcttatcacaaggggaactatggttgagaggccacactgttataaaggcaaaaatagtgaaacatattgccatggacataaggacagccaagtgtcatgcaggactctgggaacaactgcaggcatcccctagtgacaagcagccattctatgcctctgttgttagttaccagggcagtcatgttatcccatcttacagcagaggaaactgaggcttagagttcaggaggttgtccaagttctcaggacagatgaacagcagggtaggatgtgggtttggaacttttggctacatcctggacttccttgcagggagactttgcatatgctttgaaataggatcaggaaacgtgggaagaaaaacatgcatatgttttacctattcaaacctagcatattttgttgctaaattttaaggacgtgtatatgccgtaacataagatccaaatatcttatttctaagggaacataggtgtctggaatgtgggcaaatacagtgacagcaaatcaaagatgtaattacaataaagtcttatttagcttaatggaagagacctgagttcaagttttggttctatcacttcttagcatataacctaggccaaaatgtagtctcgcagaatttggcaaaattctactcattctttaatgcccagttcagtcatcacctttgtgaagccttcccagacccccctccccacctccgaaaagaggtagcacctggcccctcggtcttcacagtttactgaaggggttgggtttattggcattctaccgtaaccgactagaactgagctcatctttgcggggttagctagccgttgagtccaagtctccttggcaagacagtagcttagagaaacgagatcgaatgcacccggaaggtggccaatttgtgcctcaactccttggccatctcctggctaccaaactcaagcgtttcctccttagcaaaggcggacgtagggctcaaatccccgacgtttccagggccaccccccatacggtaagcacggcgaggtccagagaggaccccagtgcgcggagcggcacggcgcccactcctctcgccctcggcgcctagcacgctgccaagaaccgcgggtgcccagtaaatatttgtggattgagatggagcagagggcaggcggaaaccgtgtacagacgtccacacttaactgcgctggggccgcggtggtgagcgctccgcggagtcgggggaagggcgggggccgctccgtccagccgggcgccagctcctcccgggcgggcgggcacccaccgaccgcgggcacacaaagcctgctcggcgtgctcggcgatcggctccttatgcctgtgccgccacgcgccgtcaggcggctccgggttgggcgttgggccgtggcaggccctgggcgtcaagaagctgcacgcatcaaaccgccgcgggagggagcgcgaggttggggggcggggggaggaggaggagtgggtccgggaggagggaggaggaggagtggggaccgggcggggggtggaggaagaggcctcgcgcagaggagggagcaattgaatttcaaacacaaacaactgcacgagcgcgcacccaccgcgccggagccttgccccgatccgcgcccgccccgtccgtgcggcgcgcgggcggagacgccgtggccgcgccggagctcgggccgggggccaccat

SEQ ID NO: 2962 - DNA, 2300 bp, Homo sapien
gcccatttccacttccacgctggctattatgatgcaacaaagtggagaaatgggaagggctcttgctttttactaaattgagtgtaccaaattggaaaatagtttaaaagcgtgtttgttggccgggcgcggttgctcacgcctataatcccagcactttgggaggccaaggcaggtggatgacaaggtcaggagttcgagaccagcctgactaacatggtgaaaccccgtctctactaaaaatacaaaaattagcctggcgtggtgacgcgtgcctgtaatcccagctactcaggaggctggggcaggagaatcgcttgatcctgggaggcggaggttgcagtgagccgagattgcaccattgcactgtagcccggggaacagagcgagactccgtctccaaaaaacaaaacaacaattaaacaaacaaacaaaaaaccatgtttgttgcactgaaactgtgcatgtttataataacgacctaggccggacacggtggctcacgcctgtaaccccagcactttggagggcccaaagtgggcagattacgacatcaggagttcgaaaccaggctgaccaacatggtgaaaccccgtctctactaaaaatacaaaaattagccgggcgtggtggcacacacctgtaatcccagctactcaggaggctgaggcaggagaatcgcttgaacccgggaggcagaggttgcagtgagccgagattggccactgcactccagcctgggcaacagagcgagattctgtctcagatagatagatagaataaaatatgacctagatagttaaaggaaacctgttctgatgctggagacttattcttgaaacatcttcaagaacttgtgacaagactctctcctaacaaaaagatttagcctgatagaatctggactattacactgactgcatttcaaaatggaatgcattgtagagtaaacaccaactagaacctagttgctctgttgcaacaagtttgaatttgctatggaaacaaattgacaagcttgtggctgagggcctgcttggctgttttcttgcaacaggaccttccagaatgcccccctgtgccagcagcctggtgtgcctcttatcacaaggggaactatggttgagaggccacactgttataaaggcaaaaatagtgaaacatattgccatggacataaggacagccaagtgtcatgcaggactctgggaacaactgcaggcatcccctagtgacaagcagccattctatgcctctgttgttagttaccagggcagtcatgttatcccatcttacagcagaggaaactgaggcttagagttcaggaggttgtccaagttctcaggacagatgaacagcagggtaggatgtgggtttggaacttttggctacatcctggacttccttgcagggagactttgcatatgctttgaaataggatcaggaaacgtgggaagaaaaacatgcatatgttttacctattcaaacctagcatattttgttgctaaattttaaggacgtgtatatgccgtaacataagatccaaatatcttatttctaagggaacataggtgtctggaatgtgggcaaatacagtgacagcaaatcaaagatgtaattacaataaagtcttatttagcttaatggaagagacctgagttcaagttttggttctatcacttcttagcatataacctaggccaaaatgtagtctcgcagaatttggcaaaattctactcattctttaatgcccagttcagtcatcacctttgtgaagccttcccagacccccctccccacctccgaaaagaggtagcacctggcccctcggtcttcacagtttactgaaggggttgggtttattggcattctaccgtaaccgactagaactgagctcatctttgcggggttagctagccgttgagtccaagtctccttggcaagacagtagcttagagaaacgagatcgaatgcacccggaaggtggccaatttgtgcctcaactccttggccatctcctggctaccaaactcaagcgtttcctccttagcaaaggcggacgtagggctcaaatccccgacgtttccagggccaccccccatacggtaagcacggcgaggtccagagaggaccccagtgcgcggagcggcacggcgcccactcctctcgccctcggcgcctagcacgctgccaagaaccgcgggtgcccagtaaatatttgtggattgagatggagcagagggcaggcggaaaccgtgtacagacgtccacacttaactgcgctggggccgcggtggtga

SEQ ID NO: 2963 - DNA, 2300 bp, Homo sapien
cgcacccgaccttctttatccatttttctttctttctttctttctctttctttctttcctttctttccttctttccttctttctttctttcttttttttttttttttttttgagatggagtcttgcacacttgcctgggctggaatgcagtggcgtgatctcggcttactgcaacctctgcctcccgggttcaaacgattctcctgcctcagcctcacgagtagctgagcttacaggcgcccgccaccacaccatgctaatttttgtatttttagtagagacggggtttcaccatcttggccaggctggtctcaaactcctgacctcgtgattcaccagcctctgcctctcaaagtgctgggattacaagcgtgagccaccacacccggcctactttatccatttttcaaaggaggaaagtgagactcagagaagagaagtgaccgcacagtcaccagagagtacgttggggaacctagatttgaaagcagattttagaaatcaacattgtgcaaggcatactagctgtgaggtaggacttgatggtctagtttctcaatgtggtcctcagtgcctggtttgcaactaactgagtagtttcttacagatccaggcttccaggcccaacccacatctattgaataggaatctcttaggctagatttcaggaatttatatttttcagaagctttcctagtgatgcttatgcacattaaagtttgagcacagattgctctaaggagccttcatggagaaggcagcatggagtttgtctctgaagggtggagaggttggggaggaggtgccccatatcaggctcgtctgatagaggattcaagcttgggcctttcactgtctctctgcattgtggtcatcattgtccctcctcatcaacctttccaattttctcttcagcctcctcccaaaacctcaacagccttttctctggcttcgctcaacagaattttctgcaatctgggaacagggaggtggtgcccacacagagatgaattagcatgtaaaggacacacacatacagggcagacaagtagagggcactcagtcacaggcagacaggaagggggcagagatgggtaaacaagaaaaggatacaaaatcacaagcggacagggaaggactggcgcacagcagatcatcacaagcagacataaatgggctggacaaggactcctataaacatggatggaaaggaagggcacttacagagacagatgtaagaaagtcacatacaaagccataagaagcagcactcacagacgtaaaggaatgtaaaggacatctgcaaatggataggtgggaggcacagccaggtaggacggactcaagtgattcctcagaacggtcgccctttaccccactgagctgagaagggattaacctcaagtacctggcccggattgtcagagccttgcccatctttgtctcactggttgctgcagagggaggccaggccccaggctccagggtaaggtgtgttcctggatgtgcaccccgatcctggtgagggagatcacctcctcccttttacgtcacatttatttcaactcttagatgcttattattagacctgcagcctcgcttctttctggcttgcagcccaatttcgtacgggtcccttgggcccttgctctttttgggatgttttattctaattcccagtcccagccgactgggaagcttcaccagttcatttacagatcactttgcctttaagcaattttcctcaatccgccagcttcccagactccctttcgttcccgacatcacttgcagtttctaagagcatcatatctcccagaaatcttagtggccaaggggctaccctagggaacttcaagtaccgaaatgctctcctgtccgtctcagtgactgccgtggtgaccggtggggcttgtagtcacctcggaattgttaggcgacgaaaaaaactactcaccccaggtgtccctgcgtcagaggcgggtttctctcctgtctccctttgctcgcccctaaatccttcctcggactccaactcccgccgtgccttgcgctgagatccctgcggcaaagaaccgggctgtgtccaaagtgttctctggaagttgtagttcctgtattggtgaggcaaggaggaggcggagtgactcggcggccattagctgtgtgtagttgcccgggactaggagcttaagtgaagaggtacgccttgttcggtggaaatcagccgtagccatgagtttctgccggggctagccctagagtacggagcaggcggacttttcggttccccgccccgc

SEQ ID NO: 2964 - DNA, 2300 bp, Homo sapien
atagaaacaggtaagactcgctgcctcttctagaaacagtacccaagcatcctaactcacctagctttgaccatagctaaatgatgaatatgaggcacagatctgaggttcagagagactgaaccttaatcttaatcttcactctgccctgttaccaggtaaaatcgtgcatgctggacacctgtttctcatctgtaaaacaatagtatgttacctcccagagctctgtaataattgaaagaaaggaccaatgaacggcaaatgatctgcactaaacaaatattcgatttctcctctaactcccctcaaaaatagaaaccaagattgctatcattttcctccaggcctgatgcttttgagttcagaggcaaggaaaagatttgtcccagatgttcggcaaaggttcaggagccctgtctcctgtcattcttcaggtgccagatttcatcctgttctcagtaggaggaaaggggaaaaagccggactgaagtgaagatgcaaagaagggggagcggatccaagtgtccctaggcctgtcagtaccaggtgatgatgacatgtggccttctgcaggcaagcccagcttcaggaaacccacatgggcaaacacccaaactcccccaagttgaccaacttcagctcaattaatcgcattataagaggattccagtggccttgaatccacggatgcgtttgtaggaaggagttctgaaatctccacatgtccctcctacagccgactcaaacccgatggacagtttgggggtgccttccccggatactcacatctcccttatgcaactccggcgccgcgatcttcacgggctctttcctcttctttggcttgggaagccccagcgggggaccggcaccgccaattggagggggcagattgaggccagggcctcggggcgagggcaaccccaatcccagtccctccccaactcccgccgcttcagccgggctcacgcctggaggtggggggaagcctcccaggccgaagggcaaggggggaggaggctgaagcctggggtctccggtgggtgggggaagcaacagcggcgggggaaaggctggcgccagcatctgagggggcggaggcagcaaggccggacccttgggcgcagggagagaagcgaacaagccccctaaagcgggcccagatgtaggagccaccgcctcctcttcctccggctcgggctcagcctcatccggctcgctctcatcgctgctggcgtaagcaaccagcgacatggcgcctcccgcgtttcgggcgcccttgccggcagatgaggcctacttgagaccggggatgcccggaggcctagtaggccccgccacctggcggggcggggaaccgaaaagtccgcctgctccgtactctagggctagccccggcagaaactcatggctacggctgatttccaccgaacaaggcgtacctcttcacttaagctcctagtcccgggcaactacacacagctaatggccgccgagtcactccgcctcctccttgcctcaccaatacaggaactacaacttccagagaacactttggacacagcccggttctttgccgcagggatctcagcgcaaggcacggcgggagttggagtccgaggaaggatttaggggcgagcaaagggagacaggagagaaacccgcctctgacgcagggacacctggggtgagtagtttttttcgtcgcctaacaattccgaggtgactacaagccccaccggtcaccacggcagtcactgagacggacaggagagcatttcggtacttgaagttccctagggtagccccttggccactaagatttctgggagatatgatgctcttagaaactgcaagtgatgtcgggaacgaaagggagtctgggaagctggcggattgaggaaaattgcttaaaggcaaagtgatctgtaaatgaactggtgaagcttcccagtcggctgggactgggaattagaataaaacatcccaaaaagagcaagggcccaagggacccgtacgaaattgggctgcaagccagaaagaagcgaggctgcaggtctaataataagcatctaagagttgaaataaatgtgacgtaaaagggaggaggtgatctccctcaccaggatcggggtgcacatccaggaacacaccttaccctggagcctggggcctggcctccctctgcagcaaccagtgagacaaagatgggcaaggctctgacaatccgggccaggtacttgaggttaatcccttctcagctcagtggggtaaagggcgaccgttctgaggaatcactt

SEQ ID NO: 2965 - DNA, 2300 bp, Homo sapien
ggcttggaattttatttttttagaggcgaggtcttgctgtgtttcccagggaccacaggcactcaccaccacacccggctaattttttaatttttttatagagatggggtctcactttattgcccaggcttgtctcaaacttctgggctcaagtgatccttccaccttgcctcccaaaatgctggtattatagatgtgagtcaccctgcttggcctgctctatattctttttttctttctttctttttttttttttttttttggagacagagtttcactcttcccgcccaggctggagtgcaatggtgcgatctcggctctctgcaacctctgcctcctggtttcaagcgattctcctgactcagcctcccaagtagctgggattacaagtatgcaccaccacacccagctgattttgtatttttagtagaggtgaggtttctccatgttggtcaggctggtattgaactcccgacctcaggtgatccgcccacctcggcctcccaaagtgctgggattacagatgtgagccactgtgcctggcctactctgaattcttaattctaaaattgtatgcagtccttttaggcagataccattaaaataaaattgatttgggggtacatgtgccagtttgttacatggatatattgcatagtggtaggcagataccgtttgaatacaaattcatatcactggttctctgctctcattcatgtttggagatacctcttagcttcccttttcctgggttcaggagacgttctgagtagaagtagcctttcatctggcatcaagggagtttggtagatggcagggtgaaaggacgtagagaactgagggtgccttgggattggtgagtcacaaaatcattccataaactctggctctttagtggcatctgctgacacccttgcccagattcctgactcctgcatttttttcttttccagtttaagcggctgcagggcaagaggaaccgagggagagaagaaatcaactttgtggagatcaaaggtgatgaccagctcagtggggcccagcaatggatgactaagtcattgacagaagagaaaaccatgaagtcattcagcaaagtaagtgggaaacgtctattgagtggtcagcttgggaagctgcaaagcaaaatcttgtcttactccccgtcttgaccccacaccccattgttattgtcacagcacctttagcaaacacattttgcccatggtactggagtatgcactaaacctcacagatacagctcctgccctctagaactttgcaggactttaacagctctgcagctggatggggggtctggttgctgagatcgagtagttggtgaggcctcccagcctgtggttgtggcttcttctcaggctgcacagaatccacagctgctctactcttgccgtacagtcagatccttctttcctttttttgatttaaagttttttgctttttttgttttaatttttattcttttaaaatactatcttcttcctttccttccctccctccctcctttcctcctttcctccttccttccttccaattgttttcattttctggtgttttttttttttttttttttttttcagagtctcactctgttgcccaggctggcatgcactggctcagtcacagcttattgcaacctctgcctcccaggctcaagtgatcctcacacctcagttgctgggactacaggtgcatgccaccataccaatctaatttttgtatttttttgtagagttggagtttcactatattgtccgggctggtctcgaactcctggcctcgagtgatccacctaccctggccttggcctgccaaagtgctgggattacaggcatgagccactatacccggccccggttagttcattgtttcaagctgggacctggctcagcacatttttgaggtgtgggcacaacagcacctcagaaatcctggagtccctagattctgagcatgcaactcttctgtgttctcttcattattgatggtagccagctgtagtctttccagtgcttttattcatcacatttcccacaccacactcctgccttctctgtcctagttttcttcagtcagtatgatgaacatttcttcacctagtagctgagaacagcaaatgtggacatttatgagcctgccaccggaggggaaatgtgggaaaaccctggacttgagcccagcaccagcgagaccaaggtcgaggattttgttcccttttcctccccccatttgctttgctttgttctatggccacagatggccacacaagccccagccgt

SEQ ID NO: 2966 - DNA, 2300 bp, Homo sapien
caaatgactctgtgtgcccctggcctctccttgcccctctgactccgtgtggctgggctggtctcttaaggacggtcccccagcactcatatttctcgaagggcctgccaccctcccatgaagatgaagatgcctgggtaagggaggcatgcccgagtggtgtttcgggatgagaaagtgcctggtgccgcgtcctgcgcctgggctctgagcgggaggggcgctggcccgagaccctgggctctctggtcagggtctggggcgcgtacctgtcgggcgaggggctcggtgagcgtctccccgtaggggctgagcgggtgcgcggtgtagtgcagcagcaggtcctgcagccgcgcgtgggcgctgtcctcgcccagcaccacgtggcgcccgtccctgagctgggccagcaggaagtggcggcagcaagtccggctcctggagggcgccgttagggatcagactatctcccgctcctcggccagggtcaccagcgagaggcgtgatccccaccttcagcagcccggggaatgagctaagagcccggctcctcacgggatcagacccaagccccgcccctcccgagccccgccttgtgtcgcccggcgcggggcctcgcccctcacctgtaagtcagcacgaaggtcaccgcgctctcgctgaaccgcaccaagtagcacccctgaggcttgggctccagcagcctctctgcctccctgtgggtgacggagagagggggccgaaccctgctctgacacttccagcctcgcctctgtctccccggctctcacgaggaacccctacccccaagcaagcatgctggagcggctagagaaaggctagggcggagatggggagagagagcacgtgggcgctgctctcccgctgcagggattaggcgtggacaggggccaggggtcccattcaggagacccccgcatcctcccctggcctcatcctgaaagggcagcctgcaggggctgctactgcagctacagggatgggaaagtagttggacttccagatttcagaagtcaaagctgaactgaggaggtgaacaaagagttagggagaaatgaggctgagaaatggaggagggagattctgcaagggtggaagaagagagggctgggagataaagatggagtaagcctggagggagagagaggtggaaaataccagcattcgaggccttagggacaggaggataatggggcctagagaggggaagctgaggtacacagagggctggactggagcctctccaatgatctcccctggagagatgcctcagtgaaaggctaggaaaactctgggagtgggagcctggagtgggcgcctccatctactccagactggtagaagtgggagccttcatctattcctggcaggtggcaggacccagacccaggacttgccctgcccctgtctgggccaatttcctcctccatgactcacctccgggtgatgaagccatggaaccaggcaggggctgccccgtgctgcaggagccagtgggcctgggtcttctggaaccaagcccgggtctcggcctgcaggaacaggcttccttctccaggcacctcctctgccctctcagcattccctgtgttggaggcagcctccggggcctggggagatgcctggatcagggaagagttcaaggagggggaagcagcatgatgagtgggccttctcctgactttgatccacctgccaccttcttttcctcatacccagcctctcctgtctattttagggtacaattgcccagaaagtccttcctaaagtctaacttaaatcccttcttcagctccagctgttctggcttccagagactctccttcctttgccctctgggtcctgagggcttttaatccagcagcagtgagctgtcacactgtgctctaggaggggcgggaaaggcagcacagccttccagatggacagagtcattccctggcctggaggatgaagaaacatgatgcaggaagtcaccctagaggccagaatgagggagggcttacttcataatatgagggactgacctagttcgcagggaaaattattgactgggcaggagagaaggactgagacgggaatgtggaatgcactgggcaaatggtcactgacacagagtgcagatgcctgcttctgggactcaatgcactgcaccctggtcatctgcggactcagcctgagcttccagagggcctaggagcagtaagggagtgagtgggcaactcggcgcatgaaggaggtactcctcattttcgttctctctctctgtgccccagccc

SEQ ID NO: 2967 - DNA, 2300 bp, Homo sapien
atgaaaaacagtatggagattccttaaaaaaacaaaagtagaaataccattatttccagcaatcccactactgggtgtctattcaaaggaaaagaagtcattctattaaaaagacacatgcacacgcatgtttatagcagcacagtttgcaattgcaaagatatgaaaccaacctaagtgcccatcaaccaatgagtggataaagaaaatgtggtatatctgcatcatggaatactactcagccaaaaaaagaacgaaataatgtcttttgcagtatcttggttggagctggaggccattattctaagtggagtaactcaggaatggaaaatcaaatatcgtatgttctcacttattagtgggagctaagctatgaggacacaaaggcatgagagtgatataagggaatttggggacttggggggaaggttgggtgaggaataaaaggttacatattggggacagtgtacactgcttgggtgccaggtgcattaaaatctcagaaatcaccactaggtaacttatccatgtagccaaaacccaaccgtaccccaaaaattattaaaaatttagagcatgtttttaaaagcaaaaaaacagtacacaattttttaaaaaacagtaagtcttggcaagtccatctcccccatctgacatcttgaaacaaagttttttttttcctctctgggttctcagtaccaagaacagtgcatagcacatagtcatgaacctttggcctaaatcacagtgaaattagtgaaaggaagtctaccttctagtcccagcactcacaccaacttctcagacactgaaagaccctggccaaggcactcctctgagcttctggtaaatggggataatgttcctgtccccttcttagtttgtgaagataaattcagagagaaatgggattggtcctttggtatggtgggaagtctaagcacattgaaagtttaagacattaacactggccagtgcagtggctcacgcctgtaatcccaacactttgggaggccgaggtgggtggatcacttgacgccaggagttcaagaccagcctggccaacacggtgaaaccctgtctctactaaaaatacaaaaattagccaggcatggtggtacaagcctgtaatcccagctactcgggaggctgaggcacaagaatcccttgaacctgggaggcggaagttgcagtgagctgagattgtgccactgcagtccagcctgggtgacagagctagactctgtctcaaaaaaaaaaaaaaaaaagatgtcaacactgatgttattaatgacaactgctgatagtgttgatactaatgatgacctgcttagctggaggaattctctttccttcctccaatattgcctggttttgccctaactcagctccattatctgctgaatgatggaagccaggccccctcctctctaaccccttgtcttatagatttctttattattattactattattattattattttaaaaatagtgatgggctctcactatgttacccagggctgatcatgaactcctgggctcaagcgattctctcgcctgagcctcccaaagtactgggattacaagcatgagccaccatgcccagactcatagatttcacatgtcctcaaaaagtccttccagaagtctgacccacatccttcctgttgcagccctgccccctcccttcctcatgtctcctcaaagcatgatccataagcaccttgtgtggcttatccttgaggttgacatccccattcccactgctcagaacaggccaagaggcagagtgggagattttccagagagaaagaaatagaagccaagagagatgagagagagagagagagagagagagagaaagggaagttctagtttggggtgagggggcagagaaagaatctggagggatgaaggtcaggcagcagtaagggcttcctaacacctaaacacagagtgacacagataccccccaccgctataccaccgctatctacagctgcgtggcttccgggggtgggacaatcgtcttaaggctttccatgacgtgagtcctcgccagaactaaggctgtgggtaaggcgacatttcctgcccccggggccagggtgagaggagagatgatgagttgctgagtgtgcacacctttccggaacacatacacacaccctgctctgggatcccttgtgaggctgccctcatggagttccccctggcccagatatgtccccaaggtaagtgtgaagttgaaggatatgggtgggagggggcacaaagacccccatccccctgccctcc

SEQ ID NO: 2968 - DNA, 2300 bp, Homo sapien
ctgtaaacagagagctattggcctcccttggggtaagcctagggttgctaggaatctctgagaagtgtctgcttttctctacttcccacctgttttatgtctcctgggatggaagacacggtagggctacaaaaacatgctgccaatcctgaattcaataaaatggactttgtcccagcctaaaacatggaggaaaaaaatgtccttggagagtatgtatgtgacagagcccgcgatacacacccaggtagcgaggggacagagcagggcgcctataaggctctgtgcactcatcctgagcccagacctctgggcaggaagcctcgttcttttaaaagcaaactgcttgtttttccctgcatgaataatgtatgttctttaaaaatcacaaagagaaaatacagataagcaaaaagaagatataaatcatccacaactcatcacccagatgcatatttatgcttccagatattttttctgaatttgtacatggaaatgtaaaaaatggcatcatttatattatctgtaacctgctcttttcactccatagttcatcctggccatctttccatgtcactaaatgtacttctgcagtatctttgtaaatgatatcacaaccagataacaacgacaataatttgtatagtgctttatagcttacaaagcactgggcatccattatcttatttcagctcttggccttccagcattaaggtctctcccctaggaaattctgcttccaaaagaggtacccctgcctccttcacacctgtgcctcccatgccccagaagttgccgccatctagggagggttgctagccaggccccttctccctctccgtttcttgtctgaacctgctgacaacttctgtcctttttgtctcattttcttgagactcccttttcatagtctcagaatttcctcctggctgccacccttgtcttctctgcttcatctgtcctcccctttctcctcctgcgtgtctgtcagcccccctcctcctgtccagttctgcttaagacacaggatgacacacctgggaggctgggagccagagtgggccctcaggatgggacccgtctcatctccagaaatgactgagcagaaagtccccctgttgttcacaagtggggagagttgggggccacacccacagacatcaaagggacagggctgggtaaaaagtcccggggtgtcctcagagcttccacagctgtgcatagggacgtttctgagttgctgtctccctaccgctgcctctctcttccacaccctgctctatttctttctctcctcatgacctacctggcatccccattctttcttgtcctccctctgacatctagaggccttggtgattgacagctacctccctctgtgtggaaggacagggtagggagagaggcaagaaggaatgccctctgtccttgaaccagcctcactttttggtcctggaacttcagtcctatcttcaccctgtgagtgcctcccttatgcccctccctcctccctcctctttcatggtgggagtgctgaaggtgaggagaggctggactctgcctgcaactctgggcctgctaagtcggggaggccaaaccattcagatgtgctgccttcacagggctgaatgaggagcatatttcacaggactgaatgaggagcatatttcacaggactgaatgaggagcatatttcacagggctgaatgaggagcatatttcacagggctgaatgaggagcatatctaagctggagctggacaagctatgcaattagccaagatcctgggcaggagtctagatctcctggctttggaaaagggcagatatttcagagttagggaaatccagatatccacgcccagtggtcaccccacccctcgccacacccactctgaacacttaacccatggcccatcaggccacttttcaacagcaaggacatcagaactctgagccatgtggcccctttaaagagccttgcctcagccaggcatcagctgcagctgaggaattgatctccagctcctatctcaccaagtgcccttcccatctgaccgtgcatctggagctcgccaagcaccttgtgctccaactgtgtaccagggactcaccaggtaccttctgcactatatgcccagggctccccaagcacccttcacttcagctttgcatccagggtccaggggctcaccaagtatcatctgctctaaacccatccccagctccgcccacctggattccttatttggcacacattcaagaggatgctacattccccactctctccagcagtggat

SEQ ID NO: 2969 - DNA, 2300 bp, Homo sapien
tgtgccagccaagctgcccgcgccgtccgcctcgcagcatcgcggcggcgcccgcctcgctcaggcggggcagccgtctgtgcgctcccagctgcagctgccaggcctcccccgacatgtgcgctgggcggtgttaaagacccagccgccaggaaagggcggagccagcggcccccgcccggccccgccttgcccctcttctccacccgcttcctactctctgacgcccccccctctgccccctcccctgttaggggcccccagcgtcagccttctccccgaggatccgcctcagctccggcagacgctgaggggccgcagcagaacgcctcggaggtgtctgctgaggccggaggtgggaagctgatacgttatttctctcagcttaaagcagctgcatttttacatttggggaggagggaagatgactgcgttgaggaaaggttgctgtccaggtcatcctagccagccccaggctcagcgctccatcctcgcggcgcgcgtgcctaggggagtgagcatgtcacttggagtaagttaggtagaacattctccgaactctaggaagaaaacgaaaaggactaccaaaggatcaatcgcagaacctggggaggaagacacagacggggcagagaaagggaaggggtcgcctaatccggccgaagggagtccggagagccaagaccgcgcctccaagagaagccacagggtggcgcgagaagcccgcgcgcaaaggcgcgagctccccgcccgcgctgggtgcctgggggtgcgatctgcagcccccagtgagcaacgcctcaggtctcagcttcagtccctgaccccggccagccagcgccggccccggggcaggatagggcaaggcagggcagggctgacatcgatcgcctccctgacaagagcatcgatttattcgtgaagaaattaatagatcttctcttagctcctcggacgcaggagccgcccgcgggtggagctgaggaccgcgcaccttggaggccgagcacctggaaagccccgggatccccagcacccagggcagcagaaggctggtcccaacccctcccaccgcgcaagcctccgtggctgcactaacccatccgtctcaagctggggagagcgaagggaagaggggtgtctcttggcggggagacaggcaaggccccagggagcgggggaaggacgacctcctagaggctcacggttctctccgccaaggccccagcacggatggccccccaagtccccgagacagggacacacagaccgaccgagcagcctgagctcaagaaggtgaccagacggaggcagagccctacacagtgatcgccttcttcctcgggatcttggtcagaaccaagggactaggcggtgacggagcctggcgctaaggggtctccaaagaggacaaggaggcctcctaggaggctgagaggggctcccagaggccaagggctgtccacgttctcccgggtcgaggctgccagaagttaccccgcagatgtcaaggcaccgggaagcagaatctagacacagcgctccccagaagcccgggcgcgctggctgcccctccggcggtgcagccccacttggaagaagcctgtggtggggacaaagggttggcgggagccgctgcagccgcagcgggatttgaggaagctcagttcttggcccaccctccccccgtattttggccttatttccccaacagacctgtcctcccctcagttgtcaggctaaatattttgacttggcgggaggggtggagagaacggaaaggtccctgcgaaccaatctgtttaggcggggggcggggagggcgggagctgggcgcggcccctgcgtgccggccctgggaaggaccgcagccagcactgtcagctggcgctggggggccgcgcgcccggagggatccagggagactctccctgcggagtcccacgcgccccgggacccccgctgccctccttgggagcggtccccagcctgctgctccgccctcagggttggctggcctctcggcctgccttttgctcagaaccctgtgtcattttctccctctggaggcccgagactctccctgtcactgtctgcatctctgtccccatctctcaatctcatgctgagtctctctgtctccaactgcctgtcactgtctttgtgtctctgtgactctcatttctttttttctgtctcctgctgtctctgtgtgggattccttgtctctctgcccctgccctccctctcctatctgaaccctggtctctgtgtcccttagggcttatcacaccgttctc

SEQ ID NO: 2970 - DNA, 2300 bp, Homo sapien
gttcagataggagagggagggcaggggcagagagacaaggaatcccacacagagacagcaggagacagaaaaaaagaaatgagagtcacagagacacaaagacagtgacaggcagttggagacagagagactcagcatgagattgagagatggggacagagatgcagacagtgacagggagagtctcgggcctccagagggagaaaatgacacagggttctgagcaaaaggcaggccgagaggccagccaaccctgagggcggagcagcaggctggggaccgctcccaaggagggcagcgggggtcccggggcgcgtgggactccgcagggagagtctccctggatccctccgggcgcgcggccccccagcgccagctgacagtgctggctgcggtccttcccagggccggcacgcaggggccgcgcccagctcccgccctccccgccccccgcctaaacagattggttcgcagggacctttccgttctctccacccctcccgccaagtcaaaatatttagcctgacaactgaggggaggacaggtctgttggggaaataaggccaaaatacggggggagggtgggccaagaactgagcttcctcaaatcccgctgcggctgcagcggctcccgccaaccctttgtccccaccacaggcttcttccaagtggggctgcaccgccggaggggcagccagcgcgcccgggcttctggggagcgctgtgtctagattctgcttcccggtgccttgacatctgcggggtaacttctggcagcctcgacccgggagaacgtggacagcccttggcctctgggagcccctctcagcctcctaggaggcctccttgtcctctttggagaccccttagcgccaggctccgtcaccgcctagtcccttggttctgaccaagatcccgaggaagaaggcgatcactgtgtagggctctgcctccgtctggtcaccttcttgagctcaggctgctcggtcggtctgtgtgtccctgtctcggggacttggggggccatccgtgctggggccttggcggagagaaccgtgagcctctaggaggtcgtccttcccccgctccctggggccttgcctgtctccccgccaagagacacccctcttcccttcgctctccccagcttgagacggatgggttagtgcagccacggaggcttgcgcggtgggaggggttgggaccagccttctgctgccctgggtgctggggatcccggggctttccaggtgctcggcctccaaggtgcgcggtcctcagctccacccgcgggcggctcctgcgtccgaggagctaagagaagatctattaatttcttcacgaataaatcgatgctcttgtcagggaggcgatcgatgtcagccctgccctgccttgccctatcctgccccggggccggcgctggctggccggggtcagggactgaagctgagacctgaggcgttgctcactgggggctgcagatcgcacccccaggcacccagcgcgggcggggagctcgcgcctttgcgcgcgggcttctcgcgccaccctgtggcttctcttggaggcgcggtcttggctctccggactcccttcggccggattaggcgaccccttccctttctctgccccgtctgtgtcttcctccccaggttctgcgattgatcctttggtagtccttttcgttttcttcctagagttcggagaatgttctacctaacttactccaagtgacatgctcactcccctaggcacgcgcgccgcgaggatggagcgctgagcctggggctggctaggatgacctggacagcaacctttcctcaacgcagtcatcttccctcctccccaaatgtaaaaatgcagctgctttaagctgagagaaataacgtatcagcttcccacctccggcctcagcagacacctccgaggcgttctgctgcggcccctcagcgtctgccggagctgaggcggatcctcggggagaaggctgacgctgggggcccctaacaggggagggggcagaggggggggcgtcagagagtaggaagcgggtggagaagaggggcaaggcggggccgggcgggggccgctggctccgccctttcctggcggctgggtctttaacaccgcccagcgcacatgtcgggggaggcctggcagctgcagctgggagcgcacagacggctgccccgcctgagcgaggcgggcgccgccgcgatgctgcgaggcggacggcgcgggcagcttggctggcacagctgggctgcggggccgggcagcctgctggcttggctgat

SEQ ID NO: 2971 - DNA, 2300 bp, Homo sapien
cccaatttaaaaaagtctaaaaaacaaagctcaccaaattgtatgctctaagtaggtacattttttattgtatgtcaattatacctcaatacagttgagttttaaaagtctcccaggagggatgatactgctttgctctcctcacctaagcttactctgtggctctctgtgtgaggaggtggagtgtgagccctggaattggacgcaccacagacctcggttcaaatcttgcttgtaggcggggcgccgtggctcaggtctgtaatcccaacactttgggaggccgaggcaggcggatcgcctgagcccaggaagtcgagaccagcctggacaagatggtgaaaccccatctctactaaaaatacaaaaattagcctgacgtgtgggcgcgcgcctgtaatcccagctactcaggaggctgaggcgggagaatcgcttgaacccgggaggcagaggttgcagtgaactgagatcgtgcgtgggagacagagcaagactccgtctcaaaaccaaaccaaatagtgcttctgccactaattagtgtcctaagccgctcaggacgtcggtttcgccatatgtaaaaggacataatgatgaaaccaatctcgagtgaaggattcaatgaggcaatacgcctgaagggctgaccacggcgaaagctaatgttcattgctatcaggcggggaaagctaatgttcattgctatcaggcggggaagggctcccaggtctggtcccccggctgtggggctctgggaagcggatgctagccgcgaggtggcgctcgcaccggactcggtgggctcaggagttgcttacgcgctggtgggtgtgggccggaggcggggcgggcagaggcggagaatgcttcccagggtcacaccctcccgcggtgtgacttttttcttttcttttttttttctttcttttttttaagatagggtctcgctctgtcgcccaggctggagtggagtggcaggatcttggctcactgcagtctcgacctcctaggctcaagcgatccttcctcttcagcctccccagtaaaccgagaccacaggtgcgcgccactacacctggcgcgttttttttttttttttttttttgacggagctgtgctctgtcgcccaagctggagtgcagtggcacgatctcggctcactgccaccttcgtctcctgggttcaagcgattctcctgcctcagcctcccccagtagctgggattacaggcgcccaccaccacgcccggcaattttttttgtactcttcgtagagacggagtttcaccgtgttggccaggctggtctctaactcctgacctcaaatgatccgccctccttggcctcccaaagtgctgggattacaggcctgagccacggcgcccggccctaatttttgtatttttagtagagacaggatttcgccatgttggccaggctggtctccaaactctgggctccacgatcggccggcctcggccttccaaagtgctgggattataggcatgagccaccgcgcccggccttccgcagtgcgattaggggcggcaggaggagaggggggcctcgccctgtcagcctctccgagactagtgggatgcggtgcccgggaggggtcttaataagatcacggttgctgggcagcactggacagtgcccgacgtaggcgatctcattgattccttcccacaaccccactttgcagataggaaagctgaggcacgagagggtaagtaacccaggccgcacaacgaggggaagctagggagggactggggccctgggcccctgcgctgacctcccctcctcatccccttcttatccccctctgctcctggcccaggccgcgcagagtcggcctctgtgatcccacccagaatacagttttccctcccgggcgcctggatctcccctcccccggctcctgtttccttgtcaaaacttcctgccttggcgagggcccgagttcccacccccttcctgccccccgcccctcggcgcccctcccggccctgcgatcagcagcgtcccgcctccccgccgctcccgcagtcaggctggggctcgaagtggggaccctcgccccgtcctcggctgtccagtcctcctcctcgcagaccccggcggttcctaccccaggccgcaggggagacggggccccaaggcaggtgagtgactgcgcgccccctggcaggggaggcccggtggtgcggccccggagaccaccctgccccggggaaagggcttgcggtccctgaggtccccctcctcgactggagtctgaggccccagacccaggag

SEQ ID NO: 2972 - DNA, 2300 bp, Homo sapien
ggttgcctttgactccagccccatttctgaccttgtctcagtctctgaaccatcctttctctttccccgtcccttagttcctgtgggaggccaactttggaacagagcgcagagtgggagccattcgttgtggagcaagcagaggggctggcccagggggagcaaaggaaacagggcggggagaaaagacccagggcagaatatagccggaaatacttcagcccatcgccgccagctgggcccaggagtcagttctcactcaccctttccatacagggaggagagggcagggagagaaaaatggaaggctccggtccaatagagtgggaagggcgctctgatggagggtatcccaggaaccttccagttctgggagaagcctccagacttgagaggtgggacaggatgggggtcccatcctaggctacgagagcagccccagcgttgggctgtggattccccactgtggccaagccctcatggccattttcccgttgtggccgctcaggcctcctcctgccctcggccctgaccctgttccctgtcttgcagcttcactaccaccaccaaggagtcccactcccgccccttcagcctgctcccctcagagccctgcgagcggccctgggagggcccccatacttgcccccagcccacgtgagtgctcctcatcctccatgggtggatgggctacctgagtcgctgcctcagcctggcccctggccctctgtacctgttcacttctcagaaactcagaggaaactcctggcttctagggattcattctgcatggtctgtgtcgggtacgtgtgtatgggatgtatatgtgaatgcgtgtatgtgtgtttagggtacgcatgcatgttacagtatatgcctgtggggttggggggggggcaagaagggaatgctctttctttttttaatagacaaggtctcgctctgtcacccaggctggagtgcagtggcgagatcgtagtgcactgcaacctcaaacagggaatgcgctttctatgcgccctcagcccagagtgttgagtggtgccccttccctggcctccccctggccacactgtggtgagtgcggacagcagggagggctgagggccgccttcctggcctccgcagggttgtataccggaccgtgtaccgtcaggtggtgaagacggaccaccgccagcgcctgcagtgctgccatggcttctatgagagcagggggttctgtgtccgtgagtccagggttgggttagggagcggggtggggcaatggaatgcggggagcttagcctactcttctgagtccctcccggcccccgctagaatggggttactcctctgcccttttgggttcccccctcctctcctctccctggccttgtccccaggatggggatcagcacttccctctccatcaccacttcacacccctgtctccagccggccccatgtgtctcccaccccatctctccatgtccctcaacagtgtctctgcatcgctgtctgccctagagctcttgttctgtctttgggctgtctctgtctctctgtcactgtgtgtctcaggacttggtgtctgggtctgcctctgtctcttcctctccctgactctctgttgctattggtctctgacttgtcactatccagtctctcctgcccactgcacccccctcccagcaccctgtaatgactggagcctgtcttcctcttcctcccacttccctcagccactgcccatcacgagcctctgcaaacactgctctccagagaaccccgaccgccacctgccctctctctggacagtgtccatgttcagtccccttttgaggatctcccccaaagcattttcccaacaaggtgctcagacaatttcacaaaaaggaacaggggaacccagaacactggcatcttgctaagttctccccctgagttgctgcccctcagtctttatcttagaggcagaattggggcttggagaacttcaggtccctggttttggaggaaggtggggttaggctttgcaggataaaagctgggtaggggcaggggtggacacatctcaccacacccatctctgtcccagcgctctgtgcccaggagtgtgtccatggccgttgtgtggcacccaatcagtgccaatgtgtgccaggctggcggggcgacgactgttccagtggtgagtggctactgaccccagggagtggcctcttgtgccttcagggccacaggaccctcaggtacaccctccctaccagggcacaggggcttaggaccccagggcgattacccgccagagccccatt

SEQ ID NO: 2973 - DNA, 2300 bp, Homo sapien
gctccttgacaatgcacctggagatgtacaaggagattaatgttgtttgcatggttgctaatacagtatccattctgcagcctgtggattgaggagtaatttcgactttcaagtctgattatttaagaaatacattttgtaaagcatgagttgccatacatagtgattcctctgatggatttgggcaaattcaattgaaaacctggataagattcaccattctaaatgccattaagaacatttgtgattcatgatgggaggaggtcaaaatattcatgctaacaggagtttggaagaagttgactccaaccctcatggatgacttggaggggctcaagacttcagtggaggaagtaactgcagatgtggtagaaatagcaagagaactagaattagaagtggagcctgaagatgaaactgaattgctgcaattcatgataaaagttgaatggatgaggagttgcttatggatgagcaaagaaagcagtttcatgagatggaatctactcttggtgaagacgctgtaagcattgttgaaatgacaagaaatgatttagaatattccataaacttggttgataaagcagtggcaggatttgaagaattgactccaattttgaaaaaaagttctacagtgggttaaatgctatcaaacagcattgcatgctattgagaaatcttttgtcaaaggatgtcaatcgatgtggcaaacttcactgttgtcttattttaagaaattgctacaggcaccgcaaccttcagcaaccaccaccctgatcagtcagccgccatcaacctcaaagcaaggcgctgcaccagtgaaaagattatgactcactaaaggctcagatgatagtaacatttttagcaataaagtatttttaaaattaaggtatgtgcattgggctgggcgctgtggctcatgcctgtaatcccagcactttgggaggccgaggtgagaggatcacttgaggtcaggagttcaagactagactggcaaacatggtgaaacttcgtctctactaaaaatacaaaaattagccagacatggtggtgtgcgtctgtaatcccagctactaaggaggctgaggcaggagaatcgctcgaacctgggaagcagaggttgcagtaagctgagatcataccaccgcactccagcctgggcgacagagtgagactccgtctcaaaaaaaaaaaaaaaaaagttatatgcatttctagacataatgctattgcacacttaacagactacagtatagtgtaaacgtaattttacaggcactgagaaaaacaaaagcggtgtgactcactttaatgccatattagctttattgcagtagtctggaacccaacccttagaattttgggggtatgcctttactcaaatggggcccaccagggcagaaccatcagggtctagagtaggagtcaggtgatgactttgaatcccaggtttgtaaggagtgtgattcaccttattaactcgttagaggattaactgagtccccagagacctccaggaggctaaacagatggaggtcgagaatataaacctagcaccacaccaactagatgggtttctctagacgcctttcaccaggtgctctctccttactggacagcggggtggactctggagagtggacctgcccccacctggattctccctagtatcctccgaccgcccactaccccactcccccaggctccgccccgatcccccaggcccagttccaggatgactttggattgcccgccctcgccctatccctgtccccgctcccgtcctaagatccactcgtttccttcgccatggctccgctcaggtcctaggtcaccctagcccttctctcttagcacaggctcggccagccctggccctctgggacccatcagctcctgcgatctctggccggcctcgccctgcctgctccgccgggcctggcccgcccctcgggttctggctccgccacccgccctcgtgggctctcccctcgccttgctctgccctgcggcgccccctgtcggccccgcgtgctctctgcggttgcccctttccctcgggcccgcccgcctcgcgcggttgtcttggagagggacgcgtaggctacgccaccgcggacgggtcggatccggtccctggacgcggaacagagatcccctgattcagccacccccagactgagccccgtagagtgcgttcttaccttcctgccccgacgaaggtcccagagacgctgcggacaacaccagcatgtcgagcgagcagagcgcgccgggggcctcacccagggccccgc

SEQ ID NO: 2974 - DNA, 2300 bp, Homo sapien
agagaagggtgtgtggtggcagggagacaccaatccaaagggatatggtcaaaacagaagggcaggcatattgctgccattctatagacaaggaaactgagatccatctcaggacacacaggtgctggtgggtgagccaggcctctgactgctaatccaggattctttccaacaaacagaagtctctttgtctagagtgagtcagtgcttttgaggagcgtgtgtcgaagggtagagggagttgctgtagacagggatgatgtggccagaaggagagaagttcaggagatccttggtgaccttgatggagatgaaggaaggccaaggcatggccaaggacgcacctgcatgaagagctggaatcgactctccttgcgttgcttggtcttgattagctctagggctattgactgataggaacagaactgtgcagccacttgctggagttcctctcgggcagggccatcaaactgaagaggcagaatggacacggggccaggcatcaaacccctgcctgggaccagacccctgcctttgccaaattctctggccttgggtaatgagaccctgcctcccccaatctcctccttgccaagagggagaagtttggagccatacccgggccagcatgaggtcactgatctctttgatgatggggccttcctcccggagcttcttcatggcttcacaccaggaatctggggcaggaagagaacaaatagaaatgcctggggttgagctcaactgccagaacctttctgacagagagaagtgaatctctgacagcagtgccatgggaagggtctggaaaccattgtactttcggggtgaactccagtgctggtttcaggctgtccacagatctttttctcaccagggattggtgggaggttacctactcagggaggtcctggcagtggggccaaagtggaacaggaagctgaagggcagcagaagaggagtctggaggggcacaggctccttactgtgaatctctatgagttcaggcaggttcgggaagagccgggccagctcctcccggggcatcaggttctccttcttcattcgctggtagaagatcaggtccaggacccggagtgtgcgcaggtgggaagcttcagtcacaaacagctctgagcggtggttgtgacaaggagggtagaaagccagggagaaaacggatcagcaagtatctagagtccctgacctggttcccacaccactctatttttgggggaactgaagtgccagtttcagatcatacagcaacttttctcttactccaagggccagaactgaggggaaccttatagcaacaggcaatgtggacctgctccagcacacaggggccccccaccctatttacctctttcccacccttgtgtcttaggcattctggacctattcccacacgtgtgagcggagctgggggcagtggagcacgttctcaccattgatgacctcttgccggtcaatctcccgctgggttagcccagccaccacatccttgcccactgtatgctgccaattttgggcatctggctctggctccaggtcagacagctggcccagatcatcctctaggaggtggggaaggagggtatctgtgcagaaccccaaactgggggactcaatgctcctgggggaaaacaggcagctcagcttcatttaggaggaagaactcacacagagggtttggccctccctctcctgcccgacctgcttgccccatgcacatgggaaaccagtgggcccagaagaggagacagccacccaaccagccccttgcaggtgagaggagcagctgggtgtggatgggacacagagacaccaaacagaggcaccaccgtgcccatcacttacctgcggcccattttgggagtgaatggaggggttgggttctcaagagacctgtggagggaatgtcaactctcagcaaccctctatccttgccgccacccctgagatgtccatgggtgcagccgttgtagccctgcccacctggtggagaggctggaggtagaggacgaggctgactggtgcaggcgagtagcctccgcagcagcatccatgtcaacatcactgcgagagcggggcacgttctctgcctttcgagaccgtttcatctcttcccggcccttgaggctttcagagcggcccaggcgaatctctgagcgtgaactggggggaagggacaaaagactttgggacttgggaagtcagtgggccatgcttacatcctggctaactcttacctgtggctccatctcaaagatgcctccgtgccacaggttctcctc

SEQ ID NO: 2975 - DNA, 2300 bp, Homo sapien
caatctagactgtgcttcaaatgctgggcagatcacctgttttggggagttctggcctaggggttggtggagacagggtgaaggaagcaggttcttttatttgccaacctatacctgatatacattaaagggaaagttcctggttcatagtaggtcttcaactgatgcttattcgtttctttttcctcttgcaatttgcatatctaccacttctaacactggtgaggtcactccagagctcacgaatgtgtatagataatttacatatacatatccaccccctcccagaacaatccaggtagtgtgaaaggagagaacttatgcaaacaccccactgcctgcagagtattttacaatggcatttacctaggcaagaaggcaaagtccactccccaatcctagtgagagtttttttattttaataattttttaaaaaaaattttattattattagttttttgagacggagtctcgctctgttgcccagactggagtgcagtggcgcaatctcggctcactgcaagctccgcctcccgggttcaagcgattctcgtgccctagcctaccgagtagctgggattacaggcacgcgccaccacgtacggctagttttgtatttttagtagagggggggggtttcaccatgttggcccaggatggtctcgaactcctgacctcaggccccgcctcggccttaatgatttttaatcataacgctcggcaccttctgacaaatgtcacgttacttgtaaagatttagaaactgtgattctatgagagggggttatgaaaatagaattgctctggaaaggctcttccatagagttcaaagacacttcacacagcctgctattaagatgcccaacccaacccgagaggaaacagcgaagggtcttccccctaagtcggtggtattagaagtgggaaggaccacagaaacgggaggaaacagttaaaagaactgacaccacgaaggaggccgcaacaaatgtttgaaaaataagatcagaagagaggtggagagagggtgagccgcagctgcgggcgccggggtaatgccggtggacgcaaagaggtaaacctgcacccgtgggcaggggcacggggcgcgggcacggtggctgggcgggcagggggtaggaaacaaaggtcggctcccgagcagaagtcaataaaagggggaaaagcagccgaggaaaagcggcgaaaaggcggcaggggtggcggtggcggtggcggcggcggggacggcgcgcggtgcctggcggggtcagggccggggtcgcccgcgggccgggccggggatccggctgagatgggaacccgctaggccgcgccgaggggcagggccggcgactgaggggccgcagaggggaccggccgaggagcgacggcaaagggttgtggggggcagggcgcgcagggaggccgggacaggggcgggccggtcggcgggagtcgcggccgcgggaaccgaggcagggaaaggcggtcagcttcccgcccccgcccccggccgccgcggcgtgaggggaaaggccggcgggcggcgggcagcgcagcgaggaggaggagcctgcggccccgccccgcgggagcgagggaaggagaaaggctcgcagggaaggagggagggaaggggggcggccggccgggcctgcgcccgagcgagcggcgaaccgagggggaaggggcccggaaggaggcgagcgcggccgcgacgccggcagtcggacgcccgctcgtgccggcctgccgcagccgccgcagccttccctgtgcgccgagcctggcgtcccgagcggccgcgaaggccggaacacggcggtcgggcgcggggcgagcggcgccgggagcccgaggcccggccgggcgtcctgcgcgaggcactgcgggctcctgcctgcgagattaggcgaggggcggaaagggaggcaaggagaggccgagaggagacaggcgatcggattttccaggagtctggtgtggaagaaaaacccacctcgaactcaaatccacaataataatccgaacgaataataagggagccgtctttctggccgggcgagagagagggagagagaagggggaacgggaggaagcgaaatctccgtttcatggaggctgaggcaagagaaaatttcggagcctggatgtggaggagcccaacagcagaactaactcaggaaattgtctttcagaaaaaggccgaacgtaggctgggtctgagaatcaggctggggtaggtggaggaacctgcaagtttaaaggaaaaagaaaaggagagaatattttcagag

SEQ ID NO: 2976 - DNA, 2300 bp, Homo sapien
cataatgaaaccccattcctactaaaaatacaaaaattagccagtcgtggtgatgggtgcctgtagtcctagctacttgggaggctgaggtgggagaattgcctgtacctggaggttgcagtgagctgagatcatgccactgcactgcagcctgggtgacagagtgagactctgtctcaaaaaataaataaataaataaataaataatagaagtacagagtcttaggtcccccaaatcccactgaatcagaatccgtattttaaagagaccttcagatcattcctattcgcattagagtctgaaaatcaccaacatagattttttttttttttaagtcttaaggcaactcagtatatgagaaagtgctatggattaggagtcagggggcagggcagctaactcaccacctgtctttggtcaagtcattttccctgtctgagcctcctctggaaagtgaggaagcaactccagacaaatcctcacatgccctccagacaaatcctcacacgccctccagacctcacagcctaataagttctcactgagactactgcacactaactccaccagagatggagagccaggcccgggtcacgtaaccctgttcacaggcagtcctaagcgcccaggaacctcccaatgccctggcccaccaggagcagttcccatgtgctgcatccccaaggcagcctctcccagtccctttgcatattgtttcatcttccattagttatagtggaaaccagccttttgcaccatccagaaggctttctgttccatccagaaggctttagagcttagatattttgttctcttttcctatatcaggcaagtctatctcactagggctcattccataaactccccacccttctcagcggagaaccacaagattcccggttcctgtccatggttcaccaattcaacaaatatctataaagcacctttgagtacgatgtcctgtgctacgatgggatctggggagccagcagaggagaacaagacagctagggttgctgatctcggagctgacactctgagcgggatacagatgttcaacaaagaagacactatctataagtccattaccattcattcattcgatcagcaatcatttattgaacacctattttgcgccaggcccttgggactggcaaaaaaaagcccataaaaattcctgctcgtctgggcacggtggctcacacctgtaatcctagcactttgggaggcggaggcaggcggatcacctgaggtcaggagtttgagaccaacctagccaacagggcgaaaccctgtctctactaaaaatacaaaaatacgctgggcatggtggtgggcacatgtaatcccatctactcaggaggctgaggcagaagaatcgcttgaacctgggaggcagaggttgcagtgggccgagatctcaccactatactccagcctgggtgacagagcgagactccatctcaaaaaaacaaacaaacaaacaaaaaaaccaaattcctgctcttctcaaatgtcaaattgtttgaaatacagtaaaggcggccaggtgcagtggctcacacttgtaatcccagcactttgggaggccgaggtgggcggatcacgaggtcaggagttcgagaccagcctggccaacatggtgaaaccccatctctactaaaaataaaaaataaaaaaaattagctgggcgtgatggcatgcacctgtaatcccagctactcgggaggctgaggcaggagaattgcttgaatctaggaggcggaggttgcagtgagccgagatcaccccattgcactccagcctgggcgacagggtgagactctgtctcaaaaaaaataaaaaaagaaagaaagaaagaaaaaaaagaaatactgtaaaggcacaggtatgtgtatatgccacctccttcccactcaagatttagaatgagcccatgattaattacatttccttttgtcttctcttgggaaaaactccaatcctgttaagccctaagaagagatctcattctctgtctaaatcccccagcaggggcaggatataggaccctttgcacttctctccatctatataagtagctcagccggaagccctgagtccgagtcagccctgggcagcggggaggtccccagagggggctgggccctgtctgggtatggggaagcttgctgcctctggttcccttttctccccttcactggcaacctcttgtcccttcccttttctctctttctttcctgaccctctcccttccttccttctttccctccatttttccttcctctttcactgtcct

SEQ ID NO: 2977 - DNA, 2300 bp, Homo sapien
agactccagccaggtagagagacttgtttatctctgttgattgtgtttactcaagacatcctttgtgacgttaattagagaagcagcagcagagaaccctaggagtctggcttgagtaaaaatatgcagaaagagtccctatactctgactcctggccctttgtagagcacaggctccttggagtcaaccatgctggctctaaccatgaccatttgagctatgagccaaagatgagcaatttcagactttcagaagaaactactcattcccgatcaccctggtttctgagttgtaacaattactaagatttgcatgggtggtatgagaaattgaggattctcataagaatgattcttatgattattatctttgccaacatttttcatctgccatatttaaaatataccattctctgttctaaccactctacatgtattaacacatctaataacaatcacatcagtagatactgtaggtattatgttcacatagatgaggaactgacacagagaagttaagtcacttaactaaggtcacaaagctagtagatgaaggcacaaggacttaatttccgtttagccgaaccccaatattttaaaggaatgttctagcaaacatctgatatctacatgtaagttgccgttctaggtaccatgcacaagatgcaaagaatatatagacagttcctacaaagagctagtggactagttgcaggtatcggtaaccctctctatggtgtttaagttctgctccttattttgttcacctacagagtaggaagttctaactagaaaagacacaacaatgttatcttttttaaaaaacaggtaaggtaattttaggccagagggagccaatttactaattaatttatcaagagctacacagtgactagtagcacattcaaaactggaagcaatttttgtaacaactaatatctccaagtcccatgtggcagagacggtgcaaaggtcttactagagcagaggtacaaagttttgatccatttgatcaaaattgatcttcaattctccttcaatcccatctctcttcttcacctcccccacgctcgtatttattctaaattctttaacctttactgatcctcactactccctttcttctgcctctggagtgaaactatgcctggacaccactcagatttacaggggtgggactgcagataaagctgaactgcttgagattctttatccttaatgagcctctaaaggaagaaaaaatcatgctttggacagacaaattgcccgagcaggaacaaaaggtaaaaccaaaaggggacacgcgttttaatgacttagggagaggacttgcaagctgcttagactgggacgaattaagactaaatgcagtggggtgggaactagcggggaagcggtcatgccccccagtcttcccagggaggaaatgccaaagcgacgtgcttcagagaaagctttgcggtttctttcatacgtatatgaaagggccctttcttaaagggtagggaaattgcgtctgaagtctgcgggtcccgtcttcccattgtgagggatccccactctgggaggtcgcagggcccatttctggagaaagacgggccgcctctctgttgtgtgggagagactgtttcccggcgcctgggccttcctgtggggtctgcgaggtcccctcccccgggaggtgggaccccggggcagcgcctcgccccgcaaagtccgttctgcctcacggcgcaggactggcgggggaagcgtatagcagctcagcaccccctcgcgccgcgtcacccctcggcgtctggaggaccctggcccagcagcggaccgggccggccgcccgccacgagcgtgcgtaacgtgcccccgcagcgtgacgcacgggccgtgccggggcggatgcgcgggatgcgggccgggaggagcgcgcagggggaggagtgcgggcggaagtcggcgtctgctgaaaggagaaaggaaagggagacgctgctgggtgcggcgaggtgaggctgggaaccggcgggagggcgcctcctcctcccccgccctctctgctgaggatggaagtgacgaaagcagccgaggaggtcacttcctgctggggtggatgaggaggagccggagacgccgcggaggagaccggaccgaagacggaccgtgccgggaagaggtgagtcccggcctcgcctcggccgccggggtgtctgggttggatccgggaccctggcggggacggcgtccctggaatcggggccggccgccaggccgcgtacccacccagctgggcctcacccagtgcg

SEQ ID NO: 2978 - DNA, 2300 bp, Homo sapien
atgtaagcagcaagtctctcctgttcttcattttctgttgaactgatttctcctctctccaactgtctttttacctctaagacacctgagtttcagtttaatctttgttttcacattcttcaaacacatttgagtttgtatattccactattccaagctgtttatagcactacacaaatgttgttctttctggagatctgaaaatattgctgagttttgagtaatgtcacaagggcattaaaaactgagaaaaacattcttccatttgaaatgtctttagcatgaaggaatatattttagcagaagcagctgatacataacgtttttcctccctcagttccagtatctcgtcccatcctcaccttcagggctcccagggcccaggctgtggtgggggacctgctggagcttcactgtgaggccctgagaggctcctccccaatcctgtactggttttatcatgaagatgtcaccctgggtaagatctcagccccctctggaggaggggcctccttcaacctctctctgactacagaacattctggaatctactcctgtgaggcagacaatggtctggaggcccagcgcagtgagatggtgacactgaaagttgcaggtgagtgggccctgcccaccagcagcacatctgagaactgactgtgcctgttctccctgcagctgaaaatggagccacagagctcctcagggctgtttgcttgtgtggcatcccagcacacttcctgcctgcagaacctccctgtgaaagtctcggatcctttgtggtatggttccaggaatctgatgtttcccagcagtcttcttgaagatgatcaaagcacctcactaaaaatgcaaataagacttttttagaacataaactatattctgaactgaaattattacatgaaaatgaaaccaaagaattctgagcatatgtttctctgccgtagaaaggattaagctgtttcttgtccggattcttctctcattgacttctaacaagcctctactcttgagtctctttcattactggggatgtaaatgttccttacatttccacattaaaaatcctatgttaacataagctatgtgtacagcccttcaggagacacactcagcgatctttaaagcaagggacacaggtgaccagggcagagagtggggagcaggatgacatggaatggaaatggacatccatcacccaaattcctctattctcgaagctgttctttgatctctttcaattaagtgtaataacccaaggaaagctgcttctagtgagctctgaatctttttggtgatgacctcctacaagccaaactttgaaacctctgtttagagagaactggtgtttagcaaaagtatgctaaggggtgttgagatgaatcttctagacttggatctgaagataactagctgtatgacattggccaagcacctcttcccatactgacctcaatttccacacccacaaagtgggaaaatcagactagatgaaaatcatgatcatcctttgtcctagaattctatgattttggtagacagggaatatggattatgcagacgtacaggttcctagaaggagatatgcaaaagtaaaagcaggttgtacctgcccctggaatatatcctggagaaacacgagaccatacaatggtatgcaatcaccattccagtcatgtaaagcaaaatatacactgatgctcttattccctttggcaaggtgcctgggtatcataaggaatagacagagtcacataagcaggttgatctgggcatgctaacccatgatccagcatctcacaaagtagccagtgcaaccatctcattgttatccaggaggtgatgacttcagatttgggttttcccattcagtcagctcgttcttcttcccccaccagcagcaccaacctcatccaattttcctgagatttgcaggggctctccccacacagtttacacacctatcccttagagccagcacacaggcatgtaccacggaccgagggctgctccatctttcctcacaatacagcaagccaacacatcatacctcctacattctatacttatgatttcatgattttctgctcatcctcactccctcatttctataattctctgtcgcaaatgcatgttatttctgctgctgttatcacagctaaagggtttcttgcccagcctgaatgaattgtgtctgaatcctgaaactaggacccaggtcatagagaccaggagctgccagaaaaggaaatattatttcttattatcatcataaccagtgtcatcatcatcaacac

SEQ ID NO: 2979 - DNA, 2300 bp, Homo sapien
catttaagaaacaacaacatcccaaacatccattaatgggaaaatgcttaaatgtattatagcatatctatacaatggaatactttgtcattgttaagaataatcaggtaagtggggcatggtggctctcgcctgtaatcccagcactttgggaggccgaggcgggcagatcacctgaggttgggagttcaagaccagcctgatggagaaaccctgtctctactgaaaatacaaaattagccgggtatggtcgtgcatgcctgtaatcccagctattcaggaggctgaggcaggagaatcgcttcaacccggatggcggaggttgtgctgagccaagatcgcgccattgcactccagcctgggcaacaagagtgaaactctgactcaaaataaaataaaataaaatcaggtaatatatttccaaaattatcaagttgtaaatgtaaaagttatactttattgtgtgtaaattatgctttaataaagatgagttttaaaagttagtgatgtagatttttaagtaataccacagaaagatgcccataatatatagctaaggggaaaaagcaggttgtagaccagtatgttattgtgatcccatgcacgtgtgtgattttaatgtatttatttatgtgtctatgagtgtacttatacatagaaaagatctagaaagtgtcaccaaatactcaacagaagtaatttctgaaaaaataaagaaaatggtaaaactttttatttttacttagataattctgtaaagtttgattttattaaatgaatagctgggtttttcatttttaaaaaaatttcagtagttttggggaccaggtggtgtttggttacatgagtaacttctttagtagtaatttccgagattttggtgcactcgttgccagagcagtgtacactgaacccagtgtgtagtactttatccatcaccccactctcactcttccactgaatccccagaatctattatattatgcttaggcctttgcgtcctcatagcttagctcccactgataagtgagaacatacaatgtttggttttccattcctgagttacttagaataatggtctccaactccatctaggttgctgtgaatgccattattttgttcctttttatggctgagtagtattccatagtgtacacacacacacacacacacatgcgtatgtatcacattttctttatccaccccttaattgatgggcatttgggctggttccatagttttgcaatcatgagttgtgctgctataaacacgtttgtgcaagtgtctttttcatataatgacttcttttcctctgggtagatacccagtagtgggattgctggatgaaatggtagttctacttttagttctttaaggaatctccatactgttttcatagtggttgtaatagtttacattcccaccagcagtgtaaaactgttccctttacaccacattcatgccaacatctattattttttgtttttttaattatgaccattcttgcaggagtaaggtggtatcgcattgtggttttgatttgaatttccttgatagtgatgagcacgtttacatgtttgctggcaatttgtgtatcttcttttgaaaatattctattcatgtcctttgcccactttttgatgtgattgttttttcctgatgatttgtttgagtactttgttgattctggatactggtcccatgtcagatgcatagtctgtgaatattttctcccactctgtgggttgtctgtttactctgctgattatttcttttgctgtgcagaagcttttaaatttaattcagacccatctatttattattgtttttgttgcatttgctttgggttcttggtcatgaactctgcctaagccaaccaatgtctagaagagttttttaaagtatattccagggtttatatggttttaggtctcagatttatgtctttgatccatcttgagttgatttttgtgtaaggtgagagatgaggatccagtttcattcttctacatgtggcttgtcaatgatgccagcaccatttgttgcatagggtgttctttcctcactttacatttttgtttcctttatcaaagatcagttggctgtaagtatttggctttatttctgtgttctctccttccattggtctacctgtctgtttttataccagtaccatgctgttctggtaactatagccttgtagtatcgttcaaagtcaggtaatgtgatgcctccagatttgttctttttgcttagtcttgctttggctatgtaggctcttttttttgttccatatgaat

SEQ ID NO: 2980 - DNA, 2300 bp, Homo sapien
gtcaagttaacctaaataaatgaggggatattgtatgtttatggattgggagactaaatcttttctaatttatacaaattaacttataaatccaatgcaatcccagttattaaaaatctactaggcttttggggagagaggggacaggaattgacaaggtgatttttaaatgtatagaaaaattcaaaaagccaaaaatagccataacaattttgaagaagaacagcattttatgacttaaactatcagttaataagagttattataaagccacaataattagaagagtgtggtattggcatgaggatagacaaaatagactaatggacaagaaaggagtttccaaaaatagacctacatggctttttgttttataacaaaggtgaaattgcactgtactgtggaaaaaatcaactttcaataaatagggcaggataaattatctgtatttaagttaaaagtgaatataaacactcaaactgtacacaaaaatcaattgcaatgctcttataaatataaaataaatggtaaaaaataaagtttctagaagataacctgggagagtatctttatgatcttggagtagactaactttcttagaagggatgcaaaaatctctaaccacaaaggagaagactgataaactggactatgtcaaagttagaatggttgttcatcaaaaggcactatcaatgagcaaagaagcaagccacagattgaaggaagacatttgcaatacatatatccaacaaaaggtttatattcagggtttaaaataactacaaaacaggaaaagaaagactgaaagttaagagaaaaatgaggaaatatttgaacagagattgcacataaaaaggatatctacatcaccaattagactatgaaaaaatgctcattctcaaattcaccagagacatacaaattaaaaccacattgagataattctagcagaacggccagattttactagatgacaataccaatatcagcaagaattttagaacaatgataactctcatacattggttggtgggtgtggtgggaattggcacaaccactttggaaaataatttggtaatacttcctaaactgaatatatgcataccttatgagccaggacttccactcccagatatatacccaacagaattatgtgcgcatatgccccaataaatgtatacaagaatgttcatagcagcactatttgttttagcaccaaaagtaggtaaagattctgtgttccctttgaagttctcctcttaatctctattcacccctgtaacccctgtatggttttcttgcctcagggtgcagtgggtcagatgtgacataatatacctaaggtgatgtgcatttgtagatataaaattaaatgcccccttaggaagaccaaggtatgggcccagagagaaagggtgagaaaatatttgaaagaaagaaactggcactcctcgtggcagctaatgtcttaggaacctctgttgaccagtataccaggatggaaacttgacttttagaaaatcataagagctatacattcacctggtaattttttaaaaaatcaaacggtacagaaatacataaaataaattgtgttcttcccacctattgctcctcaaacataatcaatatttttgtgtgtactttccaggaaaagaagaaagtatacttaaaagagttgatgtacacatatatcctattttttatatttacccaatgggataatactacaaaaccaatctatatctcacttttattctcttcacatcaaacaaggtggtcttcccttcttggcatgttcagatttaccttattctttaatgattgcttgtcaccatacggatgaatcagaatattcttaaacagtccccatatcatggttttttgttttgtttccagtgtttaggcaataatgaatgctacaataaacgttcttatagtactctcttcagatacttccttcagggtaatttcccaatagcaaaaatgtagggtcaagggtatttgattttttaaaaccttaacttttttttttctttgatcatcgggtaggaaactgtgattagcagctgaagacgggtactcccacttccttttttcaattcactaatgcattctgctctttttgagagcacagcttctcagatgtgctccttggagctggtgtgcagtgtcctgactgtaagatcaagtccaaacctgttttggaattgaggaaacttctcttttgatctcagcccttggtggtccaggtcttcatgctgctgtgggtgatattactggtcctgggtgagtaaaag

SEQ ID NO: 2981 - DNA, 2300 bp, Homo sapien
tagtcagtcaataaatattggagttctaaactcatgctaaatactattttccagtgttataaggaatacaaaaatgttggtaggatattatgtcaattataaagtgctttttagttcattatacttgttacttctagtattacagaatagttctcagcatagggactaagctgagagttctatgtcattaatgtattcatacaaacatcaataacaacatccacttcagctggacattatttttatctcctttttaccagtgtgaaagaggctaagtacttgaccagagtcacccaactagcaagaggtgaagtcaagatttcatccagatgtgtgggattctgcagatcaggttcttgactgccattttatacccttgctcctcctgggacaaatgaaggcagctgaaagatgacagcacggtcacacggcaaggagacaaaggacccatgtgccgccttgacagctctatgtctttatggttccttgtgtctatgtctactctggcccttaccacattgacttttttaaagtctttaagagagatgcactttattcacctttttattcttctaaggccatggacattgtctaaaatatagttgatgttcaatacaaaccctagttagaaaataaattattacagatatatagaaaaacattatattagaaaaatacagaccactcttaatccatcctatgtctattatctattcacagatatcttgatgtgatggtgatggtcacgataactgccttccatcttagtgcatgctcatctctcagtcctagaatgatattctttcagcttggatgttacttcctcagggaagcctcttatgcatccccagaactgggtcagatttccctcttagtggactctcagaaattacatacaattcacttctatgtaatttcctgttgacttgctgtcttctccaccagaatgaaagctttccaagtcttgattaacactgtacttccagcacctggcaccatacctgaagcaccatggtgtttctttttttttgccattaacattttatatatatatatatatatatatatatatatatatatatatatacacatacatatacacaagataatagcataaaaaagttttaaagagttatacataccaaaatattatacgtaccaaaaaacgtcactacggatttttccatttttttcttaattttttttttaagttctgggatacatgagcagagtgtgcaggtttgttatgggtagggagagcattaggtgtttctcaaaacaccaaacagcatgttgcccagtgtgaaagaatccaaatggcaaaaatcaaaatttaatagaattatttaaatacccactctgacttcctgacgtgaatcgcttctcaaggctaaagccatcatattttcagaactctctagcctcttgtctttcaaggaaatcacaacttcttctctctgccaccagataccaggcatatgtatttcaatcaatatatatttgccaagacattcctgtagcaaattttggattctaggacattaagtaaaaatgttatggcctattatctaggaagagcatgatggggctataatttactcctcagcttgccttctactcagatcaaaagttgtggtttccccctggactgatgagtcaggatattttcatatatatcagacaaggtgagagttgtcttgtgattgagatgtttcatcaggtctacagacggcctgctggaggtgttccagtagaggtatcagcggtcagaggaggccttttctgtgttgaatgagaaattcttcatctctggggatattcagggacatccttagattatgtggatttcaataggcctgcaatctcacctcatctctagtagcagagagaataggttgtgatttccttgaaagacagagcctagagagttctgaaactagagtagctttagccttgagaagtgattcaccccaggatgtcacagcagtacttaattctattaaattttgatttttgtggtctggattctctcacactggtccacattgctgtttggtgttttcagaaagattcctctacttccccctttcacttcattatctcaatcagctttatgcagagaagaagcttactgagctcactgctggtgctggtgtaggcaagtgctgctttggcaatctgggctgacctggcttgtctcctcagaactccttctccaatcctggagcaggcttccatgctgctgtgggcgtccttgctggcctttggtaagtgatggggaggagacctttgcttgctgc

SEQ ID NO: 2982 - DNA, 2300 bp, Homo sapien
gagacttgtttatgtttttttttaaatttcaatggatttcctagtagcatttttacgttcttacaaaataaaaaagtagatataagtgaatgtcactttcacttatatttgtgaacgatattcactgtctctacttaaacacaatacatgttattggctatctatgttaatttatctacttccttaaatgtgttccagcagagacttgaccactaatgtcttaatggcattacctttcatagggctacagtgcattcatttccttcttcctcattcttccactcatttgggaaattattattgaatgctggcaatgttcaattcacaatattaactgcagaaggaaatgaaattggaaaaaaatccactttacttgaagagctcgcatggcatcttgcaggaaaggtagattattgtaatatgaggtgtaaaactgaaagggaccttttaaaaaagacaaggtttaagttctgtaagaatgcagaggtctttgtgtatcagtgtttaatcatttacatcttcaaaaataacatttaaaattagtcaaatatgagtttttgcctttcaaagaggccctgaggctgctggccctctggccttgccttggctgtcctgttttgtaatgcttccctgggcttcaccttgtgccataagtcttctgatactttattaataaatggtgctgggaaaactggctaaccatatgtagaaagctgaaactggatcccttccttacaccttatacaaaaattaattcaagatggattaaagacttaaatgttagacctaaaaccataaaaaccctagaagaaaacctaggcaataccattcaggacataggcatgggcaaggacttcgtgtctaaaacaccaaaagcaatggcaacaaaagccaaaattgacaaatgggatctaattaaactaaagagcttctgcacagcaaaagaaattaccatcagagtgaacaggcaacccacaaaatgggagaaaattttcgcaacctactcatctgacaaacggctaatatccggaatctacgatgaactcaaacaaatttacaagaaaaaaacaaacaaccccatcaaaaagtgggcaaaggatatgaacagacacttctcaaaagaagacatttatgcagccaaaaaacacatgaaaaaatgctcatcatcactggccatcagagaaatgcaaatcaaaaccacaatgagataccatctcacaccagttagaatggcgatcattaaaaagtcaggaaacaacaggtgctggagaagatgtggagaaataggaacacttttacactgttggtgggactgtaaactagttcaaccattgtggaagtcagtgtggcgattcctcagggatctagaagtagaaataccatttgacccagccatcccattactgagtatatacccaaaggattataaatcatcctgctataaagacacatgcatacatatgtttattgtggcactattcacaatagcaaagacttggaaccaacccaaatgtccaacaacaatagactggattaagaaaatgtggcacatatacaccatggaatactatgcagctgtaaaaaatgatgagttcatgtcctttgtaggaacatggatgaaactggaaaccatcattctcagcaaactatcgcaagaacaaaaaaccaaacaccgcatgttctcactcataggtgggaattgaataatgagaacacatggacacaggaaggggaacatcacactctggggactgttttggggtggggggaggggagagggatagcattaggagatatacctaattctaaatgacgagttaatgggtgcaggacaccagcatggcacatatatacatatgtaacaaacctgcacattgtgcagatgtaccctaaaacttaaagtataataataataaaattaaaaaaaaagacccaagcagaagcagacacaatatttttacttgaatcatgctggactggaggacttccagaatattgatttccctgaaattctgtgtaacccacagatactttttaatccattctctccccctctgtcacagtcacagtcctagtgagtgtcaggagccttcctcgtccaggccttccaggatagaccctcaagagcccactcactctaaaccactagccccaatggagctggagccaatgtacagcaatggtgaggactccctagggggcagaaggctctagggaggagccagggagggaagagggattgagcgacagcccatggccctgtcacaaatttaaaaatgacattcctagcattacactgg

SEQ ID NO: 2983 - DNA, 2300 bp, Homo sapien
attcatgtaagatgtgacttgctcctccttgccttctgccatgattgtgaggcctccccagccatgtggaactgtaagtccaataaacctctttattttgtaaattgcccagtcttgttacgtctttatcagcagcatgaaaacgaactcatacatatcccaagtattgtatggaacataattatagtaaaaattatttgttttttatttgaaatacaaatttaaatgagacccttgcattttatctggcaatcctctactgagtgttaggcactgtgctaggtgctagaataatgtgaatatgacatagttcctgtcttcagagagagacgtagaaaaatgtaacatttttggctacagatgagcaattaaattcaaaatactcttttctgagcatatctttccaaccacaggaaacaatacttcagagtcatcaacaacatcgtcacctttgagcatgaagtatatttgaggtttattcatattttgaattagtctgaaatgacacactgaatctcgaagctatccatatcccactgaaccttccttttgttgatgagcatgctgtcctcagagaaataaaaaataagccctaaccgctcccttccctaaagatacttagatcattgaggaataccatcaaagggacaggatgtttcagttcactgtgatcggttctggagtgaaggaaatccaagtgttattgatgcacatgagaggaacacccagcccaaatgtgggaggtcagagaatacctctcagtagatgtggcaccatactctacaattacaagtttacaaagaccctgtagtgtggattaactgggtatagtttaaataaataatttaatttaatttaaataaattgatataaccaatatatcttctccagaatattggagaaatctctaaccaggaatgactaagcacacattgaaacacatccaatcctcttctattgtcatcctgttccttactgtttgttggtcgttcatttggcaagtccttattgacaaattggtatgtgacaagtgctctgttaggcattgaaacaaaatgaagaacaaaccaggcttgttcccaaaccttgtaatactatctaatgagaaaaataggcattatacaatcacataaacatatagagaatgataaaatttggtgacttccatgggagaaagaacataataatatttgttaaaaaagaggaccctctttccattacctgccaaggttgggcaccctgaggatgggacatttgatctgagatcatctcccatttctaatgtaaaggtatctgaatgatgacaactttatcctggtaggtagattcccaagaatggcttacctctaagtctaaaacacgccttcctaacagaagttatatcaccttcaaaggggcaagaattgactcttgggaagatgaaaaaaactaattttttaatgtatcaaacacagctatacatgcagcacataaacacatacatagtatatttgtggtattaaattttcatggaaaaagggggtggctaaaaacaaaattgtctaaaaaagatccttaggggagcaataacgaaaaaatggttgagaaacactggttcagagtttttattcaatagtccctcaaataatacttactaaaggaatgctttcaagaaagaacagttagaggtgcgggggatataaggggtaagaaaaggggcccttaaatgttagtgggaaagaagacacgaaagcaaacaaggaaatagagaaaataattgcaaattgttataaacactgtgaaaaaaacacaaaggacctgaaacaaaataatggggtggaacctctttgattgcaaagccctttctgagaagggctttggctttaaaaacggtggtacgcttgctgatttatctcctaatttgcagatctgggtgagattacgggaagtccttgatctgtacatttgtattattttcctgttcagaagcctcataacaacttatgtgaaagtcaaaaaggcatatgcttgacaccttgactgtgtgattcacaccacgctcattaagcttgcctacattaggagctgcatgcagaaccaaaggctgtgtgaagacaaggtagtgaaggggtttcccatatgaaaaatacagaaagaattatttgaatactagcaaatacacaacttgatatttctagagaacccaggcacagtcttggagacattactcctgagagactgcagctgatggaagatgagccccaacttctaaaaatgtatcactaccgggattgagatacaaacagcatttaggaaggtag

SEQ ID NO: 2984 - DNA, 2300 bp, Homo sapien
ataattgaatcctggggacagttttctccatactgttcttctggtagtgagtaaatctcacgagatctgatggtttgataaggggaaacccatttcgcttggctctcattctctctttgcctgctgccattcatgtaagatgtgacttgctcctccttgccttctgccatgattgtgaggcctccccagccatgtggaactgtaagtccaataaacctctttattttgtaaattgcccagtcttgttacgtctttatcagcagcatgaaaacgaactcatacatatcccaagtattgtatggaacataattatagtaaaaattatttgttttttatttgaaatacaaatttaaatgagacccttgcattttatctggcaatcctctactgagtgttaggcactgtgctaggtgctagaataatgtgaatatgacatagttcctgtcttcagagagagacgtagaaaaatgtaacatttttggctacagatgagcaattaaattcaaaatactcttttctgagcatatctttccaaccacaggaaacaatacttcagagtcatcaacaacatcgtcacctttgagcatgaagtatatttgaggtttattcatattttgaattagtctgaaatgacacactgaatctcgaagctatccatatcccactgaaccttccttttgttgatgagcatgctgtcctcagagaaataaaaaataagccctaaccgctcccttccctaaagatacttagatcattgaggaataccatcaaagggacaggatgtttcagttcactgtgatcggttctggagtgaaggaaatccaagtgttattgatgcacatgagaggaacacccagcccaaatgtgggaggtcagagaatacctctcagtagatgtggcaccatactctacaattacaagtttacaaagaccctgtagtgtggattaactgggtatagtttaaataaataatttaatttaatttaaataaattgatataaccaatatatcttctccagaatattggagaaatctctaaccaggaatgactaagcacacattgaaacacatccaatcctcttctattgtcatcctgttccttactgtttgttggtcgttcatttggcaagtccttattgacaaattggtatgtgacaagtgctctgttaggcattgaaacaaaatgaagaacaaaccaggcttgttcccaaaccttgtaatactatctaatgagaaaaataggcattatacaatcacataaacatatagagaatgataaaatttggtgacttccatgggagaaagaacataataatatttgttaaaaaagaggaccctctttccattacctgccaaggttgggcaccctgaggatgggacatttgatctgagatcatctcccatttctaatgtaaaggtatctgaatgatgacaactttatcctggtaggtagattcccaagaatggcttacctctaagtctaaaacacgccttcctaacagaagttatatcaccttcaaaggggcaagaattgactcttgggaagatgaaaaaaactaattttttaatgtatcaaacacagctatacatgcagcacataaacacatacatagtatatttgtggtattaaattttcatggaaaaagggggtggctaaaaacaaaattgtctaaaaaagatccttaggggagcaataacgaaaaaatggttgagaaacactggttcagagtttttattcaatagtccctcaaataatacttactaaaggaatgctttcaagaaagaacagttagaggtgcgggggatataaggggtaagaaaaggggcccttaaatgttagtgggaaagaagacacgaaagcaaacaaggaaatagagaaaataattgcaaattgttataaacactgtgaaaaaaacacaaaggacctgaaacaaaataatggggtggaacctctttgattgcaaagccctttctgagaagggctttggctttaaaaacggtggtacgcttgctgatttatctcctaatttgcagatctgggtgagattacgggaagtccttgatctgtacatttgtattattttcctgttcagaagcctcataacaacttatgtgaaagtcaaaaaggcatatgcttgacaccttgactgtgtgattcacaccacgctcattaagcttgcctacattaggagctgcatgcagaaccaaaggctgtgtgaagacaaggtagtgaaggggtttcccatatgaaaaatacagaaagaattatttgaatactagcaaatacacaacttgatatt

SEQ ID NO: 2985 - DNA, 2300 bp, Homo sapien
ttcagagaaaaccaggtcctggggtcaggctggagcagctctccggagctccagatttctgccgtgtggagtgaagacacagggtcttactggtgcaaggcagaaacggtgactcacaggatcagaaaacagagcctccaatcccagattcacgtgcagagcaagtatcagtgaggctgagcctggagaaaaaaagataggagtgttatagcttcagcttggactactagtctgtttctttgttcaactcctgtccttgaggaaagtgaaaattaagctagaaaaaccctccaggttgcggccgggcgcggtggctcacgcctgtaatcccagcactttgggaggctgagacgggcagatcatgaggtcaggagatagagaccatcctggctaacacggtgaaaccccgtctctactaaaaatacaaaaaattagctgggcttggtggggggcgcctgtagtcccagctactagggaggctgaggcaggagaaaggcgtgaacctgggaggtggagcttgcagtgagccgagatcacgccactgcactccagcctgggcgacagggcgagactccgtctcaaaaaaacaacaaaacataacaaaaacccctccagattgctcctggcttcctacttcataagaatcagaaatgcactaagccccttataatctttctttttttgttgttagttaagtaatattcattgatcaagactccattgatcactgactgtatgccttggcatttagtagtgggtgggacacttcaaaaggcaaaccacctgctgtctaatggctctccaaatgtctccacatgatgagattgcaacacaaattgacttattagaaggcaatgtagcatcaggaaaagtagatgtgaatgaacagagtggtcagaggagaagttgtatttggttgaaccttgaaattaaaaatgatagaggaattattattgggaccgttgttaggaataatgacttttccactgcaagactgaagatatcagtgcccctctatattctgtgcaaaaggtgtctttgactcatccaaaaaattgaacagtttcctgtctcatggagatctatcacaaagtctttaaatattactacccatgaaattggccagggttaggacattcaaatgtctttatccacattcctgaaggataattgttatagattccctacctccataggaatgcttataatggattatctatacaatctccacattcccacattttgcattagagaatggaatcagtcaaaccctgttcccagagtttcccttagagttctcacctgttgtcttatatccatctaggaatccccatctctaatgtaagcttggagatccgggcccccgggggacaggtgactgaaggacaaaaactgatcctgctctgctcagtggctgggggtacaggaaatgtcacattctcctggtacagagaggccacaggaaccagtatgggaaagaaaacccagcgttccctgtcagcagagctggagatcccagctgtgaaagagagtgatgccggcaaatattactgtagagctgacaacggccatgtgcctatccagagcaaggtggtgaatatccctgtgagaagtgagtgacactctcattcatatcttccagaaattcccagaccaaggtcatgatacacatgtgtcctgaggaaatttcaggaggccccagggattagtgctgtggagaaccaaaagcaatttgaaaatgggttacgcttgcaggttagactgctgacctgtttctttttgtggaaggaaatataaagagggctgtaatcgattatgaagcataagcattcttgcaatcctacgataggatgataaaacatctattacatgaaacctttgggctctgggccagggagtgtcatggatctaaaaggttcatagtggtaacagcctgcttcattttatgtcatctccttcaaagtgattagagtgtttctagcttgccgaaactgcacccaaagggagacatttggagccatgttattggtgatttactggtgtggaaaattacctggtgttgtagccaagtagccatttccattctaacccagtcctatagtcctgaactgggctgaataaacatacctaaatatatgtttagaaatgctcctatgtatcagttttcccaggaacaactataatattatagaaatcttaaaattatttcctaataaaaaattataggatacaaaagaaaaaaaagaaatatgaagagggctggatgggcacaggaaaacaatcagatgagaacaacagat

SEQ ID NO: 2986 - DNA, 2300 bp, Homo sapien
ttcaacactttaagatgagagaggccataaaacctagtttcttataatgaatctttaaaaagtacgtaaatagcatatgtttattgtaagaatactagaatacacagataagcaaaataaggaaaataaaaatcagctttaattagattttttggatataattacagtaactctgtggtgcgaattgtctcagacactttttattggagagcaggggataatgtgcagcagataaagtgcactctgcagccacttttttcttttcttttcttttcttttttttttttgagacggagtcttgctctgtcacccaagctggagtgcagtggcacgatctcggctcactgcaagctctgcctcccgggtttgtaccattctcctgcctcagcctcccaaacagctgggactacaggcacctgccaccacgcccggctaattttttgtatttttagttgagatggggtttcaccgtgttagccaggatggtcttgatctcctgacctcgtgatccgcccgcctcagcctcccaaagtgctgagattacaggcgtgagccaccgcacccagcccacttttttcttaatcatatatcctagacatcttatcttgctattaaatattattccacagaattattttaatggctgtttggttttccacagcatttgacacataacttatttttaacacacatctctccttgtgatatatttttagtattttctttttacattattataagcaaggctttaatgaccatcacatataaatattagcctttctcaaagtaaaactatgataatagtgagaataaaatgttaagtatccaattgttaaaaattcaatgttaagtattcaggtaaatgttaagtacctgaacaggtaacattgagtctatgaatattttcagtcagtccctcatttataagcacctgtgattttttggtttagagtttcatcctgcataaggttcactgatgagacaacatctactgggactacatctaatcaaagtgagcatgataataggtgttcacataacacgcgctttgctttgtgtgagataactgtattaggatcagcctggggtacaaaaagcaatgcagattagaaataggcaatgttgtgattacagattagaaagatggcaatgttttcagcaatatagtgcaagtgttttgaagtttagtaaaatctcattctagaaagtcatcgaatgactacgaaaaattttacttaagaaatatgagctattgaaacaatggccttattattttatgaaccttgagaagcaatatatcaagataatagggcacaatgtttaagagccagactgtgacactgggctgcctgggtttgaatcccagatctgttactactagaaattgattaagctgatcttggtcattttactggctgctatcatctgaatgtttgtgtcctggcaaaattcttatgttgatacttaatcctcaatgcaatagtaataaaaggtacccaccttttattacatgaccttttaggggtcatgagtgtggaactcttatgaaaaggattagtctccttgtaaaagaggcttgagggagcttgtttgctccttccatcatgtgaagacacatagaggacaccatctatgagaaacaggccctcatcagacactgaatctactggtgccttgatcttaaacttcccagcctcttgaactatgagtgataaatttatgttgtttataaatttctcagtctaaggtattctttatagcagccccaatggactaagacacttacctttactagtgcctcaatttccttattcatgtgaaaggggatagtgccaattcagaaacttgctgaaggtaataaataactctgtaagcatgaggcacttagaactgtgtctgactcattgcaacccatatgtaaatgctaggtatcataatgagggtcaagttacaaaatttctctggcattgagaggatcagctataattgttttagcccttccaggacaaagataatggttaaacatagtggcactattctacttccttttttgctaattatacaaaacctattctgaaaaccacatttcatcgcctgctcagagtctccagttggtgaccaagagtacatctcttttcaaatagctggattaggtcctcatgctgctgtggtcattgctggtcatctttggtgagttcaataatttgactgagaagtgaggtggcagctgaatgaggtctactgctcccaaaaggttggaggttttattggagcccagggactggtggggatgctcaggt

SEQ ID NO: 2987 - DNA, 2300 bp, Homo sapien
atgttcaagttcttaaaacagtctggggataggctcatggcttttcatttcatcgtagtatttcataatttatattcatgttacttttttgtatgcatgcatgaactatcacattataaaaataaaagtgtgagagagcttaacaaataaaatgttatagcctttatatctgtggaggaggaaacacattttaatctgaacatcttgtgaaggcactggagcaggacacacaggaagagatgtgatgagaatcaacctaagaccccaacaacagatgaatccataaagaaaatgtggtgtatatatacaacggaataccattcagccatacaaaatgaaatcctgtcatttgtgacaacatgatgaagctggaggacatcatgttaagtgaaccaagccagacacagaaagacaaataccacatgaacttacttatatgtggaatctgaaaaaaataagaagttgatattatggaagtatagcatagaatagcatctatcagagactgaggagggaatgaggagggaagagagggaaagattggtcaacaggtacaaggtgccaattcgataggaggaataaggtttggtgttttattgcacagtagggtaactatggttactagtaaggtattatatattacaaaatagctaggaaagaggcttttgaatgttctcaccacatagaaatgaaaactgcacgagacaatggatatgccaaccaccctgatttgatcatcactgtacaacatatatatgtattatattgcaatgtcaaactgtgccccataaatatgtacaattacaatgtgtcaattaaaacattaaaaaaaccaacagattaaaagaaaaagagagagatgaaacagcagagtgtatgcaaaaacagctttacaccctggatttaaagggctctacattctcattcaggagatttttttgcattggtcctgaaactttacactaaacaagcttatccccacacaggctttcctaagccaataaataaagctatggaatacctattcgttttcagcactttcgctgttagcctggttaccaacattgctcccttttccctctggttttgcgtatcactgaatagtttcttttctcagtcatactcattgagctggatacctggacttagacatcattgcctgacagcatctttcccctaataggttactttccacacattctagttattcttaatcctagacactcacggatttaagaaatgttgaaaattaagatagcttattctcctccaatccctaatctaggcttcacttgcctagaactggtatccctaatgtgctaaaggtagcaatgggagagattataggtgccctgattttgagggaaaagaggggcaattttacaaatgccagagttagtactaatggtgaacccttctcaagtgccctgaagctaatttgcatatacttcttttctgtatttcattttcaaatatcccccagattgtaatttgccgtgattttatttttcagtgatttcatgctcatttactggtacactgaaagtttgaatatcaaagcgtatatctgtatgaataggttgaccctgtacataagtcatcatatgcagcaagggtcagacactacacataaccggggtgacagccccatcagtccctgatttaatgacatgtttgcataatatgactatactagagaaagtttgcatagtgggactatattgctgagcaagaagaatgtgccaattagaaacaatccaggagacatccctatcaaaggtgaaaagtattgtagatgtatcaaagatgaatttcagcaggaccataacctgatgagactcatcaaagtaggaaactgcctttagaaaacttcctttgaaatacctgaattcttgaaaaagtccctcaaatattgatgtgtactatctgcagcttgtggaactgaatcaaactatatttaaaaaggagcatctttaattttctcagacttcatagaaaaggaaatggagactggtcactagagggttcttcttccttctacttctgctgaagggtaacttccgatatcaacttcctcaaacctctgatgagctgctgctgctcgactctgaggtgcattctttttttgatgagaggcatctctaggtaccatccctgacctggtcctcatgctgccgaggctgttgctgttgatctgtggtgagttgggcaactcagagcagggcatgggatgcaatcatgcttgggctctgcttcctgaagggctgtaaggacttcttaggactaaggttctgtcaggt

SEQ ID NO: 2988 - DNA, 2300 bp, Homo sapien
taatgacccattactggtcttcatcccaattcctgctcagtgctgcagccaaaatacacaccttaaatgtgtaacacccttcggtggcttcttgtgtcctgtgggatagtgtccttcctggctaaaaagcttccttttcctttcttcatgttctcacgcctgttcataaaatactatattgggaggaaaagttttctttttcttttctcttcttctttcactcaattttccacatggaatggggaaaatatatttctgaatcatgaagcctgtgtttgctaatgggtttgtctgccctcaagccacacaaagtcttttcttttccaagggtaaactctgttgtgcacatctagctcctgaagaatggaggtaaatgcataaagccttagatcccagtggcagtctaatgtagttcatcaacagtaaagatgatattttgaaccttttctgaattctgtacctattactgtgtcacttcagaatctagagagggaaggatgtgaatagttagcatttacaaactcattcatgatataccctccattatctggctcttgttgctacttgcatatcatctagtgtctttacctttcaacatcaagaagccctggcccctgatcactaagcaggctgtaatccagtcattccaaactacctgtggttccttgaataagtaatgctgtttcacttgtctgcatatgcatagcaaaatcttttcctattctgattctccacttaactcatcctaaacccctgctcaagtatcatcattgctgtgaagtcttctctgattagctccaaacatagtaaccatttcctccaaggtttcatttctttttcttattttagagatgtgatctcactctgtcactcaggctgaggttcagtggcctgatcatagttcactgcagcctcaaactcctgggctcaagctatcctcccagttcggcctcccaaagtgctgggattacagatatgagccacctcgcctggcctccaaagtttgttatacttttctctcttaacagtggtttccacatgttattgcaattactagaccatatatttttacagtgcaaaactatcccttgttccttcatgtactgcctccacccatcacattgcctggcattcatgagtgctaaaaacttttcattgaatacaatactaagtaaatgaagaaatgtgggattaaaaatgaatgcctacaatgaaccaagctttctgctgagttacctgaatattacaaagaagcaaaaattattactgtagaggaacaattaccctgcttggaatgcagagattatgtcagcatacaaaattgattgcttgatcaatctggagtagaatagctcatgaagcatagctatacttaataatatagcaaagcagaggggcctgagagggtcttactgcttaatctctgtccatcatgtcttagacctacagacaacttgagttcaatgattatgatgcccctcacctcagggatctgtttccatccagcttccaaagatgggcatacaccagcacaagcatagaaaaataacaaatctgtatattggaccctctgcttagcagtgagaaagcaggtttgaagacaataaagccaggcctgtatgtggagattggcaccatgaccctggattatgttttatgggatatgcctccaagggcaactctgcatttatcccatggcctctggcttccaaattttctaggcacttccctctggggtaaaggaatcaaaattggcttatttcccttgcaaaccatccttggcgactaagtactgccttgtcttctactgagagatggccatatttttggcacctgcctttccttgtgggaggtgtttcctctgtttacatagcaaaggggctgtaggagagacagacggagctggacttacagcagaaccaagtcatgatagcctgtttctattttgttttcagcatttttccgccagttctggccacctcctttcctctggaacatgctgatttcagcaagtccagctctgtcagctctgccccccgagtctattggtttctgatcatctgataatgctttgcctgcactcaggacctgtctttgtccctcctcttaacatacttgcagctaaaactaaatattgctgcttggggacctccttctagccttaaatttcagctcatcaccttcacctgccttggtcatggctctgctattctccttgatccttggtgagtatctctgcacctgttggtttaggcttcagagttttctggcactttgattaggagaactttctccccgcc

SEQ ID NO: 2989 - DNA, 2300 bp, Homo sapien
cttctccccacttccttatggatcccattttgaggactgtggatgtagatctggtgagaggatggcctctcttctgagacaggaccctgggagctacccctcctccatggtctcatggctagagggataggctgggaagacaatctaaacaactttcatgccctttttctgtattccattcttcccccatgtatgacactgtctttcattacactgaagttaatgattgaaggttcaggccttggggttaggctttttagcagaatgacaaacatttttccaaaggcttaaatgccaggtctgaacccaagctgttattctcagttctggaataacccctttgatactcataaatatctggagaggagaagatttaaggaatgtttacagctgtacatgacactgttcagagcagtttaacatttagtcctagtagcaaccctatgatacagtactacaaatagcacctgtaaagtaggtagtattattatctccattttacagatgaggaaagagaaagcatcgagctgttaagtggcttgcccaaggtaactcaacacatagagctggaatatgaacctggtcactcaggctccagggtatgtgcttttaaccaccttgctacacttccaatctcaactgtgccagtgaagagtggtaccaataatagctaccatttactgaacctctccaaagtgaggggtacttgtatcgcatttcatctccatgagaactctgtaaggtagacatgattattcacattttatacttgagaaaactgagaaccagaaatagcaattgatttagcaagattgagatccagagatagtaactgagtccatccccctaacccatgctcttcctaccactcctgctgcccatgtacatctggagatcaggagatgatgagatttctgtgggctgcggtcattccagagggcaaaagaatgtggaggaagtgcagggtaggattgttatggagcatcaaacagcaaggtggtcctgtgtaatgttcctcagcgtgctctctcgctattaaaaacactcaggcaagtgaggtggaccctctacccaaacatttagttccaccaaccccacttgccttaatgcccagcaggtgatactggcttccatccagccctgccctccttcacagctggcccctccctgtggtctcatttttacatagggatccctgtgtctggggtgctcctggagacccagccctcagggggccaggcggttgaaggggagacgctggtccttgtctgctccgtggctgaaggcacaggggaaaccacgttctcctggcaccgaaaggacacgcaggagagtctggggaggaaaactcagccttccccaagagcagagtcggagccccctgccatcaggtagagccatgcaggaggatactactgtacagcagacaacagctacggccccgttcagagcacgctgctgaatgtcactgtgagaggtgagcggcatggtctgaatctgctagccggcggctccctgctggggtcagtttccttctgtagcagcgaggatgctccaaggtgacgacaagaaacagggcgtgaggagggtaagaggccctatgggcactgtagtcttgtgatgggggaggtggtggcagcggcagcggtggcagagagctagaggagggtgagaaggtggacgcggggccatgtatcccgagctcttcaccagagcccagcacagctctgccggaagcacccctgcagggttagaccagcaggtgcgaggtgcgacgtgggaaagagtccagggccggcggggtgctatgaggcgaggacttcctgagccgaggaccgggtgggttgtgagttgcgaccagcctcgctgacggaccctactacctctttcagttccagtgtcgcgtcttctcctcagcttcattgctcctggcgccctggccttcattggccatgtggtggagcttcactgcgaagacaggagagcgtctgcacccattctgttttggtgttaccatgaaaatgtgactctggggaaagcctcagcaccttctggaggaggagcgtccttcaacctctccgtcgccgcagagcattctgggaactactcctgtgaggccgacaatggctggggatcccagcgcagtgaggtggtggcactcacggtcacaggtgggacatggcaaacagctccttccagagagcttgttgcaattataccaagcaatggctggtgcttcctttccttcggaaatttctgctcctcgaggaatcagagttcctctagaaagcgccttaatg

SEQ ID NO: 2990 - DNA, 2300 bp, Homo sapien
gcctgtaatcccagctactcaagaggctgaggcaggagaatcgcttgaacccaggagatggaggttgcagtgagccaagatcatgccactacactccagcctgggtgacagagtgcaactccttcaaaaaaaaaaaagaaagaaaagaaaagaaaagaaaacacacacacaccaaaaataatactttcctaagtcagggtcaccctcgccttcccctccatacaccatcatgtggagtggaaaggagaaaaggctgtctcgctgacatgtccggagctccctacctcagggtttttgcctttgctgctaccatcttcctgctgcattcttccctcagacgcctgagcagctaaaccctcagttccttcaggtctgtgcccaaatgtggctgtagcagaacagctttctttgattacctgtaagaacagtaattcctccctctctccctctccctaatcttttatcctgctttatttgtcccccatagcatttaccataacctagtatatttcatatttttttctactgcctctgactttcctccagaatggaacattaaagggaaagactttgtccttttttttttattattattgtctccccaaagcctagaatggtgactggaaaatagcagtctggagctgaaaaaatatctgtggaatgtatgattaatgaatgaacaaatgaaaagccttatgtgtctgtgtgttggtgtctttctgtgtacgtttgggattgcagtcctatttctctggccaaagtatggctctattcttaagctgtgcttgcctgtgttttggaatatatgaagaattctctgggtctgtgcatatggggcttctgcatatgagcttgggtgttttcctgcctttctctgtcttctaattgtgtgtggatgcgtctggaccacaggctggtgttagtatctgcggaggaaagaggagctgtggccgctacacatcaacagagggcaccagagagccacgcacctactttcaggggcagaaattgagaaaacttggcggggagtgttagagacccaggagatctgggatctgggaggaaagaagtggagacctctttggaccaacacattactgtaaaattgtgcaattccagcaacttctctgtccattccctagggtccagacctctggctacccgagcaatcctgtgagcagaagtatctggtcaggggtgagaagaggagctggttgccaaactgggcccttaagaaagtggagatccctcctgaatgctctcatgattctcaggaattcccttccttcctagttcctccatgtccctaccccaaaagatctcaaactccagcgtgcttagagatctgactggtggctgtcttctcctctggcttgcattcagggaggtgaggccaggtcttggcccttcaaagccatccagttggctaccttctccttcgggatgggtggaaggctaagatgaacaaaggaagggtcaactgtgcctcttccaggccgctgagtcctccaacgcctagctgtgctcaaccttgactgggtgaagccaaggcagggcctcaaggcaggtccaagaggcagctcccattctccagttctgggttttataggtggggagaggcatgtatgcccctcccttatccaagcattcattagtcaattgagaattcttaatttggggaatctaggggctagactttgggtgtggaatttaaaaagaaaggtctttatgtttatttaactccctgccccccaccccactcctagacacacacacggaaacacacacacacacacacacacacacacactccccatcacatcctctgagctagaggctgatgtccctcagcccatgttcctcctccactgcttagttccatagcccgcgaccaagattgcgtctataaataggagggggtggggtggccaggggtcccgtcgtgcctgccccagaacccacgacggtcacatttttcacccccttttgcctttgccctcaattcctttccctctttgctctccttccatctcagttccagcgaggggggtatgtgtgtgcgcgcgttgtgggggggcagggggagggctcgtggagggaggcgccgtcggagggagagtagacgtcaggcggagggagggaggcaggcaggcagggaggcagggagggagagagggaaggaagagaaggggagagaaagggggagcaaagaccgaaagagacccagagagatacagcttgagaggagaaataattaaagggggagggcgaccaggaggagaaaaaggtctgggaggaaa

SEQ ID NO: 2991 - DNA, 2300 bp, Homo sapien
gtgagctccagccagctcccccagctcctcctgggcctagcccagctcacctctcctttcccacaggggtttcaccacagactcaggagcacacagacatgagaggggtcttagaggtcatctggttcaaccctctcattctacagttgggaaaattgaaacccagagaagagaaatgaattcctaggtttactgtgtcattcagtagctgaacagagactaatagtaataataagttgccatggattaagcacctactgtgtgccagacaccgtgcatgctaaacactttatggacagtctctcttaatcttcataggagtcccataaaggaggcattatttccaactcacaaaggaggaaacttgcgctcagagaggttgagtgacttgtccaaggtcacacagctggcacagagcgggggtttgtacctgggtctgactgtgctttctctccactgatcacttctacctctttccttcagcgtctggttgtcagattattccagtcatcacaacaaagaggctggggaagcagagatccttgtatacattttatagatgaggaagccatgaaagatatcaagtgacttgcccaggattacatagcaaagcggacagtacagctggaattcaaagccagatttcctggttggggttaccctgccagttgtgggtaaacatatgtgtattcagccctttgctggtgctgcaggagcacttctcagtgtggagacagagatgttcccatgctcctcagcaagcaatcccaggaatacctggcttctggcttcagttctgcccttaacacactgtgtgaccttggataattcgcttcacttttttctggccttagtttctcatttgacaaatgataattcagcctcagtggtacttaaccttttcacaaccaaaaactgtgatttttcttcatcagggctacatgtttttagatattttggcaaccaaacaagttggtttgttaatatccatttgtcatctacccccatttttcatattcattaaagacaatggagcttcaaagcagcacaagggagccagtgttattgcactggccctcaactgggcctgtccagcaaagctgcatgcatggtggtcaaacaacggggtcttactttgattaataatatggcttccctcaggcagtttgcaatatagaaaacagatcaagggttcctgtgaccatatttagggacccctggctgtcactgagcaagtgtaagacttcgagcctgtgagtcccttccctgccctcaaggagtttacagtttagcagaagaaacccaaccctgaaacacgcacacatggtgcctacaagcaaggttggatgtgtctagagctgtgagcaggacacactgactataagggcataaattcagtctgggagagagttctgagggctgggctggctgaagaaggctttccagaagagaagggatttgcgctggactcacaaagagtgaactctaatataaactgtggccttaataataatatattagtttcggtccatcagttgtaacagacttatcactctaatgcaaggtgttaaggtgttagtaatgggggaaagtgtaaggtcggggaggagggtatatggaaactccctgtactttctgctcaatttttctgtaaacttaaaactgctccaaaagatagtctgtgatgtgggcatgatggcacactcctgtagtcgctgctactcagaaggctcaggcaggaggattgcttgagtccaagctttggaggccagcctgggcaacatagcaagaccctaaaaatatataacttttaattaaaagataattagtagtctattgattaaacacacacacacacacacacacacacaagggaagaggttgtgggagtgaaggggattgagctttaagttaaagtacccctccagcccaagcccatctctgagtgaggtcaacttaagagcagaggagggggcttttagcttaaccatatctcccacccttgtcatgttccaggaattgctgaaggatgggaagagggagaccaccgtgagccaactgcttattaaccccacggacctggacatagggcgtgtcttcacttgccgaagcatgaacgaagccatccctagtggcaaggagacttccatcgagctggatgtgcaccgtgagtgggctggggggagcagtctggagcaggggggtggaagaaggggtgtgtttgagaagcacactcttagtttgagaaacacaaactaagagtccccctatggtccccaggacaaacgcttgccttcttc

SEQ ID NO: 2992 - DNA, 2300 bp, Homo sapien
cagtttgcaatatagaaaacagatcaagggttcctgtgaccatatttagggacccctggctgtcactgagcaagtgtaagacttcgagcctgtgagtcccttccctgccctcaaggagtttacagtttagcagaagaaacccaaccctgaaacacgcacacatggtgcctacaagcaaggttggatgtgtctagagctgtgagcaggacacactgactataagggcataaattcagtctgggagagagttctgagggctgggctggctgaagaaggctttccagaagagaagggatttgcgctggactcacaaagagtgaactctaatataaactgtggccttaataataatatattagtttcggtccatcagttgtaacagacttatcactctaatgcaaggtgttaaggtgttagtaatgggggaaagtgtaaggtcggggaggagggtatatggaaactccctgtactttctgctcaatttttctgtaaacttaaaactgctccaaaagatagtctgtgatgtgggcatgatggcacactcctgtagtcgctgctactcagaaggctcaggcaggaggattgcttgagtccaagctttggaggccagcctgggcaacatagcaagaccctaaaaatatataacttttaattaaaagataattagtagtctattgattaaacacacacacacacacacacacacacaagggaagaggttgtgggagtgaaggggattgagctttaagttaaagtacccctccagcccaagcccatctctgagtgaggtcaacttaagagcagaggagggggcttttagcttaaccatatctcccacccttgtcatgttccaggaattgctgaaggatgggaagagggagaccaccgtgagccaactgcttattaaccccacggacctggacatagggcgtgtcttcacttgccgaagcatgaacgaagccatccctagtggcaaggagacttccatcgagctggatgtgcaccgtgagtgggctggggggagcagtctggagcaggggggtggaagaaggggtgtgtttgagaagcacactcttagtttgagaaacacaaactaagagtccccctatggtccccaggacaaacgcttgccttcttcacatctttcattccctggattgaaccatggggactaagggctggtagagcattggctgtggagtcaggcagtccccaggtctaaaccagcctgttattagtcaatggtttacactctctgggcctcggtttccagttctgtatactgtatattgcaaaagataaaatactggcctacagtcccttattcaaactaaaagtggttcgatggtgcagcctgaaccaaggctcttcatagtcttttatttaatttagtcttaagtttcactgcagatgtattcatatgtgtgactatgggatgtggcccagatgctgctggggatcttacacagtaaacgctctatgcacaaccattgcctttctaaatgtgaaaaattctaaattctgaaatgcatctagtcctaagggtttcaaataagggattgtggacctggacctgcttcctggggttgtgagcattaaatgagatatagcagaagagcatctagcatggagtattcttacctggtaggtgtgtaataaattgtctctccccagggaaccatgggggtgtgggcagcaactggggatgcccacaccccatcctttttagtgagccaagcaagctcacactgacgcctagtggccacagtgggtcattagtccattgagttatttgtccctttggtgccttcattggtggtcaccctagcaggccccctagaggctccatgtgcaaaaggtgaggaagacagtgtgttaactggagccgatacactgcaacctcaaattcctagatccccgccagagtggtcaggtctgaatgtacgtgttagggagggaaaaagaaactcaagggacagaaaagaccctgactccctgtgctctactttgcagaccctcctacagtgaccctgtccattgagccacagacggtgcaggagggtgagcgtgttgtctttacctgccaggccacagccaaccccgagatcttgggctacaggtgagggggtcagaggctgggagcgctctggggagtgataaggaagagttcggggttagaggctgtactggggaggccaggtgtcatggatgtagttgagagggtctgaggcctgatcccacctctgtgttgcctcctcccctaggtgggccaaagggggtttcttgattgaagacgccca

SEQ ID NO: 2993 - DNA, 2300 bp, Homo sapien
gctccaaaagatagtctgtgatgtgggcatgatggcacactcctgtagtcgctgctactcagaaggctcaggcaggaggattgcttgagtccaagctttggaggccagcctgggcaacatagcaagaccctaaaaatatataacttttaattaaaagataattagtagtctattgattaaacacacacacacacacacacacacacaagggaagaggttgtgggagtgaaggggattgagctttaagttaaagtacccctccagcccaagcccatctctgagtgaggtcaacttaagagcagaggagggggcttttagcttaaccatatctcccacccttgtcatgttccaggaattgctgaaggatgggaagagggagaccaccgtgagccaactgcttattaaccccacggacctggacatagggcgtgtcttcacttgccgaagcatgaacgaagccatccctagtggcaaggagacttccatcgagctggatgtgcaccgtgagtgggctggggggagcagtctggagcaggggggtggaagaaggggtgtgtttgagaagcacactcttagtttgagaaacacaaactaagagtccccctatggtccccaggacaaacgcttgccttcttcacatctttcattccctggattgaaccatggggactaagggctggtagagcattggctgtggagtcaggcagtccccaggtctaaaccagcctgttattagtcaatggtttacactctctgggcctcggtttccagttctgtatactgtatattgcaaaagataaaatactggcctacagtcccttattcaaactaaaagtggttcgatggtgcagcctgaaccaaggctcttcatagtcttttatttaatttagtcttaagtttcactgcagatgtattcatatgtgtgactatgggatgtggcccagatgctgctggggatcttacacagtaaacgctctatgcacaaccattgcctttctaaatgtgaaaaattctaaattctgaaatgcatctagtcctaagggtttcaaataagggattgtggacctggacctgcttcctggggttgtgagcattaaatgagatatagcagaagagcatctagcatggagtattcttacctggtaggtgtgtaataaattgtctctccccagggaaccatgggggtgtgggcagcaactggggatgcccacaccccatcctttttagtgagccaagcaagctcacactgacgcctagtggccacagtgggtcattagtccattgagttatttgtccctttggtgccttcattggtggtcaccctagcaggccccctagaggctccatgtgcaaaaggtgaggaagacagtgtgttaactggagccgatacactgcaacctcaaattcctagatccccgccagagtggtcaggtctgaatgtacgtgttagggagggaaaaagaaactcaagggacagaaaagaccctgactccctgtgctctactttgcagaccctcctacagtgaccctgtccattgagccacagacggtgcaggagggtgagcgtgttgtctttacctgccaggccacagccaaccccgagatcttgggctacaggtgagggggtcagaggctgggagcgctctggggagtgataaggaagagttcggggttagaggctgtactggggaggccaggtgtcatggatgtagttgagagggtctgaggcctgatcccacctctgtgttgcctcctcccctaggtgggccaaagggggtttcttgattgaagacgcccacgagagtcgctatgagacaaatgtggattattcctttttcacggagcctgtgtcttgtgaggttcacaacaaagtgggaagcaccaatgtcagcactttagtaaatgtccactgtgagtagctgggagggcagggacggggacagagagcaggggcccccaaagggccttggacagagtcggggactgctccatgaatggggaggtagcagggcaggaggaagattgattggagttaaccccatgagcttgagaccctaacgagtggcttctttctccctcacagttgctccccggattgtagttgaccccaaacccacaaccacagacattggctctgatgtgacccttacctgtgtctgggttgggaatccccccctcactctcacctggaccaaaaaggactcaaatatggtaagactcttactgcctgttcttttttttttttttttttttttttttgagacggagtctcgctctgtcgcccaggctggagtgcagtg

SEQ ID NO: 2994 - DNA, 2300 bp, Homo sapien
agctgggattgtccaaagacttcctttgccccacagtgtgtgaaagttggaagcccccagaggctttctggtccatctgcctcattgctgagatgaggaaacagccctggagaggggcagtgacatatacaaggtcacattacatgttagcaaccaaactagtgctcgaaccaaggtctctggcctcttcccaccacatcccagagcctctgctgagaggaccagaactcaagtctgcccttgacctcagaccccacccatgagcaggtggcctctgagcgtggggaggggttggtgaggggcgaaaagagcagggcttccgtctgctgacgtcccactcctgctgctccacagtcgtttaaggatgatgtggatctgaagcaggacctgcgctgcgacaccatcgacacccgggaggagtatgagatgaaggtgggaaagggggaaggggccagggcatgagggctggtgggccagtgggtttctgaggtcctgtagcggggaggtgaggtgaggacagacttggggaggagtggttgggagggtttttgaaggagcagaggaggtggaatgctagatggggacatagggagagctggaggaagaggcccagaaagccatggtgagacttgatccccacccaagagggaacactgcctccatcctcttctctcattgcccccaggaccccaccaatggctactacaacgtgcgtgcccatgaagaccgcccgtcttccagggcagtgctctatgctgactaccgtgcccctggccctgcccgcttcgacggccgcccctcatcccgtctctcccactccagcggctatgcccagctcaacacctatagccggggccctgcctctgactatggccctgagcccacaccccctggccctgctgccccagctggcactgacacaaccagccagctgtcctacgagaactatgagaagttcaactcccatcccttccctggggcagctgggtaccccacctaccgactgggctacccccaggccccaccctctggcctggagcggaccccatatgaggcgtatgaccccattggcaagtacgccacagccactcgattctcctacacctcccagcactcggactacggccagcgattccagcagcgcatgcagactcacgtgtaggggccagagcctggctggggcatctctgcggggcagaggagaaggctttcacagctgttccctgatattcaggggcattgctcattgctcccttctcggaccagccttcttcctcccaccatggcaggtggggagcaggtctcccagaaacaccccgtcccgaggatggtgctctgtgcatgccccagcctcctgggcctgcccttccctcttcttcgggaggatgtgtctcttctgacctgcactcttgcctgaccctagaatggggacagggaaagtgaaggttagggaaagcagaggggggcactttttagcattccctttctatcccacccctctgatctcccataagtggaaatgggggtacccagggatgggcaggctttggcctagggacatgaagtatgggagtgggtggctgtggcacagacaggtggaaaacgggatagcctggccagtccctctgttgtctgcattcgtgccctgggtgcctctctccttcctcagggtactgcagaagggagcgaacagggtactgttcgctcttgtctacagaacagccctggcactgcattcaaatccagtcttcattcagctgggatcaaaatgccagtcaccttggctacccactgtggacagctgtctgtcagcatgcagagggatccaggaatccccccggcagcacggcccgctttccttctcctccatgctgggccagccagataagtcagggtcctggtggagaaagaaaggctaggaccatgtcctcattgacccagatactgctgtgtgctgcacagcagtgaaccaacactagagggagccacacaagcctcctctccccagtctgccccacttcctggctttaactcttgagctggtttggggagtggtgaggtaggggtgggggtgctgtaggctctttttcaaagaaaacaaaaaacaatgaaaacctcatttgggaagaaaagctgtagggattcccccacccaaatacaagtcccagtggaaaggaaaggtagtacctattcttctccatggggttcctaacaccctccattactctttcagtctccaagcactttgaatccatttttaaacattcaggttgccagacctgtcacacagtggactctga

SEQ ID NO: 2995 - DNA, 2300 bp, Homo sapien
ctttgacgcaacatagtcctttgactacttggatcagaaatgtcccagcagtgatgacaaaaacaaggactgaacaaatgctagtcctttgtgtagggcttcatgagcaatatcgaatgggagaactcagctcatacaactatgtgattaatgaggcctagctggtgcatgccaatgcctacgtactatgaacaggtcactgaacaatgaaacgggaatggatgctgtgtgcacccgagggctacatctttctctgagggcagctggaggtgacccaaatatgggaggggcaatgtcatgcctgaaaagctgatggatgaggggattccatacattgggcctgctggagttgcccctagacagcactccttggggtgagatgaactgttgggccagcagcctaaacttgtacaccaggctacctagggacctgctaggaggaggagctgactctggaattatgtcctttatgagagctttggtaccatacataggagtcagagctgaaaaaaaaaaaaaatctgtccctgaccatgaaagatattgtttcttccactgaccctgcccctgcccccgcccctgccatagcagcccagcagatatccttcaacttattcaagaaagttgttttggacaacagaattcttctaggcttcctttcagaccagtcaggaggaatgtcattgccaacacttcctgctctagatagatagatagatagatagatagttattgtggagacacaggtaggggagatccgaatgcagccccaccttgctgcagacagtggggacaactgaagaatccttctttggcctctttaatgaattcttatctggatcactggaaccttgggtaggtcactgctcaggcaggtacagccaccctgcttgtggttataatactcctgggcctaataaaatgtactctggctcactcagtgatgttgcaccaagattgtgtcagtgaaggtgtcacatcggcctgacaaggcaaacctctacctccagatctggggaagtctgtggacgtacgaaatgcactagctttgctaagagggatatctgggttggtggggggtgaccgcaggacagtcctccagggggccttggactgacctaattctcaccccctttcttgcttgcagttctcaaaaaaactgtagaatatgctgaaaacgtaatacccaaaataggcctggcatggtggttcatgcctgtaaccctagcactttgggaggccgaggaaggcagatcacttgagatcaggagttcgagaccagcctggccaacatggtaaaaccctgtttctactaaaaatacaaaaattagccaggtatggtggcaggcacttgtaatcccagctattcgggaggctgaggcaggagaatagcttgaacccaggaggcggaggttgcagtgagctgagatcataccattgcactccagcttaggcaacagagcaagacaccttctcaaacaaacaaacccaaaataggcagtaactgcctgaaacagcccaagcctcgtttctgtccctcctagaaaaagtaacatctggagctagagagaagctgcctgggacagcccaggctttattcctctctcctctagaagcaggatacccttctcagctttgcccagtgaatcacatgacccctgagatatgtaactcaggaggaattgcctttcagggcctctcagctgtgttgtgtggggggcatgtacagtcaagactccaaccttcccagacagctgtcttgagccttgaggactgcctcacaatggatcctaggcttcttttgtcccttgctgcctgtctgtattatactaaagccacttcacattacttgttgcatgtgagcgtgtctccaacagacactggtagcacttcaggccaggatgcagtgggcggaagtgtgtggattcctattcctggcagttagcatagtgacgatctctgctgtcctgcccatggtgggattggtgattagtcctgcttcatagttatgtgaatgctcctgtttgtcctcagtttgaggtcataattgacaattccagggttccagatacataacattctgctacacagatgctgtttcctttgcccagcacacctgtcactcacctcaaccctttctctcttttccccatctttctgtggctagctcctcctcattctttaggtctcagtgtagatagcaccactatcaggaaggagtccagacactgccaggcctaaggtaggagactaatcttctgcttccaaagctccctgtgccttcctcatcacagcgcttc

SEQ ID NO: 2996 - DNA, 2300 bp, Homo sapien
ctagggccatcccgctgctggcgtactgtcatatactgcgcggagccagacctcggactgccatcgccgccacctgccccaccctctggccccgcgccccgccccaggctagtctcattggtctagttccctcagaaccgtcctcatcggccgccctccactttcacgggggcggggcccaaagtcgctggagttttgctcctgggactggacgtccgagaggtaagagagctatcacaaggttttctaatccttatgtttcttttagtggatctccaggttactgtggtttgtattatcaggctacttacaaaaatgaatacctctttaaatcaggccattttacagcaaactacggtccttgatcaccattatgctctgaataaagactatgagcaattgcacttgaatgctgttaaactttattgactgaactttgaattgtttgattttgatcaggttggcttgtggaaagtgctattaagaagagttctttagttcgttggtattatcctcctgatagctattataaaagtttccctgatgtgtcctctcaagaatcttaaattctcatatgcagctatcctttgtacattaaatggtctccttatggttaggataacaaaaacatgaagaaagcatataagattccaactaatttgacgttgtgaattgtgaattctgaactgaaaccaagtaagtcccttatgatcaggctccaaggttttggtcagcctctcaaaattgagaggctgaaaccctttgaccaaaattaacacatttgccccttccctccagctcctggaaaccactaccctaactctgtttccataaaatagtaaactattttagagtccacatataagtgagatcatgtagtacccaccgtgggcttattttaaggctctgagtaaatcaccatctctctgtgctagggtattctgagtcagtcttgttataaaatattttgtttaggtaacatattgcaaaacgtttcataattcaatggttcctttcccagaaaaaaagcagtgaaagttccaatagccaaaaagtgtctaactcaactgacctttgggaaaaaatatccgtataattccagatagtcctaacttctgaaggtaatatagcctggcctctgttgataaacaaacaaaaacaaaaaaaccacacacacacacacaaaccagcttcttgtctttaagtgtgcaagaatgttagcacttaaaatttttaagatacacaaaaactaaacagaactgttcaagtttttaaagggagcttggaaatttgaagaaagtaaagttaaaaatattgccccatgagtcatataattatttttctttttatttctcatagcttccctcctatccattatttaggcaattttgtatccaaatttaataatttaacaccttatttgttacaagaacacgttactatgttattttaagcttttttgggcaaattacacataattagataggctgggttagggctgtctacaagatcccagcctagagtgtggtgcagtagcctattttctctaggactcttgctgcaacaggatatgggagaagggaaacattaacgttagcagaatgggaggaatcagattatggagacatgatccttgccttctggcacctctccagctgatttagaagaggacacagagggagacagacatatggccatttctataattataaactctgctacatgctgagaggatggcttctcaaagccagttagtgtacaagcagtggaggttgggactgccctacttctcctgcctagggtcacacagtctggcagatctggaaagacttccctgagaaagtgaccttggaactgataccttagtggaaataactaggcattgggagggggtgaggtgaggagaaggtcaagagctttcatgtagagggaactttgtgcagagaccttagtcaggaagaggttttgcatagtggaggaactgaaagctaacagccaggctacagtacagagcaaatgatgctggggtgtgaggtgatgtcaaaaggtagacaccagggctagagggcgcataatcttgcaggccgtgctaatgattttgttttctacccaagaatgctacttcaggagatcagtcaaaaggttagggtgatggtgacggtggaaatatagaaaaaggaatttattcaagaggtattcaaaaagaagtgaaatagagatgagttggagatagattggataaaaagagtgagggagagggaggtgtcaggctgcagcccaggttctgagttgccaaagag

SEQ ID NO: 2997 - DNA, 2300 bp, Homo sapien
agagcttcaaatattaatgttatagaacaacaagaaggaatgtttaatatcagtgagctaacttccaccttaaaaagcaagaacaaaaagagcaaagtaaacccaacataaataggagataataataaagataaagaagaaatcaataaaacaaaacaaacaatagagaaaataacgccaaatgtttagttttgagattaataaaattgatagcttcctagcaagaatgatcaagaaaaaagagaaaaataacaaattaccagtattaacaataaaaaagaatattataacaaatcttattattaaagagataagttgaaaatttaatgaaaaaatttataccaatatatttgaaaatgtacttttaaatgaaaaaaatccttaatgaactcaatttactgaaagtgagacagaaagaacatttgaatagctctatgatgataatttgttattaaaataacaaataaatagtaaataataagtacaataaagcaaaaataaaataataaataacaaatattaacatattttgttttaaaaatccctcttataaagacaaagcatcacccagaaggctttgtgaattctatcaaacatttaaagaagaaaaaatatcaatcttacttaaaatcttactttaggaagatagcatattcctaatactgaaactttataaacaaattacaagaaaagaaaattcagaataatattactcataaagttagacacaaacatctttaaatagtttaataaaatctagcaatatataaaagattattaaatcatgattatgtggggtttatcacagaaaagaaagattgtcttaatatttgaaaattaaagtgtaattaatctcaataatttgccgatactttattcctatattctcctatattttgttcctatataattcctatattcaaaatataggagaatgtagagaattatagaaaaataatcatgtgtttatttgaatggataaacagaagtttcgaaacattcaacatctgtttatgacaaaaagctactagtaaattagaaataaaaaggaatttcctcaatttgacaaaaagcaacaacaaaaagttatagctaacataacacttaatggtgatattgtacacttttcttatgttgggaacaaggcaagaatgtctgtgctctgcatatctattcagcactgtactggatgtcccagtctcattagttaagaattaattaggcaaaggcaagaagttaaagtcataaactggaaaataataagtctactacatttatttgtaggtgacataatcattgtctatacaacaaagaacatttaattccattctatgctttttactcagtccctagcctgcataaatagtatacaatttgcaaagttggtaagagaaccaaattagcaatatggtaatccaattcaggacaaaggacaatcatggaaatttgattagaaatgcattaatgtgttaacaagctacctttgctctatctaaaactttaaataaatatgaatagcagcaaaaccaacacaaactatgatttataatggattataatggataaaatgtcatatagaaacattgaaatcaatttggaaatctagaaaaattgaatttttaagaaataatgggtacaaaagaaaactcacaaatgcaaaccctttgtataggtgaaattcatatttgattcaccaattagttttttttcaccatgaatatttttttcatatgaaaaagacttgatgctaatgaatatacttttaatacaacaaagataaaatgagaaaaacattatttaactttggttttataataattaacttggcttaatggaattcatttggtatactttaatttggagatttaagtaaacactgactccaggaggctagagaaattaggatttttagattacagatgcaatatggagatctcatttaacaatgacggtaactttgagataaaatacgggggaagtagcccagaggcagctaaaattctccatatacagtgaggtcttatctacaaagctccccacatcaatatagtttacttacaagtaccaaattgagtttgtctgctcttctgaaagtggtgagttaagataagggtcccaacagatgaacagctgttactgcaggtgagtgttctacatcaggcacgggattttcaactcataatggagtgacgttgaaccacatacaatattatgaggattttcccttgaaaccgttaaagagctgtaacatgatgcttgtgaatgtcaccactaggtggcactgaaagttaaacagttat

SEQ ID NO: 2998 - DNA, 2300 bp, Homo sapien
catttaaagaagaaaaaatatcaatcttacttaaaatcttactttaggaagatagcatattcctaatactgaaactttataaacaaattacaagaaaagaaaattcagaataatattactcataaagttagacacaaacatctttaaatagtttaataaaatctagcaatatataaaagattattaaatcatgattatgtggggtttatcacagaaaagaaagattgtcttaatatttgaaaattaaagtgtaattaatctcaataatttgccgatactttattcctatattctcctatattttgttcctatataattcctatattcaaaatataggagaatgtagagaattatagaaaaataatcatgtgtttatttgaatggataaacagaagtttcgaaacattcaacatctgtttatgacaaaaagctactagtaaattagaaataaaaaggaatttcctcaatttgacaaaaagcaacaacaaaaagttatagctaacataacacttaatggtgatattgtacacttttcttatgttgggaacaaggcaagaatgtctgtgctctgcatatctattcagcactgtactggatgtcccagtctcattagttaagaattaattaggcaaaggcaagaagttaaagtcataaactggaaaataataagtctactacatttatttgtaggtgacataatcattgtctatacaacaaagaacatttaattccattctatgctttttactcagtccctagcctgcataaatagtatacaatttgcaaagttggtaagagaaccaaattagcaatatggtaatccaattcaggacaaaggacaatcatggaaatttgattagaaatgcattaatgtgttaacaagctacctttgctctatctaaaactttaaataaatatgaatagcagcaaaaccaacacaaactatgatttataatggattataatggataaaatgtcatatagaaacattgaaatcaatttggaaatctagaaaaattgaatttttaagaaataatgggtacaaaagaaaactcacaaatgcaaaccctttgtataggtgaaattcatatttgattcaccaattagttttttttcaccatgaatatttttttcatatgaaaaagacttgatgctaatgaatatacttttaatacaacaaagataaaatgagaaaaacattatttaactttggttttataataattaacttggcttaatggaattcatttggtatactttaatttggagatttaagtaaacactgactccaggaggctagagaaattaggatttttagattacagatgcaatatggagatctcatttaacaatgacggtaactttgagataaaatacgggggaagtagcccagaggcagctaaaattctccatatacagtgaggtcttatctacaaagctccccacatcaatatagtttacttacaagtaccaaattgagtttgtctgctcttctgaaagtggtgagttaagataagggtcccaacagatgaacagctgttactgcaggtgagtgttctacatcaggcacgggattttcaactcataatggagtgacgttgaaccacatacaatattatgaggattttcccttgaaaccgttaaagagctgtaacatgatgcttgtgaatgtcaccactaggtggcactgaaagttaaacagttattgaacaggctgtggaatattgaagttttcctatggaaaaaaatttgattttttatgttgtgtctatatattcttcatttgaccttaaaacatagcagtagcagacatctcttgtaccgtgccttacacctcagcccatttgttttcctccagcccttggtgaggctcttggttacagaacctcagctcagctcactgcatatccgctgcttttttgcactaagtctttattcacaatgtggttgggacacctgtgagaagctacttagcatttatgaatgctcaaaactgaaagtgtgggggaattaagacccaatgggcaatccgtgactattaggggatgggagtcagggctttgtgttcctttcatacccctcaggtggacaattctgaggcaagatcttcattgctcatcagaggattccggcgaggtcagatccagttttccatagtggcgaccagcttgatagtaccactctattgactttctctcctttcttgttttattctttccaatatattagccttagtatctgataacatgccccaaagtaaagtcatttataaagctccccacgttaatatagtttacttt

SEQ ID NO: 2999 - DNA, 2300 bp, Homo sapien
tcatctggagaatagtaagaaatgcgaattcctgaatttatccctgaaccaaagaattagaaactccagacccaatgatttttaaaaagccttccaggtggttctgatgcccacttaagttgagagtccctgataaaggagcatatttcataaccttggagaaagagtaaataatttactcaagtaaataacaattaccataaagaaacatgtcaataaactatatcccattaagaagaaaatctttttatcaaaatatagctttaagagagtaaaaggaaaactacagattggtaaagaaaaaatatgtacatagatatataatcacaatacatgtatccaacaaagaactagtacccacaaaatataaagaacttcaaataaagaaaacatagacaccccccaccccaaaaaaaaaaacccaaaaacctaaacaggcatttcacaaaagaatatatccaaatggtttaactgcatatgaaaacatgttaagttccattcatcaacagggaaatatgaactaaaacaacaattagatacactacactcccatcagagtggcaaaagttaagagttagtaacaccaaatattggcaaggatgcagaaaagatggaaggcaaaactggtgtaaccattatgaaaaactgttctccagtatctattaaatgtaagcaatatttctaacctatcaccaagcaattttatttctatgtttattcacaaaagacatgagtgtttatgttcacaaaaagacgtgtacaaaagtatttaaagcaacattattaaaaatagctaaaatctggaaacaattcaaatgactaccccaagtacaatggataaattgtggtacattttacacaatggaatactacaccacaatgaaaaagagtgaactactgctacatgccacaacatggataaatctcacagaaataatgttgaatgaaagaaagcaagctggggcaacatggtgaaaccccatctctacaaaaaatacaaaaattagccaggtatggtggcacccacctgtaatcccagctactcgggaggttgaggctaaagtgagccaagatcacaccactgcacagagcgagaccctgtctcaaaaaaaaagaaaagaaaaaagaaattacgaaggcaaacaaaaaatagtactggccaagattccagtaatgtgaagttcaaaaatagaactaatagattattagttctcttttaaagagcgttgaatgggaaaaggagccatgaaggagagttctgggtgctgaaaatgttctttatcagggtagtaggttatgcttgggtttcttacaggaagccgactctaaaacaggaaaggagagaaagccaaagtaaactatattaacgtggggagctttataaatgactttactttggggcatgttatcagatactaaggctaatatattggaaagaataaaacaagaaaggagagaaagtcaatagagtggtactatcaagctggtcgccactatggaaaactggatctgacctcgccggaatcctctgatgagcaatgaagatcttgcctcagaattgtccacctgaggggtatgaaaggaacacaaagccctgactcccatcccctaatagtcacggattgcccattgggtcttaattcccccacactttcagttttgagcattcataaatgctaagtagcttctcacaggtgtcccaaccacattgtgaataaagacttagtgcaaaaaagcagcggatatgcagtgagctgagctgaggttctgtaaccaagagcctcaccaagggctggaggaaaacaaatgggctgaggtgtaaggcacggtacaagagatgtctgctactgctatgttttaaggtcaaatgaagaatatatagacacaacataaaaaatcaaatttttttccataggaaaacttcaatattccacagcctgttcaataactgtttaactttcagtgccacctagtggtgacattcacaagcatcatgttacagctctttaacggtttcaagggaaaatcctcataatattgtatgtggttcaacgtcactccattatgagttgaaaatcccgtgcctgatgtagaacactcacctgcagtaacagctgttcatctgttgggacccttatcttaactcaccactttcagaagagcagacaaactcaatttggtacttgtaagtaaactatattgatgtggggagctttgtagataagacctcactgtatatggagaattttagctgcctctgggctacttcccccgtattttatctcaaagttaccgtcatt

SEQ ID NO: 3000 - DNA, 2300 bp, Homo sapien
gccaggttggtctcgaactcctgaccttgtgatccgcccacgttggcctcccaaagtgctgagattacaggtgtgagccaccgcacccggccacggtttttttttttttctatgttgcaatagaggagatgggtctggttgggacttactacccttcccatgcagtagctgttctcatacctcaggcccgcatcatgagagaggatttatctggtctacatctctgaccctaatgtttcagaagaccctggtgaggttcatagaaaaaggcttagagactgatgcgaatttccctgtttttgtgactcccagggcttctatatactcatgctagcctttactaatttgtctaaaattttagctgaattcttattcttactggcttgtataatatctggcatctgtcccaagtaaacaagggtttgcattccatctgtcctttgaggagtctgtctttctttatattttgggttaactggttgccttgatatttcagttctttgataaattcaagttatgattttgataatctggcttcaaaaaattataagtatgaaaatgaagctctttccagctttttgcatgctaatcttaactttaaaaaaattatctgtaatcccagcactttgggaggctgaggcaggtggatcatctgaggtcaggagtttgagaccaacatggtgaaaccccatctctattaataatatcaaagttagccaggcatggtggtgcatacctgtaatcccagttacttgcaaaaccgaggcaggacaattgctttaacctgggaggcagaggttgcagtgagctgagatcatgccactgaactccagcctgggtgacagagtgagactctgtctcaaaacaaaacaaaacaaaacaaaacaaaaaacaaataaaaaaattatttgcaggccatgcctggtggctcatgccaacaatcccagcactttgggaggctgacacaggaggattgcttgaggccgggagttggaggttacagtgagctatgattattccactgcactccagcctgagtaacagagtgaaaccctgtctcaagaaaaaaaattttttccccctaaattagcttcagatactttttttttgaaaaccaaaaaatagtaaatagcccagacacatttatatggatgatatctacaaagcacaaacatatatttagaagcccttcaacagttacaagcagcgtaaaagaggaatgtaaatgtgtccggcaaagactcatttataacaaaacaaccctgaaacatccaaataggactaataaaaagggatcctgggataaagactttggaatactccattaacttcactgctcacaagttctgactagtttcttataagtaataggacatttatagcaggatcttttatgtaaatctcatgccagtaacttgtacttttatcctaaataaaactgtatgagattctcatctcactacatagggttacaagtaacttttatgatatctttaaaaagtttcatgttgaatatcacctccataattaaaaaatggatgcatagactgaattcattcattcatttgacaaatattcactaagcacctaccacttgtgagatactctgttaggtggggatacagtatgataactgtatggaactaacactccaagtcaaacattgaagtcaaaattctgggctggcgtacattagttaggagcccccattttagaaaatattatttcaagcaggccttgtttttatccagagagtgtatacagtataataaaactcagtacaccaagatttatatttcatggcgtgtttttctccctaagtagagaaaaagctccttcagtaaagtgattgtgttgtcaaccactgcatattcttaagtgtaccaagatgcttgactccaggcaggtgctaagagagactgttgggtgagtgaatgtatatcaatgaaaatcaaacagaggaaattttctttatatgttttagtgttcctgtggtttttttttttttttttttttttttttttttttttttttttgtgatggttactggctcttctctaagaataatggagaaaaggtgttagtttgtactgtcgcacagggcagtcgtaggagactctgaaaaagcaaataaatcaatgttaaatcagaaatgtgaatgtagtaaggggctgaagagacaggggaagagaatacatgggaaaatattgaaaaggacagagtgatcaaaaagagcagggacatgggagcattgggcagcacactgggagccatttcactttatgctcttattgtatgat

SEQ ID NO: 3001 - DNA, 2300 bp, Homo sapien
agatgtgatattttcagtggtcaggactggagctggctaatgcttccaacaccacacattccattgcccagaactcagtccatgaccttaacccaactattaggaaataggacagttgcatctttcctgtaggaacatggaaaaaaatgtgaataaacacataatgtggtatctactattgttttctaaaaccacaaaccaagtatttgccattaacagcacaagatgagcaaagataacacctagtgcttatgaatgatttgggtaggatttgaactgggtattgctcttaaagatattatagttcatagaaattgccacatatctgtggccatgataggaagagctcattgagaatgacttctggcctcactattaacgttgacaaacctaagaaatagtgtatatatcaaagtatcatgttgtacacagtaaatacatagaataaatataaatttaaaacagaaacaatgttacaaatgggattttcctttttaaggcacggtcttgctctgttacccaggctggagtacagtgacatgaacatggctcactacagccctgactttcagggctcaaaagatcttcctgcctctgcctcccatttagctgggactacaggcatgtgccaccacatttggccaactttttaatttttttatcgagatgaggtctaactttgttgcccaggctggtctcaaactcctgggctcaagtgatcttcccaccttggtctcccaaagtgctgggattacaggcatgagtcattgtgcctagcacaaattcatgcccagattttaagtgactgctccaatgcattcagtgaataattaatatgatttaagaaacactataataataaatgtatttcctggatctcaaaaaaactgtgttcatgtatttacacatattaaccagccagggtcactgataagtcactgaatacttcatataaactacttaaatcaaacattgacaaatgctgccctttttatacaatgtgttttggtcagatcacaaaacaacttaaatttggatttttgtggtctccccatgtatgagtcctcttgaaaagctgcatgttctgactatcacaatcgtataccattccacactgtacagaattttcagtatttagttgagatgcatgctgttcttccaggacttcaaattatgaacttcccagggggttagtcagtcaaaatgctgctctagagaatatagttctaagtagatttgtatctgggattctatacattgaaattaaaatcacaatgcattttaattttttgtttaaacatctgcagtttaaaactctttgatagaagagattacattgttaacctctgtgtgtttatatgcctagtaagacactggtatcaaccatgtactatgtaattttttagtgaatgactatacagattaaatgcagtagaagggcttctttatatttgttatggtcctatgcattctgaatggctgcaatttaatctctaaggataatgtagagtggactgtagtttatataattgtgcagggaaatcttggaagatgtaaaaagcaacgtctccaatttataaaagaatcagtgagaatgaggaaataagaaagatgggtgaaaagaggtgaaattggaaagagaaaactttgaggacattcaaaagggggaaagaaagaatggagtgatgagaagaggggacactatggagagtggaggcaaagttaagtggagaaactggaagaactgtgatctattaaaacaagcaggaactgaaaaaatgacatggtttctcctttttatcttacaaatgacatgcaaaatccagagggacaaaatgacctttctttcaatgccatacaccactttgtctaaggcagttgaggaagggaagtagatataatggagcttagtggcagagcagctggaatcctgagagaagagaataactttagttcagagcaggtggggaaatgagagattgagtaggaggaccaaggttgagggaagcagatcttcttagttgctgtcagcggctgatggggaagattgttggtagaaggaagtcagaatataggtacagagggataagtttgctaagaacagagatcagcaaacagcttttctgagagaaagaaacatctgcaaatgacatgctgtttctgcagtttctgctgctagctcttcttctcccaggtggtgacaatgcagacggtaagaacatcgctgtcagctgcaaggttacatgtatctgggtagagtgtgctgggctttcccgagatggatcaatagagatgccaga

SEQ ID NO: 3002 - DNA, 2300 bp, Homo sapien
aatttctaactcagtctttggcaatactaatattcctttctggtaacataattttgactggattactgttctcatgttttaggcctaacttgtttaaaaatttgatgagtggccgggcgtggtggatcatgcctgtaatcctggcactttgggaggctgaggtgggcagatcacaaggtcaggagatcaagaccatcctggccaacatggtgaaacacagtctctactaaaaatacaaacattagctgggcatagtggcacatgcctacagttccagctacttaggaggctgaggcaggagaatcacttgaacccaagaggcagaggctgcagtgagccgagatcatgccactgcactccagcctgggcaacagagcaagactctgtctcaagaaaaaaaaaagtttgatgagtgtggggctagtgttgtgatagtctcctgtgccctgccaactcttttggattattttttaaaatgaggaacatttcagatttagtttgtagcaattcaactttgggagtcttgcaagaactcacttattttaatggaaaatagcccaggttgtctaccagcttttcctgagctctgttttgggtgttctacccaaaataaaaaacgtataaacacaaaaatagtaatgttcatgtctgtgacagccaatgttaagtctctgctgttgtctatggctgttatccaaaaagtagattcaattctgtcatgtattggagtctgggaatgttgttaagagatacatacattgaaatttggagagctgctctgtatttatcaattaggcagtaataatcttggatgaaggctagtcttattaatgttgtgaaccagtcttattaatgttgtgaaccagtagtgtccccaggaatagagaacactacactactcactttgcattttcttatccacataatagaattagttagtgataaccctctttactcggaatcgattgctgccacatttctgcatgatacatagatctctgcaaatatgtgatttttttcctaaatggagaaaatccaaaaattcttcttaaaatttttcatgggcatacaagaagataggaggtgacatcttaaaacaagtatctctgaactttttgtataaaaaaaagcaacctctttgctctattattaataccacatgtggtgatatgaatgcccaaatgtagacagcagttatgagatattacaagagaagaaaaaagctctgccgcttatggcaacttacccaaaaagttatctttgacttaggctggaggtgcacatagcatagctcctagagttctgtttatgtcatgaatatttgttactcaaaactccataggccaagagctcctgaagagaaggtcacatgctagcagcaattgtcattttttccctcaaatattgctatagtataattttgtttgaattataaacttcagtctttattatatttgattctggcattttggtttgtagtgctatagtacaggaaatgttttaaatgctttgcctttatgtaagtgaatatcggtacacacacatacacatacacacacagacacagacacacacacacacacactcacagccagtttagaatgtggggtaaggaacaccagacaaagagggcaatataagaaagagaagacattgaaaacattgggaagaggcagtaacagagtgccagagaagataaggcagctgggagggggagaaactaagtgaggtggataaactaaaagcatccttctgggttaaagcagactaaaagcttagcaattgcttaatatcaccatcttatcctatagatgtgggaataaaggctaaggaaggagaaatgaaaatgcagaatcatatgggggcttttccaaggaggtatgaaggaaggtgaggacagggagagcggctggaagtcagggggtaagagaaactctaaaaatcagggcttgagggaaataaaaggtgaggtaagaggctcagggctgtgggaggcacatttttctctgaaaagcagtttggatgaggaagagatttggcagttggaagagagaagaagtcactacagggtactgaggaaaagctttgctgaaattggagatcaaataccagctctgccagtaagaagttgcatctcccagtgaaatgctgctgctgccatttcaactgttagctgttctctttcctggtggtaacagtgaacatggtaagagtcactctggcagctcccagcactggtgcaggggtttggattttaaaaagcaagcagggctttcctaggtgcaattggacactaaggg

SEQ ID NO: 3003 - DNA, 2300 bp, Homo sapien
aacaaggaaactttttttaatctttctttaaccttagaatttagaaatgataataagatgaaactaggtttggacctttttcttttgtttttttgtttgcagtttttttttctttttttaattatttttatttatttatttattttttattattatactttaagttctagggtacatgtgcacaacgtgaaggtttgttacatatgtatacatgtgtcgtgttggtgtgctgcacccattaactcgtcatttacattaggtatatctcttaatgctatccctcccccctccccccaccccacaacaggccccggtgtgtgatgttcctcttcctgtgtccatgtgttctcattgttcaattcccacctatgagtgagaacatgcggtgtttggttttttgtccttgtgatagtttgctgagaatgatggtttccagcttcatccatgtccctacaaaggacatgaactcatcattttttatggctgcatagtatttcatggtgtatatgtgccacattttcttaatccagtctatcattgttggacatttgggttggttccaagtctttgttattgtgaatagtgccacaataaacatacgtgtgcatgtgtctttatagcaacatgatttataatcctttgtgtatatacccagtaatgggatggctgggtcaaatggtatttctagttctagatccctgaggaatcgccaccctgacttccacaatggttgaactagtttacagtcccaccaacagtgtaaaagtgttcctatttctccacatcctctccagcacctctccagcacagaaagagtattgaaaataaatgtagatattctactcaggaaacaaggaaactttttatctttcttttaacttagaatttagaaatgataataagatgaaactaggtttggacctttttcaataattctgaccaccgttcagtaaatttactgtataagaaaagtagaggtttggggttgaattttgttttattttttcccaaagatgtctatctctgatatcttagggcctggcaattgtttttggtcataggtgggctctgaataaatgtcagttgaacaaatatataaaaaccaaacaaaggaatgttatttcaactgccttcagagtgtcacaacaaatatcaatgaaaaagaaacaaaaataaagactcaattaattctccagtgaacacttcagtcctctaaaggtacttccctgtgtccacccaaactgctctctaaccgaacgcaagcaaggggactccaatgctctcaggccatgaactaatgaggagcttcatgcctgccctcagtctttcttcatacccagggcaaagctggcccacagacttccagacatgctttcttcgtttgggtagagatggggatccaagtcccctatgtatttcctccagagccacctgtaaaacatgggtgaaatctacctgccctctagctcaccacttccaggtcaagcccactcatggaccactttaacagtgacagttggcttgactggggaaactgaaaaaaaggagctttctttagattttctgataatctgcattgccattgctgctcctttttcagcagcacagagagttggattatggagggttgcctgcttattatgcagctacatccaggatgctgagtgtcttctgatcatgatcaagagcagagtgaagagatacaggcggaggagaggatcacagagaggtagaagtgggagactggtggataggtcactaggcaccactgagtgactaccatcacttctcacagattagattattgacaagccaagtatggatttgatttctacaaggccaaaagctactccatcttctagccagaccacagactttgttttaagccaggactcgttttccagcagttagtgcaattagggaggttgggaggatgtacacaagagcagggagaaaatctggagccagacagtgagagaggcagaggggaaatgaaaaaccccgtgggaggctgcagcaaagcgaggcagtgtggcttctctgacagggaagtcagcagagggagaggtttgtctgtctgtacagcaagggaagtcagacgagagtgcaagagggtgtggagaggggtactgatatctgaattattagggcaggtgtcctgccaaggaatccctcctttaacagagcttcaatgctgctcctgttcctcctcttcgagggtctctgctgtcctggggaaaatacagcaggtaagaagagtgcaggtggaaagatacctatggtagggcaccagagggctg

SEQ ID NO: 3004 - DNA, 2300 bp, Homo sapien
atcatatttcttgactggtgggggtggttaaatgggtgaatgtatttgtaaaacctcaaataactgatacttaaaatacttaaatttttaaatataaaccattccttaatttaaaaataaggaaaaaagtgaatgtaaaagggaaatttaaaaccctcatgacctgttttttaaaaatctaattaacaaaatacacacaaggaactctaagtatagtattagaaatggtgataagagcaaaagaacaaattctggaagtactaatatcgggagaacaacaagaacaacaaaaaacaactgccaatggtaataacttaaaaagtcagttggctgatttgatattagccaaaacaaggaatgtttagaggctccaattaacagctgaatactttctgatgacaacacaagagggagctcaacagctgcaaaactaggaatactatcctccccttacaagagtacatgaaaacaaatctcactaaacatgaattcaggaaaagatcatgcctatatctcatatgaagttattatgaggaaaaaaatcatcagcagtacaacattactatagagaataactgtgcacctaccgagtgaaaaccaagatatcctgcccaggttctctttcaagtaaaggacttgttgcccgccaactgatggtagctctgtcagtaggcagactttagctgtcaacttagtcattgtatcagcaacacagacactttgtccaaagtaacaggcttcgtgcagcaaactacacccaaacaaaattatgcagattaataaagccctggccatcatggctcagctcaggacgcctctgaatggtcattctagctacagaactcactgttgggtcagctgaggctgtcactaggagtgcattcggcttgacttctctctgtacccgatacttccccccacattccataggtgttaatcccatacatttattaacaaatattctatatgccaagttgtctcagaatatgcttcccagggagcacaacttgcaatagccaggaagatatgacttcaaaatcgatgaaaactctaactaaatatttcaaaatgaggtcaaagaagttaaagaagtgatagaaaatacaaaataacagcaaagatcagaatcataaactcagtcatgactgaatagaggagaagttttgaaaagaggggatagattaggaagcagttggaaatgaaagaaaaattgtttcataaatgaaggttaaacttggaggaacataagacaataaacatgatggataagcctataacagcaaaagatacggaaagagaaactagagtaaaagagaataataatactagggaatataactctgtaattatatcgttataaagtgtgaaggcatgaaaatactaatgcatgatattagaagccatgaatattgtttctgttagagaataggtagtgggtaatgaagtatttggaatattatattttttgacctacacatattcactttgtggtaattaattgatgtattcatcataatttgtacacttttctgtatgtgtgtgttttgatcaaaaagtgtacatggtatactcttcttctttcatggttccaatatattttatatgaagatgtcaattattttattttttattctatgcattttctgtatatccccctggggattctctcttatctttaggtatctgtgtttcatgttaaagccttcttcaaatatatggtaactcttggatgttcaaatatattccagaccacagcactaaaaagcctatttgaagctctctgcacgtgggtagaccttgtgaactggtgggttccaatgcagaagtcaggcaaagcaatgctattcattttgttgaaattactcataacttctcattaccttctccagaaagaaacactcctactacctaagtgaaaggtgtaagactggctgtcaatctggggtctgagtgttgggaaagaggctggtgctgcctcatagtatgaaagcattcacatttaatcctctgcttgaagtatagccccttacatttgcctctgttctaccgagtgtttgaagtcagaagtccttagtttaactgctgtaaaacttaacctccaatcttaaactggcattcaacagatacaaagcaatgctactccgttgggagttggcagtctagtgatgatctatgagctttttgttattggcttgtaatgagacaggtatagaaactaaattatatttgtgttacttaccagtggtaagcaactattataaaatttggtattactgaaacatacaagcacataatcagac

SEQ ID NO: 3005 - DNA, 2300 bp, Homo sapien
tggtggtttgctgcacccatcaacccgtcatctacattaggtatttctcctaatgctatccctcccctatcccaccacccccgcaacaggcttcagggtgtgatgtttccctccctgtgtccatgtgttctcattgttcaactcccacttatgagtgaaaacatgtggtgtttggttttctgtccttgtgatagtttgtggagaatgatggttttcagcttcatccatatccctgcaaaggacatgaactcatccttttttatggctgcatagtattccatagtgtataggtaccacattttctttatccagtctttcactgataggcattcaggttggttccaaagggctaatatccagaatctacaaggaacttaaacaaatttacaggaaaaaaacaaatgaccccatcaaaaagtgagcaaaggatatgaatagacacttctcaaaagaagatatttatgcagtcagcaaacatatgaaaaaaagctcatcataactggtcattagagaaatgcaaatcaaaaccacaatgagataccatctcatgccagttagaatggcgatcattaaaaagtcaggaaacagcagatgctggagacaatgtggagaaataggaatgcttttacacagttggtgggagtgtaagttagttcaaccattgtggaagacagtgtggcaattcctcaaggatctagaaccataaataccatttgacccagcaatcccattactggctatatacccaaaggattataaatcattctactataaaaacacatgcacacatatgtatattgtggcactattcacaatgggccatactatttctttggtcacaaggttatcacatgtttggcattcttgctaagatgattctggaacagggaaacagaacaaataatgttgatggactaagagaagattgactaaaaaaataaggagcagagtgccatgataatcatattgatatggatttgactatttaaatactttcaaaccaaatcaccatagaatgaaactttgttttttagggactgttttctcacataaagacgggtatgataatacctgcctcacagaatttttaaagattagaaattaatgtaaattgatcatgttaatatataaatatttcatagatgttgattcttttctcttaaagataaaataatttcctctccttatcccaacttcagacaaatattcctcagtgcatgtgttatagtgcagtctctaaaattatgttcctgcctttactactaaatttgacttgaatataatgaaactatatggaaaagtaaagtaatccagactttcaagaagagaatgtaaaggactctcagtttttctatgtgagatccaagaacaggggaaaccacaaatgtagaatcaaaatcttctcttgtagatcatggaagttagattattcaagctgcatttacactggaatgaagtttggcatggatagccccactggcttgtagaaaggtctaagagcatcccactattttctttttgcttgtttgtttcatttttgtaagttagtctaaaataactatgcctatggaaaaagtctacctctttttgttctccattaaaattaatacatacagtaggatgatttataccatatatatcagaagtcagccatattttcaacttttttgtgacatcattggtttgtcaaataaggtatcctaatttttgttttacaaaatattaatgaacacatcatataactttttttgttccttccatttaaatgattaagagtacaactaaatcagatttttaaagaccaaattgttgaggttaggaataaaatcttattttgtgaaagactctctagaaaaagccaggataattcgttgacttaaagactgtgaaaaatctgcagttgagttggatgaagttgttgagctgtatttcctataaatatatggggttttttttctaatttttcatccaaaaaccttactttcattttttaagtcttattgagtaactttgaaagccagagcctcccaaaactgctgagtcacccagtatctgtaaaacttagcagttgcctcagctgagtatgtcttctaaagataatgtcgattgtgtatggctgatgggattctaggaccaagcaagaggtttttttttttcccccacatacttaacgtttctatatttctatttgaattcgactggacagttccatttgaattatttctctctctctctctctctgacacattttatcttgccaggttctaaacctttaggaaaaatggagcaatttccaaagg

SEQ ID NO: 3006 - DNA, 2300 bp, Homo sapien
ggattttcttttctattgcattattaggctgcaaattttccaaatttttatgctctgtttcccttttaaaactgaatgcctttaacagcactcaagtcacatcttgaatgctttcctgcttagaaatttcttccatcagataccctaaatcatctctctcaaactctaagacacacatctctaggtcaggggcaaaatgctgccagtctccttgccaaaacataacaagagtcacctttgctccagttcccaacaagtccctcatctccatctgagaccaccacagcctggatcttattgtttctgtcactatcagcatttttgtcaaagccattcaacaagtctctaggaagttccaaacattcccacattttcttgtcttcttctgagccttccaaactgttacctgctacctgttacccagttttaaagttgcttccacattttctggtatcttttcagcaatgccctactcctggtaccaatttactttattagtctgttttcatgctgttgataaagacatacccaagactgggcattttacaaaagaaagaatcttattggacttaatgttccacatggctggggaagcctcacaatcatggtggaaggcaaggaggagcaagtcacatcttacgtagatggcagcaggcaaagagagagcttgctcagggcaactcccattttttaaaaactattttaaaacgatcagatctcatgagacccatttactatcatgagaacagcatgggaaagatctgcccccataattcattcatcttccaccaggtcccttccacaacacgtgggaattatgggagctacaagatgggatttgggtgggaacacagagccaaaccatatcagggcagaaagctgtcctgaaacatggtaactcctgtcgtgagctcttttggttcccaaacactgaagtggggcacctgataaggtttccttgtgttcctctttaccctttaccttaagacctgctcgaagcatcagcataagagagaaactgaaacaatgaacacccacatgtgttagtggctgtcattctagatcctcttggttttttctgatttaccctgctttagtggggtttagacagtttccaaatccaaactttaactctctctatgctgctggtttggattaagacaatcagctttattcttctctgtagatggccttggatcattttcccctattagctgttttgggatccttttccagtcatgaccacattttgcttacagatcagctagttggtaaccacagcactgtctgctaactgataccattcatttgacaattcagagttatgatactttgtagtgcacccactgttcttcacaggaaaaaaaaattgcagtacaaagggtttatcaggccccctatcattccagagtttcagtgctgttccagaatgttcaaggtttcagtcatgatatgaaccaactatccataaataatgcaaaaagcatgagtaatcatgaatttaataatcaaggtaaggcagctcagttattatactcaagagagcaactagtatgaaactctttcaaattatttgaataaggatttacatattcataatgactttctgcctctgtcaagctccaggtgtatcagttattaataactgggtgaatatgtaggtactatttaaacaaaaacaatttcacagtagacccacccctatccaagagatgaagtcaagttctggtagcaatagacatctctaccaagatctcctgctcctgccactctgtgaacaggaaaggagggagaaactttggtgttttgcctttcccaatttatattaagatccttattcaagcggctaccggtttctaatgacctatatgtaagttagctttataagaaagttctgagtttgaaactcctttcagcaagtatttgtaagtcaaaaaagcgaagaagaggcaccatttactgtcatttctccttgtgactgagattacttactacaaagaggaactgaccactttctctgacatctgaaatagaaagctacaaaggctgataggcgtggcttcaaaattgtttcatgattacataacttctttctagttaggaattaggacagtgtaagaaggccatctacaatcaagattgagagtggctctaacaagtgccatttttccttgttagctttcatttctcagccctttacaagattaaaatagtctgcagtttaatctctccaaagctttacggacagtgattctgtcctaaacaagacagtgactccaggatttctgaagactattgtg

SEQ ID NO: 3007 - DNA, 2300 bp, Homo sapien
acattaatcgggtgggaacttttcctgaggactttgaatgagcatcggaattagtacttcagatgataaaaagtcatgaaggtccatccaagacttttacccccttatcaggagctctcgtatgttctattagtgagctttctgtgtgatggcacaaattgcaaattattgcccactgcttcagaatcagcacaaatgcacatttttaaagcatttctttgcttcatctattacaattttatctgcacagtatggattatggagcaatgttctgaattgtcttcattggtgacagtaatttgtatgttgtatgctggagtcctaaccaaaggcattactctacatgaaatgattaccaaaaaggggaaacaaaaatgtcctgaaacatggtaatttctaccaagtttcctctactctctgacctttgaattggggtaacctgaccttcctaatatccctctctacctactatcttaagaccaacttagtgtctctacattaacagcaacgtaaacctataaaagaaaaccatgaacactcgaaggtatttttgtggccatccttccagatcctccttgctttttcttaacttacttttgctttgataaaattatcatatggctccaaatccagacatcaactatcctctccatgaccctagtttgtactaaggcgatcagctttcttctgttctgtagatggcctcagatcatttgtattatttgtgaaggaaaccaaaaatacttctcaaaatacttaggactgttaagttaaagacagaaaatggaggggaacatgctgcctcaggcactatttgcctgatggcaggacataaatccgtatttactggagaaagcacttgcttttcagcccggagaaggcgccaccaggaacctgaggaatctgggaacagattttactaccttcccacgttttcccaccttttaaatgactggaactgctttctcctttgcttttcactatatagaacgtatggctctttattgaaatactatttaaacaaggtttctaagccacagcctggagagagaaatacttttgaactgaggcctatcccttgtgatgagtagagcacacattaataaactgcttgtttttcttttgttaatttgacgtttgttttcaggagagtgtcaactaataacctaaaaagggaaatttaaaaaaaacttgttttctcccctacagctgtatttcgggccccattttccactcatggccacatcctgcttgcagatctgctgctgggttaacacaacatcatctgccagttggtgtcgtttatttgacatcttggggttttagtactctgaaggacacccactgcccttaacagaaaaaatactgctgagcaaagggtttaacaggactctcggtctaccagaagttcagtgcattttccaggattttcaaggcttcgatgctgtcatgttgtgagcccactatccacttgtgtttttccatgaataatgaaggaaacctgaggaatcatgaatgtaatcattgaggtaaaataacctagtcatagtcaagaggacagctagtgttaaactcctttatatatatttgagaaaggatttatatattcataataactttctgatctggaaagccctaggtttgtcaactattaataactgggtgaatgcttcaggtagtatttaaaccaactgctatttcatagcagacattctcccatgcaggagatgcagtaaagtactggtagcaatagatgctcctaccaagatctccccctgcaaccgcacaggaaaggagggagaagaaaccaccttgcttctctcatatttgacaatcattcatcggaatagaggtccctaatgtcccacatgtaagtctgctggttaagaaagttctaagattggaactccattcagatatcaacatttgtaagaaaaaaaattttaaatataactttgatacaaattttactttgattaagatacctacaggaaagaaactgttcattttctctaacaggatggaaagcaaaaaatatgggtgggaggagtctgcacgttgtttcacaacttctctctccccagggcaaagcagagtatgaggaagccagcactagtcaagtgactctaagaagggccattttcccttgttgtctttgaaaatacttcattttcttagcatttcaggagattataacatcctgtatttcagtttctgagagctttactgactgatttccctattcaaaacaatcctcatttcctacatttctgaagatctcaagatctggactactgttg

SEQ ID NO: 3008 - DNA, 2300 bp, Homo sapien
tatgtgtaagaattgtttgaataagacctcgaaagcacaggcagcaaaagcacaaatggataaatgagattacatcaaacttaaaaacttctgcacagtatacaatcaacagaatgaagggacagcttacagaatgggataaaatatttgtaaactatatatctaacaatatgtcactacatttcaaacaatagaaagtcatggactctgtcagggttagtgtaaaggaatgtctactctaagaagtagtaaaactaactttcaaaggtagcttagtttcatgaaactggtttcagagaggtatgaagataaagtttcccttctgtgttgagagtatacgagaaaaaacagagtgaagggaggccaagggaatcagcctatcattctaccacatcacatcagtcatatttcatctcccacacagtggtaccgatatttgtggacgagtatgtctgcccactgtaaatctctttttcattaataatcagatgcagaattctcacttattatttcatttatcattttcaactttctattttaatcttgcaggacttttacagaatttgatcacaagctctctcagcttcctttttccaggcttaagtgtcctcatactttgtcatctctctttccatctactgatctttcccataaaatgattattaaccgtcttcattaaagatttctccagatctcctctatcttccatgaggtgagatcgtgggtagaatactgtatagtgctccacatgcaggcatagcactggttatgcagaaagaactttcaagaaggaatgaaaattgaaacctacagaaaacacaacaaaaaactggtttcctccagggacagttaagggtagcatggggcacaaataaataaatttgctactttcaaagtaggcctaggcgtgatctagaatagaaatttagagctgtaaaggaacttaattgatttctgcaggtcggttagttgcttccgcacattatgtgaagttactgccaccttgtggcaatacctaagcactacactttctgactttgaataacctagaaaaatataatgcataagacaacaagccctttcgctaaagcgccttaaatattgcctaacagtttatatctgtatagatctgtggcttatattatcacttacatggtttcatctcgacttcatagaaatcatgtaaacatagaaaccatgttatccatgttgcgtgcctgcgtgcgtgcgcgcgcacacacacacggagtaaaagatgtcgtataagttttgctgttagagttgaacttaaaaatctctaaattgttacatttggaggctctcattttgggggatcctagtgtgagatgctcctttgttggtcaattttaattatacagacataaataaaggatatattaattatagagaaaaagatcagaaatgtaaacaaaatgcagataagatggagacattcaatgatttgtccaataatataaaaacagtttttgtgtgcgggtagtttgttgtcattagtggaaggaaatagagagaaggataaataatatttgaatttgaaagagcggatgtatgaatacaagactcccttgaagaagaaaggatcgtctgggaccacagcaggccggggacagggagaagaatgagcaggctgtgtggaagaacaaaacgacctagtatcccagtttattttttttccagtgctatgatttctttcctttatcttaaaatctttggtaaacatgtaaatgaggttttgagaagttaagattgaaattccatgttcatgttcgctgcaattgaactggagaagtgaaaatatgacaaatggaagtggcagccctaagggctggaacaagagatgcaaacaaaggctgggatggatttgtggaatttgtaacaaacacttcctaggagtgatttctcagtaaaagggggcaacgaggctggtgtagtaagttagcaaacaaattccagcagccttccctgggggactttcatgctgaaatgcaatccctagtgttggaggtggggcctgatgggaggtgtctggatcacggggggtggatccctcatgaatagcttagtgtcatcccgtttccctcatcaacatgcattcccagaaatgccatgaaaggaaagaccaagtcttgactgagaaacggaccgggcagatgagggactcccacatatacctgtttcctgctcttcccgaagacattttgccacaagcatataattcagcttctgaaaaatacggtcttcctcactgcagacaccatgccagcgttttaaatcaagtt

SEQ ID NO: 3009 - DNA, 2300 bp, Homo sapien
cctcagcatccagaagacccaaatcaactaagatagtagtcttctctaaaaaggggaaactttgctgcatagagttgatttgcaaaacaagtgaacaatgcatatgccacagtctattgcatcatgaaaaaccagtgtgcaataggtctttttgttcttagcaaggtaaagacatttgcaatactgacaggagaaatgtcacctacaaatactctaaagtgtgaagtgacataaatgtttctgcacagctaaaactttggtatatgtggaacagtatggaaaatgaggccagaaaggtaaaatagtaagctgctttttgtcataaagagagaaatggaacactcattgttcaaaaataggtacataattgagagattttattcagaataatgcctgattaatataaatttagtcactgtaataatgtagctacataatttatatatatgtatatatattcgcacattttttgctttatcaggaatttttgtatattctactaatgacttttctgtatgatagcacaaattgcaattgttggccactgccacaaagtgggggaaaatgcacatttttaagcatttctttgcttcatctatgaaaatttcatctttgtggtatgaattatggagcattgtcctgagttgcccttataggtgaccgcagtttgtgtgttgtatgctggagtcccaattgaggacattactgcatataaaatgattataagtaaaaggcagaaaatgttctgaagggtcataacttccaagggttctctaccctttgacctctggattggggttcccagtgactgccttaatatccttctctacctactgccttaaggccaactcaatgtatccacgtaaagagtaccctaaagccagtaaaagattatcacgaacacccagagatgtttatggccatcattccagatcctctttgctttttcttgacttactccttttttgataaagttattcatatggtttcaaatccagaattcagctattcacttcatggccctagtttggattaaaacaatcagctttcttttgctctgtagatggccttggacagtacatattaacagtctatggggccccttttccactcatgaccacatcctgcttgcagatctgctgctgggttaacaccacatcatctgctagttgatgccatttatttgacatcctggggttacagcacgctaaagggcacccactgtccttaacagagaaaaatacactgctgagcagaggattaaacagactcctcacactaccggaagttcagtgcattttccaggattttcaagtcttcgatgctgtcatgttgagagtccactatccacgtttgtttatccaggaataatgcagaaaatctgagcattcgtgaatctaatcattgaggtaaagtaacctagtcatggtcaagaggacagctagtgttaaactccttcatataaatttaaggaaggatttacatattcataatgactttctgatctggaaagcccaggcttgtcagttattaataattggatgaatacttcaggtagtatttaaacaaatagcgatttcatagcagacatttccccaaccaggagatgcagtaaagtattggtagcaatagatgctcctaccaagatctcctcctgccactgccactctgtgcacaggaaaggaggggagaagaagccatgttgcttctcttatatttgagcatcatttaagggaatataagtctctaatgactcacatgtaagtctgctgggtaagaaagttctaatgttggaactcctttcagctatcgaattttgtaagaaaaaaaacttatttgtgtttatatacatttatgagatacaagtgtaatttcgttacatggatatatgccatattggtgaagtcagagatttcagtgtgcacatcacccgaaaaatgttaactgtacccattaaagtaatttctcatcccccatttcccctcaccacatgctccagcccttgccaggaaactgttcattttctctgactaacagaaacgaaagctaaaaacactggtgggaggagtctccacattgtttcctactccattttctctggggcaatagcagaataggagcaagccagcactagtcagctaactaagtgactcaaccaaggccttttttccttgttatctttgcagatacttcattttcttagcgtttctggagattacaacatcctgcggttccgtttctgggaactttactgatttatctcccccctcacacaaataagcattgattcctgcatttct

SEQ ID NO: 3010 - DNA, 2300 bp, Homo sapien
agccagggcagaagatatcttaaactggtacaatagcaagatgaagtaacagaggagaccatatagtgaaaagatgacctttctgtaaacagaatcaaccttaagaaataaagcataagagcaacataagaccagtggatactgaaagccagtgtcatgaagtaacttaataaattttagggccaggcgcggtggctcacacctgtaatctcagcactttgaaacgccgaggcgggtggatcacctgagatcaggagtttgagaccagcctggccaacatggtgaaaccctggcactactaaaagtacaaaaatcagctgagtgtagtggcaggcgcttgtaatcccagctacctgggaggctgaggcaggagaatcacttgaacccgggaggtggaggctgcagtgagccgagattatgccacggcacttcagcctgggtgacagagcgagactctgtctcaacaacaacaacaacaacaataaataaataaataaattttagaatgaaataatttcttatactatttctcttaccagcttaaagtgccagagcctaaaaatagacaaagttaaatgacatttaaaatgatcaataaatactaaaaaaaaataaaaataaaaaaaaaatgaaaaatggtgcccaccacaaactatagacacaaagagtgttcagttatcaccagtgtagacagggcaatttaaagagcacatttcatagtgttcctacccaagattcagtttgcttacagcaggtgagaacacaagtaggataaacccctcagaatgccatcatctcagtaggttcaggctgcagaaactctacagagtgtcattcccaccaccatagcctttctcagtgtcagggctctagcaggtagcatgctaacagaaacctggggctcagaaagggttttctttaacatctttactctttaacatcccagtctccttaaactgcgatagaacagttttaatgcaggggaggttgtttaatctacaagaaaaagagctgagggtatggataacctcattcacaaactagcaggtgctggagaggtctgacatggaatactatagtgaaccaagggaagaggtatgaaggacatgggagcagtagacagtgagcccacagctgacagttctgtactgcatagctctctctcccttccccaaacaacacagaacagaaaacttcctgcagtcagagataatgtcaagttcatcaagtatccctgtgaaagcaaaagatcaaaatgtagtggtttctcaatatgtacattggattaactagcaaattatcgatgcaatttttaagtaaccggtgaaatcagtcctttactttgggttgaaaaaaacaaagcaaaatgggaccaggaagagtgtacctcagttgaagaactgttgggtggagctgacaatgaggtcttgggagatggggaacggcccatggctgtggacatgccggctcctgcaggagagggaggctgagtctgttcctcggacaccttactccctttgggtccagccttttctttggttgatttttttcttttctgaaagtggtttgattttcctgttattcgttttcagtgccaaatgaagtagagcacattttcattattggatagtagttttattattcctaagaagatgtttcttggaaacttgagaggttgctgcccatctctcgccagtttaagagatgggcatagatggtttcattaaacgaagaaagaggagaatgttatacacattatttctctaattatttctgttatgggatgtgctgacttgggattagagaaactaggtttttatacacatggacaaagtacttacctgattctcacgttgacactccactctactagaatgaaggtatcacatttatgttatatatatttacattatgtttactcatgtgtttggtgcattgctttgagcatcaataagatgatcaattatcatacaatttggtaaatctgaaacttgatgggaaacatgaagaaataactgcctgctggagagattgagtggaagagccgtagcagagcttcctctgtgggacttgaagcctgctcctcttcctgaagcttacctgagctccaggagttgcctctgctccttcagttttgacagtgctgcttgtggagggtgcaggtgaagtagcatccacttccttcttcctctttcttgatagggctggtccttttactggaatagattcaattttattcccaaccaatgcagaaaaaaggaagacatataaacgatctccgacagctgaagcagtttcaa

SEQ ID NO: 3011 - DNA, 2300 bp, Homo sapien
ttaattataggattggcacgaaagggcctgagtctttgtattggaaaactcaaaatgtcagtaacggtgagagtttttcccttcttgggccagttgctacagtaggagcctccagtcttctgcttatggcataaaccttgctgtcagtactctagaagtcagggaggaaagggcttggggatcccacttttctccgtgagactgttaacaaacctcctttttcagcacagttgcctcctttcccttctgtgtcttgtgtcaccaagttgggtatctctctgattaaatttcttggtaaaacaaagctggacgatgagtacttgtctctctgccccaggtgcagcagtgtacctgctcctcattgagaccacttcccagcttaatcacttaactcaccttttacaggacctgaagcctcaaatcagtacgcctctctggggttggtgcttgttgggttcttcctcaacagggagctttctctcgtttactcagtaggttaccaaattcatacacttcacatctttttaattcttacatattgttctctttggtgttctttcgccttgtgtgatccactcattcatgcattcactcattcaacgaatattttctgaacaccttctctgtgcctggcactgtgtcaggtgaagtggatgcagtgagccagtgggcagaaatctcttccctcatgtgccttacattttaggagcatgaggcagagaataaacaaacaaatgacatataccgtatgtcagatgatggtcagtaacacgtgtgggaaaagataatgtggggaagaggtagagaacatgctggtcagagaagccccacagataaggtgctatttgagctgaaagctggcaaaagtgtagaaacaagccttgcagtagaaagtgaaggaggtcctgcagctctgggctgattacctgggcatggttaggtgctcttcctctgctccttgagcatcttgagcatgctttaattataacacttatcatcatgtcctattgtgattattaaatcacatgtctgttttcatgacttggcagagccgctcaacatctggaactttgtcttactaacttttatattctcagaatctaatacatcatattagatgttcagtgcataattgttaattcaatgaataagaaaggaaaacctcaagtaaattgctgactagaatcaagccctcaagctctgaatttagggttaggagcctgggttaggaagaaagactgtatatatgcttttgaggcaagcagtcagtgagggaatgaggcatgattacttgcaggtggctacaagcaataaaaatgcggtcaaaaaggttagcagagggattgccccactagtagataggaactgttacaacagcctgtgacaatgaagacagattgcaaacttcctacttaggcacagatgagaatgtaacacagaagaaactggccgcaactggttaaagccaagatggtcgaaaacttggctgactgctgacccttagcttcattatgcccttaatatcataaaacttccatggggaaattcccactcccatcatgcacctgacgccatgacagttccggattaaccatctttagtcaagaaaagggtggcaccccgattccgggaattgcccgcccatttcccagaaaacccctccccttgattacagagtactccataccttcattgtgcttattcatatagtacgtgaaccacattgcctgtgactcaaatctttgagtgcctgcactcctcccttgagggtgtcgttggttttgctccacaataaaatgtctatactttcgcttgggtctcattttcagattctcttatgctttgaagacaagaacctgcactgccctactggcaacacttttagataccctctgagatcagtgtgcttgtttataccagaaaaatgtcatcaccaggccccttagtcacaaagtgtatcaagaagtcatctgcggtcattttttacagtttctaggccactttctgtttccaatcagtgtagttcctatgtggcatgactcagatacaagtttctatagacattttcttctgtggctgctagtgagaacccaaaccagctcagccaattagagctccagttgtcactcctacccacactgggcctgggggtgaagggaagtgtttattaggggtacatgtgaagccgtccagaagtgtcagagtctttgtagctttgaaagtcacctaggttatttgggcatgctctcctgagtcctctgctagttaagctctctgaaaagaaggtggcagacccggtt

SEQ ID NO: 3012 - DNA, 2300 bp, Homo sapien
cacctctgtgggaaagttcaatctttcctatatctctcccccactccctagcccagcctcttctctctcttacatccaggtttccacacccctcaaatatagtaccccctttattttcactttttggagattccaagatatcaacaaaccctaggagacagaatggtctggagtcactgagatatatcaagtcaggcaagtcagacagccaaagatggtcaacacttccctgcaagaaaatcttaactatccaggcactcaagaaatgtccaagaggcaggcagaactcttctcccagaaaccatcaactctaacaaccctaagagaaaaactgtggggcagcatcctgacaatccagaaggatttccctggggaatatttcccctgacctctccatcattgcttgtaatttatataggactttactggtaaccaagtactttccacacccctgcccgtgagtttctgggtgacagagacattaactacatcacagagggctgaaaaactctgttttcaagaaggaaagattacccaaacattaaggattagcccagtgagacagtcattagcagacaaagagagctggtctaagagttagaagacatgcacccaaatccctcatctagggataaaatattagcctcacaggattggaagacactttaaaatcatattgttgcacatcccagccaacacttgtgtcttctactattaactgtcagtgtaaccttggttcagttagcctcctttgagcctcagttgtacctatataattaaggggttggaatagacattttctaagaattcttagatatctaatatcattttattctagaattctaacatttagaaatgtatttccaaaagctaagtttcagtaaaactgatttagaaagatccctttctgagatatatcaagactcggagatactcagtcacaaagaatggcaaacaccagggacttgggacacttaagccaagaccaagtacaaacaccctgcatctctcatcttgttatatctggcctcaggattgacagcagctttggtcacagacgcaggggtccttggagggtttctagatcagactcttcatccatgaaccttactaactcaaacttgagatgggcgagatctgcaaaagaacaagaaagaagaaaacgtattggagaaagggaccgggggttaaagagatgtaatagggagggttaagaaagaaaacgactgagttgctttgttaggctgccagattgggcaagagtctggggtgaaatcatgttttcagagggtgagttatttccttgacatgagattgagggagacattggttcccaaggcctgggagtttgttggaaaatgcctttcaagggagattgcctggggccacgaattgttgctggacagataactatgggctcttgggtaagaggaatcagggatgttagggtttaggaaaatgatgagagttagcaattatccactggacaggtgtccctgggtacactgttgatagggggaccccagggcttaaggccaggggccacaaattgttgctggacagataactatgggctcttgggtaagaggaattagggatgttagcgtttaggagaaggctgagagttagtagttatccactggagagatgtccctgggtacatggttggtgggggaccccagggcttaaggggatccccagttgccaaaggatggagggcggagctggaggacctcaggctagtgagcacgcccttgcccaggcctgcagtggctgcactcgccagctggcccatggccctgtccgactcccctccctccaccccaagcctaagaggggtgagcgcagggtcccactgctgagccagctccctccctctgatccacacccgagcccggctggccgagctcccgggggagagggtggaaggcaccacgaaggcaaggagggggtgtgggaggcggggggtgtggggaatgcggcagcctggcccccccgcgaccagcccagccccccgccaaaccccctccacctccaaccaaatggtttgctccgagcgccctatttaatccccgcgactgcagcagcgccggctccctcccggtccccacctcggccccgggctccgaagcggctcgggggcgccctttcggtcaacatcgtagtccaccccctccccatccccagcccccggggattcaggctcgccagcgcccagccagggagccggccgggaagcgcgatgggggccccagccgcctcgctcctgctcctgctcctgctgttcgcctgctgctggg

SEQ ID NO: 3013 - DNA, 2300 bp, Homo sapien
gttttgcagttttctaccagctacctcttgtgtaaatgaatgtgcaatccaagagctggtttagccttttccccattttagttttaggattattagtcacaactgcttctcctgttcttgttcttatatgtaggtggtggcaggaaggccaaacgtagaacaacagatatgtctgtgtgttttcagaggtaaatggtagaaccatatcagaaaagacacatgtggagtggtatgtgcagatttggggtgcctttactcctctaaatgttcgtggccctgtcagttcattcaggaaacatttaacaagtgactatttgtttttctgtgtattcaaagtaagtaaaactaagatctgtctttccctccaccgccaccaccacctcttttccttcccccatgaaaccttacgggtacacagagaccttgtgtacacaagggccttggatggtctgaactagatgaggtgtactttggctcagaaatgggaggaggggctaggggtcctcaggaaactaacactcttctactcctgcagacagccagccctggacatctgatgaaacagtggtggctggtggcaccgtggtgctcaagtgccaagtgaaagatcacgaggactcatccctgcaatggtctaaccctgctcagcagactctctactttggggagaagagaggtagtatctcatgagttatctttctccgtgaaaaccatgggctagagaaggggactgcagacaccgaggggaactgttcctgtcatccagaggctgagaaacatggtggtctgctgtttgaggatgtaacaagccatgagttccccaactggttccagtattgcagctctgatttacagcatgcataatcttacagggttctggagtgacttcaccccacaggaggaactctaacaggaagctgaagtcagtgttgccctaggtatctgacaatgaagctcacgaaatccaaactattttctgagtagctcttaggctactatgtctaatgacccagaaaagtgattgaataacttaaagactgcttaaactcaggagcagttattttttccccacccaccatactagaccccttcccccaaagaagctggcctgggattggaaggtaaacatgaaaggtgccagtaaaatcctagctttccattctcttgatttccccagcccttcgagataatcgaattcagctggttacctctacgccccacgagctcagcatcagcatcagcaatgtggccctggcagacgagggcgagtacacctgctcaatcttcactatgcctgtgcgaactgccaagtccctcgtcactgtgctaggtgagactcccaaaccccagtgtctctacagcatgcttccttgcaaacaaacctccctagatgggtccctgaagcagctgggagccaggcaagtctccaagcactttaggaaagttcagcctgtgttcccctggcaatgggataaaatgtaaaaagaaatgggttttaatcctttgtgctctacttgctgtttgatctaggacaaggttcttactctctttgagtctgaattttctcttataacagagagatgatcataccccttctacttacctcccaagatggtgtgaggaaaacacaagacatgcatgtgttataatttccaaaataagtaccccagttgcttacatgctctcatcttcatcctatatttcatcctatatttcaacttccttctttgcgtctctgagactcacactatttctgtggccacccaattgtgctgtaagtggagggtcatatatcatgcctgtgctatggcattgctcctcactgccatgctgtctcccgcaggccttcctttctggtcctcagggaggagatcaaaaagaaagatgatttatctagtcttctacccatcagaaattatagtagaacccaggtacgcagagaagccatctccacagggagagcagaagtgtgaccccatggggcctctccttcctatcctggccatcccctatccatggcaggaattccacagaagcccatcatcactggttataaatcttcattacgggaaaaagacacagccaccctaaactgtcagtcttctgggagcaagcctgcagcccggctcacctggagaaagggtgaccaagaactccacggtgagtacctcctgccttggggttacaggagaaagtggtgctggaaagagagagaagtgcctgtctgtgaacgtacacaggaggcatggtatggaagagaaaaggggaatgacatatattttgtgtgcactcaagtgcct

SEQ ID NO: 3014 - DNA, 2300 bp, Homo sapien
tccaggctggagaggcaggagccctggggtgagaaaagcaaaaaacaaacaaaaaacaaaaccctggagtgttaggaggagagtgaaggtagaggggtgaggaagggtaaggggcagggctggtttcagctgggggctctcaccagccctcctttcagcctctacaacagagcagcttcccagacttctccaggaacccagaaacgggatggttgtcggcaaaggttgggagtggcttttcctctggtagccacacacctgagcactacggacagggaggcaggtgccaccttgacacctctcttccatagcaatgggaaagtgatgagtgcgggagtcctgaggagatgtggcctgcagacaacatgcagccatgcagggacccaggactgtaacctggggaggacgcgggtccctgcaaggaagagtagatttggagaggaaggatggaggtggactctcaccccattccccccggaaatgaacaaagccgggccctttccataggaactgcccttggagatagcagagtgtggctgcccctccttgctccagcagcagtgggagaggcactgctctggggcctgaactgcctctgcttccccccctgaggggcccctcactcttacccaagactctggattgttgcacggcaaccactcctcccatggcattgctcagcaactacttctcccttcccggccaccctgtgcccccttcctggtcccaacgccagcccttcatccttcctccctcagcagccaggcagacataacaacaaaactactaaaaggagcttcactgcagtgagctgtttcctgcccaaactaagggaataatgtgaactgtgtgcatgtgtgtggtgtgtatgcatgtgtgcatgtgtgtgtgtgtgtgtgcatgtgtgtgagtgagtgagaggcagagcgaggaactgaggaggagggctaagagccaggggtcctgggcaagtggacagggctgtgggacatgttggggaggctttgggaatggggtattcctagtcagggttcacacctcacctgggatgttgttccatgctggtatttcctctgccacccccaatgcccatcggtcttggagaaaggagtccccgggtgtgtgtttgcccagctgtccattctatctctcccttaaacacagagcattcagcccttccctggatttccctcctctgagccatggagtcagtgccacagcctttgctatgcacctctcaggcctctccttggcgttgaccctggaaagacctaccaccacctattttttcccatagtctgtacccagtgagttgaaggctgggtccccacccttccttttgatttcctgtcttccttctcgtggccccagctggttgctgtggagatgaggttcctggtcctccctgtcctggctggactgccccgcctcagatccaggatgcccttggcatcgctcccaccctcccccagcttttcctccctggtctgacaatgggcatgcaaaaaggggcagctgcaatctagcaggcctgcccacccccttcagttcaggtaatacagttgtgaatcttccagccgctggttagggccttgggcaccacaggcagcccctcacctaagccggggcctactcctcttacaacagcaagagagccctggggccccaggcctgttgagcttcttgtctcccagcacccgcttttgggaaaatgacttttcctcttcaagctgaaccactctgtccatattacacagaagccatatttgtacgggggggtgggagggagaggggctgttgtgctgtgtgtgtctgtccaggggtgggggggtgggggaagggagcagggaggggaccgtgtatctttataatctttctaactctcctgtgctaatctcagaggggtcaccctcaatatatctggattatccgtgtcattcagctgcctcctttctggtcctcttgctgctgctgggatgtgtgtatgtgagggtcttcttcccataccccttgcacctggtgcctggtgcctcaaaaggtggtgtgtcccttgccaggccactctcaagaatatctatgtacagcaacaatataactctacaagggagagaagtgtgttcacttccttttgctaagcccttcctttccagagagtgtcttggggggcatctgactgcttccccccaccctctgccaggcattgctggagaatgttaagacggcgatggagatgccatcaaccccaccctgcagagcatcaccagacaccaccagaccaaattcactttccagccccttca

SEQ ID NO: 3015 - DNA, 2300 bp, Homo sapien
gtggaagggcggctgactctcactgctcctccatccccttgaactggatccaaggaaaggcagttcaaaagccatgtgtttgggagaaaggtggtggtggtcaactctgtcccaactgaggggtgtgtgcacgtgggcgtgagctctttgtgtgtactgaactctgtgtacgtttgctgtgtatcattgtgcacatatctgtatgtgaggggcttggcgggtgtctgggtgtgtctagctatctctaggtctgggtgtttcagtgtgagagtgggagggttggggtggctgtcgaggctgcataatgaagccatttcagggagctattgggtgtttgcctagccacctatgggctcagtgcatgcctcttgcatatgaagtggaatacatggtctgacaagttaaagtaggctctaggggacaatgggacagcatattttaaaatgggaccattgcccacagggtgatttctattcatatttctactgggggacataaagtctctggaactgtttcattggccaggcatcttagcaatatgtaaagtttctcactgaggggcagagctggccagcagagagaaagggcatctaccctgcaggcaggccgattctcccaagcacatttcacttttttagtggcttcttccccctccctcccctcctcagctgtttccccaggatcgtcactgtttcatcacccctctctgcttttatttcctcagctagggagacatagtggggactttgggagcggtgagccatggcgtgtccaagtcagaacaatgagatagaaagggctggttaggggacgctgtttcatttgtccaaaacagcatcggctgcttcatctccagtgttgttaaggaccttctgtcccattcatgtagggcttcctagggggccaagcacctcagacctaaggtgcagaaggatgggtacctcgtagagatttcccccttttctcccaagacactagctcaagtttcaggttcaacatgaaggggctggaaagtgaatttggtctggtggtgtctggtgatgctctgcagggtggggttgatggcatctccatcgccgtcttaacattctccagcaatgcctggcagagggtggggggaagcagtcagatgccccccaagacactctctggaaaggaagggcttagcaaaaggaagtgaacacacttctctcccttgtagagttatattgttgctgtacatagatattcttgagagtggcctggcaagggacacaccaccttttgaggcaccaggcaccaggtgcaaggggtatgggaagaagaccctcacatacacacatcccagcagcagcaagaggaccagaaaggaggcagctgaatgacacggataatccagatatattgagggtgacccctctgagattagcacaggagagttagaaagattataaagatacacggtcccctccctgctcccttcccccacccccccacccctggacagacacacacagcacaacagcccctctccctcccacccccccgtacaaatatggcttctgtgtaatatggacagagtggttcagcttgaagaggaaaagtcattttcccaaaagcgggtgctgggagacaagaagctcaacaggcctggggccccagggctctcttgctgttgtaagaggagtaggccccggcttaggtgaggggctgcctgtggtgcccaaggccctaaccagcggctggaagattcacaactgtattacctgaactgaagggggtgggcaggcctgctagattgcagctgcccctttttgcatgcccattgtcagaccagggaggaaaagctgggggagggtgggagcgatgccaagggcatcctggatctgaggcggggcagtccagccaggacagggaggaccaggaacctcatctccacagcaaccagctggggccacgagaaggaagacaggaaatcaaaaggaagggtggggacccagccttcaactcactgggtacagactatgggaaaaaataggtggtggtaggtctttccagggtcaacgccaaggagaggcctgagaggtgcatagcaaaggctgtggcactgactccatggctcagaggagggaaatccagggaagggctgaatgctctgtgtttaagggagagatagaatggacagctgggcaaacacacacccggggactcctttctccaagaccgatgggcattgggggtggcagaggaaataccagcatggaacaacatcccaggtgaggtgtgaaccctgactaggaataccccattcccaaagcctc

SEQ ID NO: 3016 - DNA, 2300 bp, Homo sapien
gctggactgccccgcctcagatccaggatgcccttggcatcgctcccaccctcccccagcttttcctccctggtctgacaatgggcatgcaaaaaggggcagctgcaatctagcaggcctgcccacccccttcagttcaggtaatacagttgtgaatcttccagccgctggttagggccttgggcaccacaggcagcccctcacctaagccggggcctactcctcttacaacagcaagagagccctggggccccaggcctgttgagcttcttgtctcccagcacccgcttttgggaaaatgacttttcctcttcaagctgaaccactctgtccatattacacagaagccatatttgtacgggggggtgggagggagaggggctgttgtgctgtgtgtgtctgtccaggggtgggggggtgggggaagggagcagggaggggaccgtgtatctttataatctttctaactctcctgtgctaatctcagaggggtcaccctcaatatatctggattatccgtgtcattcagctgcctcctttctggtcctcttgctgctgctgggatgtgtgtatgtgagggtcttcttcccataccccttgcacctggtgcctggtgcctcaaaaggtggtgtgtcccttgccaggccactctcaagaatatctatgtacagcaacaatataactctacaagggagagaagtgtgttcacttccttttgctaagcccttcctttccagagagtgtcttggggggcatctgactgcttccccccaccctctgccaggcattgctggagaatgttaagacggcgatggagatgccatcaaccccaccctgcagagcatcaccagacaccaccagaccaaattcactttccagccccttcatgttgaacctgaaacttgagctagtgtcttgggagaaaagggggaaatctctacgaggtacccatccttctgcaccttaggtctgaggtgcttggccccctaggaagccctacatgaatgggacagaaggtccttaacaacactggagatgaagcagccgatgctgttttggacaaatgaaacagcgtcccctaaccagccctttctatctcattgttctgacttggacacgccatggctcaccgctcccaaagtccccactatgtctccctagctgaggaaataaaagcagagaggggtgatgaaacagtgacgatcctggggaaacagctgaggaggggagggagggggaagaagccactaaaaaagtgaaatgtgcttgggagaatcggcctgcctgcagggtagatgccctttctctctgctggccagctctgcccctcagtgagaaactttacatattgctaagatgcctggccaatgaaacagttccagagactttatgtcccccagtagaaatatgaatagaaatcaccctgtgggcaatggtcccattttaaaatatgctgtcccattgtcccctagagcctactttaacttgtcagaccatgtattccacttcatatgcaagaggcatgcactgagcccataggtggctaggcaaacacccaatagctccctgaaatggcttcattatgcagcctcgacagccaccccaaccctcccactctcacactgaaacacccagacctagagatagctagacacacccagacacccgccaagcccctcacatacagatatgtgcacaatgatacacagcaaacgtacacagagttcagtacacacaaagagctcacgcccacgtgcacacacccctcagttgggacagagttgaccaccaccacctttctcccaaacacatggcttttgaactgcctttccttggatccagttcaaggggatggaggagcagtgagagtcagccgcccttccactccaatttcccagcacctcccttatctctgcctcacaagtcacccagcccccctctcttccttccttgtgcttgaagaatctctccttgctggaaagccccctgttttctcaatctccctttccacttcggtaaaatctctacttgctggaaagccccctgttttctcaatctccctttccacttcggtaaaatgcccactttctggtccccacctttttcctgagtgtagtcccaaccagccaaatccaacctcaaaacaggaagacccaaggccagtgacccccataggcctgaggcttgtgcaggcagtgggcgtggggtaaggcttcctgatgccccctgtccctgcccagaacctgatggccctcattagtccttggctcttatcttggaagcacaggcgctgacagccg

SEQ ID NO: 3017 - DNA, 2300 bp, Homo sapien
gcatatataaatatgtacatgtagataaacatatttatatatgtctatatacacattgttatatatattatttcatatattgtatattatatataaatatataatgtattatatatgtatataggcatatttatatatgtatgtatatttatatataaatataaaattatatattatatatgtgtgcagatagataaagacttgcctctgaggaaggaaaggatgatttattaggttgtaacatcttgatataataatcaatgaattaattgctcatttgcctctctaataaatacatattaaaaatctaagcatgctctctgctgtgctgagtatcagataaagagcagtgaactaaactaatatagtcattgacttcaatgaggatgtgataaggagctagaccaggaaagatgcaattttcatatattgtgatacatgctatgataaggtaagaatggagtaatatgggagcaataagtaatcttctggcatgcattttaatatatgaattgcttacattcaccagaaagtgaaagccatatagaaatgactggtctggtacacttactgttaaaaatgaatacattcacatactaagttattttgtaagtttgagtaatgtctcagagactggtcagctccagtgagtttaccattgagatctagggcttgcatggtagagacacagaccctggatcatgggggctacaccaagatttttctaattaccaaattcatcggactattcttggttctttccctacttcataactgaaacatttaacactattaatcactctccctcttgaaatgctcttctgccttggttttgtgacactactatctcctggtgtttctgttagagtttactggatgtggtcatttagtgtgtagtgtgcatctgtcagtctgcactgcagaagcgatggtgaatgtcatttactctggtaattcagttaacctgggttatcaacagagctctactgcactcttatcatttcagtatgtgattaacctaaatattttaaccatccactaactctatctcatcattctaatttaattctctctgtgttactacctggtatattttgttcaataatttgttcactttttaattgactttctccccatgatggactataataatccttgagggcacctgttctctcatcctttccttggtcctgtatcttcaactaaagcagcagcagaaacaacaacaggagcctcacaatttagtactgcattttccactaattaattgcttagatatataattctcacaaaacattctgaggggttcgggcttctcaatccctaaaatgaagaaatttaaattggttatgactatgatcctttcctttttaacatttttcctatactttaagacttatgataaaaactcattaggaaactagaaataacatgtcttccccaagtcacttctaacaaatatcccatggttatcgtcagtcctgccatctttccactattctgcttccaactcctttctttctttgacttccactttcaaatctatcacgacctcctgctgctctttcttttctgccagctcagagtcagaggcatagaaggcaaggttactgtagatcttgaactgtcaacctggcaggcaagataggagagtgaaggactcatcaactagccagtagcagtcactgctctttagaagccaccttaggaccaaattgttcaagtaactgaactgttatcttcctgaactcctgcaattctaattgccagaaaacatctagatgttgggcctgcagaggaccttagcacacttgtagtacaatctttccatttcatacacacaactgtgttgaaagaagtctcaacttgtgaggtgtaaacatgaaatcattatttttgaaattactactactgctgtggacccattcttcttgggcagtagcctcccttaatgacttcttagactaattccataaccttttaatcactttatgctactaaaacagtctcattggagttattaggcacaatcaaatctaattaattttgattttataaaattaatcaatttaattttatcttctgttcaaaattcttttcagtctccagcatcctccacctgtctaccaccgagcatggggtaagtttatggctccagtggcttgttatgtgttgggaggtaaagggtgatggccacactactcacatccctccctcttccagatatcagccccttccttgagagtaggaagaagaaagcaactctccatgctgtattagctgtcggctccttgttttgt

SEQ ID NO: 3018 - DNA, 2300 bp, Homo sapien
tctcccatctaagtaggagctatttagataacgacttcagaggaagcctttaaatagactatttgagtcatggtaaaatgactctctctgagggacaatttgattgtaggttcactgtcctaggaaaaaggaacccaaatttcccctggcaaagtctcaacaaactggtaaagtagaatctttccccgtctcttccagggcttagggcttcaaatattgccctctgacagcaccttaaaaactacatcttccctatttcctcctccttctcttctccaatcctatccaacaactttctgcattctgttctttcctgattatgctctcttctttgtgactgtggagaggattgagattgcgtagatatattaaactagcataagatgttgtttatcaaattaaacatactatgtaggttgacaataactttaatccagtcaaaattcatatttctcctataagtctttaataaataatgataataaagaagacaaaaaatgtatttattgaccatatttcacatgtcagatgctgtgcaatgcattttacttcttttttatcttattaaatctcataatataaccatgacctggataccattattgtccctattatacaggtaaccttcaatcacataaaaattaggaacatttgaattcagagcttaaaacacaaacaacttgtacttttcaaaataacttgctgttacctttaaggtctgtcattaaaacatagcatgtcctgggctcagtacctaatctttcttatctgaaacttaaattcctatttattaacctttttagccctatattttctaattccatagaaaactaaaggttttggttagatcttcatgtggaatgactggtttcattcaatagacttaattcagcagtctgtggggaagagcaaggtatgatagaatggttcctcaagtgcttcagatgtgaagtgggtttaaatatactgtccctgtcttcttcagagttttggtaaagataaaataggacactcatttaaaagcaatctttgcaaatgacaagccactatagacattaatagagttttcatttccagtattatcattaatatcagatcctggaagaaggttgagccttgacctagagcaaaaaaacagaagaattagtaaaggaatcctggagaaagcccctgctgtgtatttaaaggagaaagggagatcatgttgggaaattataatattaaaagtaaacaaaagctaggaagtaaaataaaataaattatatggcctagatccccataagtaatggtttaacttctgccttcctgtgttctgagccagattagggcacagtagagaaagaggagtctctgaaaatgtttccaatttcgctggtcagacagcggatcatcagtgaatcagatgaaaatttgtggatttatgcactaactgatcagcaggaaattaaacaagaaaagcgttggtagctctggtgaatcccaaaagaatttggcagttgctagccatgctcctgaatatgtataaacagtacatcatatgactaagagtttgacttaggggttagattttatgtgtttgaaccccaaattagttatttaatagttggcaccccaaaacaagttacttaacctcactaagattcagttttcctgtttataaaatgtagatagtgatagtatgtactttataggattattgtgaaaaataaatgaaatatcagatttatttaggataacacctggcatatgtttggtattcagtaattagttgctgctgttttattctgctctcccttgcatcccacttttctaagttgtaaactaaatagttgtacacagattgacagattaagaaaggcttgtgattgtgctagacctatgcctctctctcaccagattccaggtgtatatgtggaggtgggatagggagtggagtaagtgggtaaatattaaattgcccagttgggcaccatcctgaatattatctctaaagaaagaagcaaaaccaggcacagctgatgggttaaccagatatgatacagaaaacatttccttctgctttttggttttaagcctatatttgaagccttagatctctccagcacagtaagcaccaggagtccatgaagaagatggctcctgccatggaatcccctactctactgtgtgtagccttactgttcttcggtaagtagagattcaattacccctcccagggaggcccaaatgaatttggggagcagctggggtaggaacctttactgtgggtggtgactttttctaggacatgtgcaaactat

SEQ ID NO: 3019 - DNA, 2300 bp, Homo sapien
atacataatgagacctccaggtacctgatacctgcatcctcccagccccaggggggtggctgtcagaatgtcttcagggagtgacccccagaagcccagctgcctgatcctgggagagcatctcctctggcttcaaagacttttccacacagaggggttatcaagaatgcctatgactctcaaacctgactatattcctactagtgtgtgtttatgccctgcctgctcagcctcaggtcctgccgtaggcactcttggtcaccttgctcaccttggtcaccctatgcctatccattgtggccaagggagcctgacatttcaatctttactcctcggcctcctccagcccagctttcccgttgtgcctcagtgctaagcagagtcatgtgagtggtctttagaagaaggactgaaatggggctcattacatatgagctgactttaatttattgtagtatttcaggtcctatcacagctggacaggtcttcataagctatatttgctcttccttccatttcctttgaagaattatagacttccaagagtggggaggatgctaaccaaatcataatagccattcttctacctcaagacagacaagtttcagccagataagatgatattttagccgtgtgtttctcaatgggaactttattggtatttggaagaagggaattcttccttgggcagaatcaccacaagttttgcaggacatttcacatcgtgaatggccaagagcttctgtgctcattattgtaacagttaaaagctctgccaagcatttctgatttcaccatagaggcaccataccactccgtggctggactactacatagtttttgctcagaagcctcacagaagacaaatgtctttagacatatattttagtatcaaatgattttctttattggaaaatattctctattgcagctttactttctttttagcattcttagtgtaaatgattaacagctggtcatcaacttcttttaaatagatttttatgaacttgaagaaagtctccgtgcgtactaaccttcatcattgatgtgatttactttatgcaaaacttctctttctgaatatgcataagcaaatcagaatataatttaaataccctagagaagcttactgtttaaagagataaaaatgtgaaatattacataaattgaactgatccccttccttcaacaaaatgatgtatctttggtgtagctgtttttttatattcagggtttgcttttgctttaggtgagggacacttaaatttgctgtatctttcctgatacaattgtttatctctgcagagtgggtgtaggcttactcacaaagttgtattggctataaatttgccttctagtttagggaaggtaaagatgtagcatagtttataacatacgtgaatcagtgctctgaactgtcagcagacttccatcactcagacagaagtggggagaggctggtggttggctaagattttcctttttcttcttgaagacaagatgaacctttctactttgcttctaattcttaaaggatgcgcaaggaggatgattcatagtcttgaaagaaaagacatcactagtccatccctaaacaaattattttcaagcacccaatccatgcataatttggagctagtgaaatatgaaaagatgtaaaaggtattataaagttgctaagtgtttgtatgaggtgaggcagcaataatggggtaaaaataatccaaataaacatgagaacctctgagtgtaatacggttttatgaaggcctgaaaatgtgcactcatctctgaagagtaggaaagaaataagaggagaaaagagaagccattccagatgtcagggaggaagagtagatatgaagtaggagcatgtatggttatacagtgaaaaagtgagactatatgattctatgatgcatggaaaattataacagatggtcacagagtaaaaatattttaagtaaagataagtaaacccagggattaacttaatccactaggaaatacatcaccagatttgtaactgagaactattgaacttcaatcaatttcagaaatgtgcttctactgctttactgggactatgtgacttttatgcttttatgtttcagatttgggaaccaatccatgaaaagagagaactttactctcatcactgactttgttttccaaggtttctctagcttccatgagcagcagatcaccctttttggcgtgttccttgcactatacatcttaaccttagcaggcaatatcatcattgtgaccatcatccgaatggatcttcatcttca

SEQ ID NO: 3020 - DNA, 2300 bp, Homo sapien
gaattttggagtaataaaaacaaagtgttccatcgtatattcatttactaaaaatatttatcaagagatgactctatgttagtaactggcaaatgttataaataagacttgtaaggctactactctcatagaacacagattctagagagaggagttagataattaatacatcaataaatgagtaaaataaatcttataaggacaataggatgataagatttgtggcaaggaggtattttagactgggtagtcagagaaggcctctctttggaagcagcaactgagaaggaaacatcatataagtgaacagatagaggccgataggtcataatttagggcagctataggtaatacataaaggaatgggtgtgggtgtgtactaataagtcttgcttttttttttttttttttttttttttttttgagacagagtctcactctgttgcccaggctggagtgcagtggcacaatcttggctcactgcaacctccgcattccaggttcaagtgattctcctgcctcagcctcccaagtagctcggattacaggtgtgcgccctcacaccaggctaatttttgtatttttagtagagatggggtttcaccatgttagtcaggctggtctcgaactcctgacctcgtgatctgcctgcctcagcctcccaaagtgctggaattgagctatctctcccgtgtaagtctttatttagaaaaacaggcaggggtgcgggagtcagatctggcctgcagaggaaagcatttcaggcaggaggaatctgggaagttgaaaggccaaggctgggtgtgggctttgtattcttgtattcttagaaagtagtatggctggaggctagtgagagtgagagtgatagggtgttggagacagaggtacaggccaggtcaggtagggctttttagacttatgaagaaatttacattttattctaaatgcaaaaggaagccaccagaatgattcacgcagggaacagtgacacaatctgatttatattttaaagaggctctggttgctgagcagttactatttttagggaagctaaagtggaagcaaggagagtcaggaagctgttacagtaatcctaggaaaataccatagtgaagacagggagagctggaagtgtagcagtttgaatttctctcttcatggctccttaactatacatgaactttgaacttcatttccttcatcagctaagtatagataaaattcctattctctttgttaggataaaataagcctataaggcaaatgtccaacaaatggttagatgtcggttatgttagttctttctttttcttctttgtctaaagctcatacattttttttcttccttctcccctttctttctttttctcctttccatggatatttgtctccttccatagatatttaatggtgaactggtttgtgcaaaacacaatacttggtagtggaagatatagagagatcttgtttttaaacatttattgacttatatagttgggtgctcaaaaaagcagaacctttagttttccctttagtttttcttttctttacttttttagtaaggcaaactgccattttaaagtcctagctagttatataaataataatgaagaaaaaatcattttggagaagatcttagttttgggcagaatcaactaagggtgatatacaaaaaactccttacattaaaacaaaaattaatttaacattggttctgagaatatactggaagttttatcctgggaaacatatgtacaatttttttttttttttcgtgacaaatatgccccaacccacaacccttgtatatatgcagcacaagattactggggacgatgaggttattaaaatagccactgtaattaaagtggtcttgatatggtttgggtgtgtccccacccaaaatttcatcttgaattgtaatccccataatcaccataatccccaaatgtcaaggaagagacaagggggaggcaactgaatcatggaggcggcttcctccaagctgttctcatgatagtgagtcagttttcacgagatgtgatggttttataagtgtttgatagttccacctgtgttcattctccttcctgacaccctgtgaagaaggtgccttgcttcccctttgccttccaccacaatgctaagtttcttgaggcctcccgagacatgctgaactgtgagtcagtcaactaagcctctttcctttataaattacccagtttcaggcaattctttatagcaatgtgaaaatggactaatatacaactgaagtcatttggtaaaataagcttcaa

SEQ ID NO: 3021 - DNA, 2300 bp, Homo sapien
atgtgtaagaaaaattgttagatgaaaccaatgatctaaatataaataagtcctaatacccagattcagtctagaagggattcaagataaatacaataatatctataatatgagacagatagtggtaacagccataaaggctctaaaatgatggtaataataaccatccagatactgttccatgtactttatgtatatcatagtatctcatttatccttagagaaacactgtgaggtagatagttttatctttgtttcacagagaaggaaactaaggttcagaggggtttagtgacttgcagaatagtcagccactagtaaatggcaacattggaattctatcccaaagtctttgatcttaaccttatgggaagtacgaaagaggggaaataatgtatagttgggatattagaaaagtcttcatgaagcagattgttttttattttttatatttttgtataaattcaaggcatacaagtttagttttattacatagacagcaataacataatagtgaagtctgggcttttactataaccatcacctaaataagcttgagattaatgtggaagaatggctggaattcctagaaacaggaaaagaaaataagagagaaattcaagacagtatgaaggcactgaatagaagtaatgaaatcaagaaagccaggaaggtataaagaacaacaattagaggtgtttgactggagaataggattagattctgagataatagccaggttagagccagattgcaaatggcattggcttccaagcaaatggtctgtatttaattcaggagtcaatagatgcataatcccaactttatcactaacctatactgtgcaacaagccagataaggcttcacaacctgggattccatttagagaaaaaaagtagagaatggaaactccccagggatgagaataggaaggatactttgaacaatgatagagaaagtgtattcttggtggcagtgattgtgtcattgaaaaggctgattaggtctgtggtgagctaacagaagagagagtgaacaagaggctaaacagtaggatgagaaacaagacaccatataattcagggatgagagagaaagaaataatgtggctagaaagaagaacttcagtttgatatctcagaggcagagaaggtttgagtggtggttaataaactgtacagagagagaatgaaggagacatagaaagaatgaaggtggagatctctggggctgtgagagagccagtgaccactgaatccccagcacctagtgtagtaactgagagctagtgaataaatgtattagtggggtcatcaccaaagatggattagatatacactcaatgaccaaggactcaaagaagaggagagaaaaacttggggagatgctgacatctctgcaggtagcatgaagtaaccagaaaacaagtcgtaatgagaaatggaaagatctaggataaggaagcaccatgatatgcaaacgaaaaaaaagcactgagtagaagtagcagaaaaatactaagcttcatggggacagaaagtttattctccaagtccctctttccccttagctttgcctggatgtattacttgatgttgaattagtcaaagttgaaggcactttttagggtcttcagcagaaagcagaatcctagaatatcctacaaatacaagacaacttgagaactataaaagaaagaaaaggccttgttcccatagcccacaagagggctgagctcagcgatacactctgtgtggctcaggagcttctggcagagcacagagccatcagagagggggcccagagagcagagagaggctctgctgacatggccagcccagcgcctcatcccatccataaccctgctgccctgcaatgactctcttcccagcaataaaatctgggtcacaggagttggagctctagccatcacttgtctctaataaataactcccattgattttccagctcagggctcaccactccttcaccgtaagcgccaggaggcagacctggaaaatcactcacatattattggtgctcttcctcccccatcctcacccaaggtgcatataaaccctgaataacctgaagtctaagggcatgaatatcagacgctagggggacagccactgtgttgtctgctaccctcatcctggtcactgcttctgctataacagccctaggccaggaatatgaacaagccgctgctttggatctctgtcctcaccagcctcctggaagcctttgctcacacaggtaaggaggtgaaggaatggtcaagaatcataaagtgaga

SEQ ID NO: 3022 - DNA, 2300 bp, Homo sapien
gaagctgggtaaaataagaacagaaaattcattattagatttaatgagagaggtgtttgtttatgttggcttcactagagtggtgaaggccaatggctgatttccatggattgaggagggaacaggagatggaaaatagaggttgtcaacccacgtaaacttttccttccttcctccctctctccctcccatccttccttttttctcttttctttcttctttctctaaaagattaaatatattatagtatggttttgtggaaatgatcaagtaaagatgaataaattaataatacagaagatagagaggatacctataggagcaaaattccttgcatagtcgacagggtctgggatccactgaagaattgcaagggttggccttagatgtaacacagggagagctcatcccttttaatagaggaagacagaaaggctggtacattgggttgtaggaggatatataaggatatcagttaggtgttaagaacagaaagactgagttaacagtgatttaacaaaagaggagagtatttctcctttaagtaaattttcaggtaggcagcctagagctgatgcagtggctccatacccaattatccaggctccatctatcttgttgccatgccaacctcaacatgcagcttacacttgctggcctgaaagtgaactattccatctcctgctatcatgactgaatactagtcaaagggaaaaagggggaagtgggaggggaaagcacatacctttcttaaagagcacaacctagagatggtccctattctgttcatatctcgttggccttaatttaatcacatcatcactgcaagctacagtgggggctgggaaatttggtgtttgaggggatgaccaagcgcccaactgaaaatgttattcttctcttatgagaagtagagaatggatgttagggaatggctagaagactctactacaaaggatacggtggttcttttctgattgcttctaacttctcaatgaaaggtgagttcatcagctgaatgaaagaataaatgagattttggggacttgaggagcaaggagaaggagtataatagtcattttgaagagtgagttaagtagggaactgtagtaagattgacagacagtgtggagggattacttgaatcttgtgaatagaggaaagagtagaatcagattatcctgactcctgcctgaagctttacatattcagagaaaaatgttggaagaaactttgatataatgctatgtctgtgatcaggcacacattttactggacttttactgtcagggccgtcatttagtgccaagatgtctagagagttcttaataagtgtactcaattggctgagaaaatgtgtccatgcaaaaaaccaaacaccgcgtgttctcactcatagatgggaattgaacaatgagaatacttggacacaggaaggggaacatcacactctggggactgttgtggggtggggggaggggggagggatagcattagaagatatacctaatgctaaatgatgagttaatgggtgcagcacaccagcatggcacatgtatacatatgtaactaacctgcacattgtgcacatgtaccctaaaacttaaagtataataataataaaaaaatgtgtccatggctctgggaggagcatgtttgttttcctcatttcccagtctgtaaataagcaaattgaaaggggttagtgataatgtccatctccagaagctgtcagatttcctttgtcaaactctatgatttgggctgaagtaggtgttggagaggcagctaccacgtgcacccagatggccactcgtttaatatgttaccatttcccattattttcgcaggatagatagccaaagtggagccctgagagatttcttcatttttcctgtcataaagaattggtaattcagtagtcataggagtttgtaataaataactcacattgatttctctgttctgaaataattttgcttcccctcttcccgaagctctgacacctgccccaacaagcaatgttggaaaattatttacatagtggcgcaaactcccttactgctttggatataaatccaggcaggaggaggtagctctaaggcaagagatctaggacttctagcccctgaactttcagccgaatacatcttttccaaaggagtgaattcaggcccttgtatcactggcagcaggacgtgaccatggagaagctgttgtgtttcttggtcttgaccagcctctctcatgcttttggccagacaggtaagggccaccccaggctatgggagagatttgat

SEQ ID NO: 3023 - DNA, 2300 bp, Homo sapien
cagggaccctgggccctttccactctgggtctgctggaagggaagggcagagcttcctaaaaagggagccaactggcctctccacatggaggccctaatggtttgatggatgcactgctagccctgcagaaacccacaagagggagagaatcattggtaggggactcagggaagaggaagatctcggtctcccaaaaaaattttctctttctggagaatatgggcttcgagctggatatcaaggaggcaaagaaggagcacataggagggtagggagtgaagtggaaacttccctggtgagtaggggaagcaaagaaaggagaacaaggcaaagggactaagaaaagattaacttacaagaacaaatgctagagtcttgtctccagaggtagtgcaaccagaaatcctgaagagcagttgaattgagaagagaagtgggaggtcagggggttgggggaagaggtgactggtggctgagaggccatggctgggaaagagagaaaggaataaactggggagggctggtaaccttgataggaatttatgtaggaaatgagagtgcaaacaggaagggcttaatgagggctgtgattgtctggaaggagaaaaaggggagatttggcacctcctggaacctggggaaagtaattgtctgggtaaatggtaagtgtatttcccacagggtcagagcaggctttgatctttaggagaagacaaattgctttccatcttgctgaagccaaaggcttaaatggtcagacgtgtgtcataggtgggtgcaaagggaaggaaatataatacatcctcatggccaagtgccctgggcttggatcactgtgtccttggccaagttaaccaacttctttaagcttccaatgattcatgtacaaaaaaagatacaaaaatacctttcacatgtggttcttccagaaagcgcttggcacagggcctggtacataaacaaattcaataagggttaactattttcataattacagttagtctgcatcgctagaagcacattattcaaatgaggatatggactggtcagatgacagtggaaacggtgttcagatctaggggcccccacctagtaagaacaacactaatcaactctagcctgcccaggggacagtgacccagagaactaggaaaccttgaaaaatgaagaaatatgaaatactaataaaaattaagaaaacccacaagcgtttaacccagataatatttggggacatgagggggttatgtgaagagaaaacaatgttccatttaactttaggaaatggcgatattattaaagattttggaggcattagtcatcatcctttggtcaagtttattaacctctccagtgcctctgttttttcatccataaaatgggattcactagatcacctatcttataagattactgtggcaattaaatgagtcagtatgtgctaagtgcttagaagactatctagcacataataaatgctcaataagtcctgaggagcaactggattgacaggagaagttggtgctggttattattattactataattattaccctgggtaagtttttaatagttccagcaatgaaaaaatgagaatagcctccttgcagcagtaattccctcttactggaacagttcaaaaagtcgctgataacgaccagtcaatcattagagaggagactcctcgtcctgggagaaagccgatttgtcatctcttaaaccccagggcatccagcgtgaaggaggtagaactaggccggcccgcgaggaggcaggggcaggcgccagtgacgcaatgactgcaacatgccgccagggtgcagcagagcccgaccccgggttgttccatccgcagcaaacaattcctaactcgctccaggtcttccttcttagctgagtgggttgaaccccgtggaagtaaccccccgcccattatgatgatccagccaatcaccgcgtgatctgctcggacggggcgggatcgcggcgcttccctcggtcgctcagagactgggttccgcgttccagccccgccccaggttctgggccaatccccgcggctgggcagagcgacccgagggcggcgccctgcagaccacgtggcccgggaggcgccgaggccaggtaggtggtgagttacttggctcggagcgggcgaggggacgcgtgggcggagcggggctggccagcctcggcccccatgacccgctgtcctgtgccctttcccagcgatgggcgtgcagccccccaacttctcctgggtgcttccgggccggctggcgggactggcgctgccgcg

SEQ ID NO: 3024 - DNA, 2300 bp, Homo sapien
tggtggtataaggctcctcagaagtcagaaaagaatccaatttcaggtggagggtcaaatgtacaagataccatgtgtgcaaaagtgtaattctctccacaatactagaaattggatgtcattattactgtgttacaaatttaaaacctgaagcttagtgagattaagtcactgccccaggttccttgcctagtaagctgcatagccaggactataacctatatttttctgactccaaaacgcctaacaattatacttaggtgctaggcctggagacgcaaagatgatgcctttgaagaggtcatatgctaaaagtgtagagagacactaaaataaacataacacagtgtgataaatagaataatggagacacgggggaaaatgctttaggaaccacgaagactataccccagtataggcccgtcaattcctgaactcatggaggcaggggtggactggacatacagcaagggctaaaaagaaatacaaatacctggatggatggatgggtgggtacacagagaataagagttcagtatgaataaagattccctccttagggcaagtgtggttcatgtggccacaagaggtcgctcagatctgacacaaatgaagcttttttccattggtgctgccatgctctctccagaagctttctggaaggaaggggttagaatggagagagggaatgagggtggtgaccagatgctccatagcgttttctgccctctgtaggccagacccagagcttcatgcccaggctggctccattttcaccctactcctggtcatttccactcctgtcctaagttctaggcttttgatatgtttctccaatgtgttctgtctttcagatgtaactcagaaatggtcttaggtttctcgttaggcctgtagttccagctgtggatgagactccaaccccaacaggctttctggctgagtgcctttgtacaaattacttcatctttctgggactcaccaaaaacactaaggttgggaggaagggtctggtctttaagtcttcctgacccacactgcttacaatagctcaccttcaccgaacacttcctacttgctaggcattggtctaagcctgcaatatccaagaaggcagacacttgtcacatgtagctgcttaaattttttaaatttcaactaaagtaaaaacaattaaaacttcagtttctctgtgtcatgagtcaatttcaagtgcttaatagctctctgtggccactgaactggatagcccagaaaacatttcatcatcactgaaagttctattagatcttgctgtctgagagcatcttatgtttttaatcttgtttaaccttcatagcaaccctatgatgcaggtgtaattatgtatccactttagagataaggaccctgagacacagactggttaaaaaacttacccaaggtctctcaccagattcatatccagagtgaggattcaagctcagatatttggctctagggcctaccatgcagagctgtcccctaccccaagctctcttgctctcccgtctcgcctccggaactggaatgacttatcctgttccccaaaggccattgtccctgactactgccgccctgacaactgactctttgagtgatgagagcacctgggcctggagcctcttctggatgaggatccacactctattttcatcccacctccttttagcccctgaattcccttagagtattagtgttagtatcatgggttttaatatctccactaacccatcccattctcagttcaaggtcagcctgagtcctggaagattccaaacctgggcagcagccctgttgctgttccctgagggtcaccttcatccccaagggaacaacatgcagccagctcagctcaggctcagctcaccaacacctttgaaggtgcaacagcatctcactctgcaggggaagtgcgaaaagtcagatgcagttcacactctcatgccgctagaacccggtagaagttgccagggcagaggcttcatccgttctgtgtgcaaaccacaaatgtttgcaagctagaccacttgcggttatcccctctgtctcctgccccagctgctgccctgcagggactccacacacccacaggacctgcagctgaacgaagttgaagacaactcaggagatctgttggaaagagaacgatagaggaaaatatatgaatgttgccatctttaggtgagtggacaagatttctacttcctactttacttcctcactacttttccctctttcctaaacaactgagtcaccgaaaaaaatgcctggcagtgtca

SEQ ID NO: 3025 - DNA, 2300 bp, Homo sapien
atctcactctgcaggggaagtgcgaaaagtcagatgcagttcacactctcatgccgctagaacccggtagaagttgccagggcagaggcttcatccgttctgtgtgcaaaccacaaatgtttgcaagctagaccacttgcggttatcccctctgtctcctgccccagctgctgccctgcagggactccacacacccacaggacctgcagctgaacgaagttgaagacaactcaggagatctgttggaaagagaacgatagaggaaaatatatgaatgttgccatctttaggtgagtggacaagatttctacttcctactttacttcctcactacttttccctctttcctaaacaactgagtcaccgaaaaaaatgcctggcagtgtcaaattagtttcccacttccactgagtcagacaatctagggcaagaaaacttagaaaattctctctgtccattcctggcctcagcaataggcacatcaaattccatcagactatgtagaacttctcacttaaagatttccaggaagaactttactgtcagaaaatgcttagccaggcatggtggtgcatgcctgtaatcccagctacatgggaggctgaggcaggaaaatcacttgaacctgggaggcggaggttgcagtgagccaagattacactccagcctgggcaacagagcaagactccttctcaataaaaaaaagaaaaaagaaagaaaagaaacaagaaaatgaaaatgcttcctagtattttgcctgactctgtgtttcaccgtgaactcccatgttctgtccacagaggagatgagaatgtgtgacctctttttctgttgagggaacattgaataatttccagtttttatctattacaaatgatgctgctatgagcactcttgtatatgttttttcaggcttatatgtatacatttctgtttgacatttacccaggagtgaaaatgctgagccatcagggatccctgtgtttagttttggtagattctgccaagccattttctagtgactgtaccaatttatattcccactagtggtgtacaagagttctagtttcttcacatcctcaccaatactcagtagaggattgcatggggagggtcacgggctcccccagacccagctcagtctcagctggtatcactcccttattcttatggaaggtgtagtggtatcttattatggtttaaatttgcatttccacggtgatttatgatgtctagctccttttgctatgttgatttgacacgtggatatctgcttctgtgaagtacctatccaattatttttgcccatttttctagtatgttgtctgtccttttcttactgacttgcagaaattcttatatttcttctgtgggccctttgtcagctacatgtatttaaactatctcatcacaccacagcttgcctgttccttctcttaatggtgtcttttaaggaatagttctcaaaatcatactgacagtcttaaaagcctcagatgccgaagctccatctgtgttctactccagactcatcgatgtctgattccctcctgaactgaggatcctgtgaagcatcctcagggctccacttctccatcgcattgcagcatccacacacatttacctctggagacaggagctccttggaagctgggaggtcactcggtggtcaaggggtagatgatcttagttttacagtgctgcgctgtctcccaggctgaatgacgctgaagccaagcaaattcgggcagtctctggacctttctaatggaggtgtcccataaccatgttccatcctagttccctggcataggcttgttgaagctgcagaaaatgtcagggatttattagtgatttaccgactccttcatacttagtgttcaggaaaatttattcatgtaatacttcttcaaccaaagaggaaatatcaattagagctttgtaagtttcttttccacttcctattttggctatcaagctatagcaccacccagctcaggccacccacccaccttcggtcctgaggcctggttgctctctgccggcttcgccctgacctgtttctgacctgtgttccctccgctgtgccagaacaggccccatgctgctctggacggctgtgctgctctttggtaagtcaacgagcatgggcatcccctcttggagcactaaggaccgtaagtcatccctgagacaccaagttcctcatcttacctttcccaattccagtgggtttgtggctggagctcaagacaggtgtgtgcacctgggcatgcttgggagagatgggcactggggta

SEQ ID NO: 3026 - DNA, 2300 bp, Homo sapien
ttgttcttgctacactggttataattattggtttatatataccatcttctgtgaactccttaaggtcaggggctgagcctttcatctctgtgtccctaggtcctggcacctaagtagatgctcaataaatgcctgaggaatgaatgacggaattggcaatggagtcgtaaatgagttccctcccttgccctctccacccccatgacaggcagcttcccagttctgccctttcctcagtactctagacatttccttcatatgcagtcccttctccttctcacaggaccatcacaacagacaacagctgttgttcaggttccctggcccctttgttctctccaacctgccctgcctgctgtcctcccactcctacttaaaacatgcaacagcccctctcttcaagcagtgcttccggagcggtcccccagtccaccagccacagactcacgctgagtggggtgcttgttacaaccacagattcctgggccctagctcaccctgatggcatctctgagaatccaagtgctgaacacagttgagagccactagtctccagaagaacttaacccagttttcaaggcctccacaatctgcccccaacctccttttccattcttcccacccagccctaaaggattcctgtctgctgtcccttgtcctctgtggagcctacttggtattttcccacagccacatccctgcacgctctgctctcccctcctgcccagagcccacccccaacctctggctctctcctttcctcatattatctaaaccatgcccatcttcaaggcacagctcaaattccaccttctcaagaagcgtcccctgcccagatccgcgaagccctctttcccacccacttctgaggactgactacctgtttgcacaaagtggtgtctgtctgcagataacccttcactttccttggtgtacctatctctacattttggttgtgagtacctggagggcaaaaaccttatcccaaaatcctcctgctcaccacccacccccaccccatcctatatgcctagttcctggctgagtccaaagctcagtgtccagtttgattgacaggcgagaggctgtgcaggaccagatacgatgagccacactccagactagcaggaattttcctcaggggcaacacgtcctctaaaaaccttcactggcaagaaaccaagaaacttgaagtgagaagagaaacaggatgaggaggggataactgtggcaaaatagaccacacttcaaaggctgaggttcaagttccagctctgcctctctgtgagctctgcaaggggcctaacctcactctggttttcacattttcccatttctaaccaggtaacaagatgatcctctcagaggagagttgcaaggcttacataaagccagatgtgtagccatgtctagaatgtactcactcacttaacaaatactcatgaaacatctgtaatgtgccaagcactgagggcaacacagaagggaacaaaagactggctaaacagtctgtgaaaaccagaaaactgtcatcaacaacacagcaagagtaaagagggaggtgtgggcatgcacaggacacaaggagagggcctctcacctgcctgtggtcaggaagcctggaaggatgtcctcgccgactgcacagccatgttctgtttgcaaggatagagggagcagcatgcctagtcggggtggtggggaaagtacaacacagggaagtgtgaaatcagtagttctgagaaggaggccttctggcttgggatggctggagggcagaatgactgtgggcgaccagcctggagaagaaggcctgactcaggagggcctgcatgcagagcagagttagtcctcatcctcaggtccacgggaggccacagaagcattttaagctagaatgaggatgacagatagtagtgaggcaggctgagatgcaggaaggccagcgagatccagcaaggaggatgtggcttgtgtgggggctgttgtcgccacgtgttagccaaccatgtgcatgtgaaagaggctgacttacaagaatctgctcctgtaagcccagagaggcccagggacaacttccactttattctggatgttttcacttttgggacatcctgttctgagtcaagattcctccttctgaacatgggactttccagaaggaccacagctcctcccgtgcatccactcggcctgggaggttctggattttggctgtcgagggagtttgcctgcctctccagagaaagatggtcatgaggcccctgtggagtctgcttctctgggaaggtaagtggggc

SEQ ID NO: 3027 - DNA, 2300 bp, Homo sapien
atgcaccaccgcacctggctaattttttgtatttttagtagaaacggggttttaccatgttagccaggctggtctcaaactcctgacctcaggcgatccgcccgccttggcctcccaaagcgctaggattacaggcgtgagccaccgtgcctggcccagcagctgctattgagagcagatgataaggcaaatgtggagagtcagtcaaaagtactatggcgaatttggagggagcctggtctcagacagagctgggcttgaatcctggctgggacactgactggctccaagtttaaggcaagtggcttaccctccctgtgccttaatttcttcatatatggaaagggaatactaacatatacctttcatgggcatgcaaggattaaatgggggaggtgtgtaaagctcctagtacatagagaagctgaaaatattcagtcaaacaaagaataatagagctaggagggaccttagagttcctcttcccctggcttctcctgtcctcactgtacaaaggaggagaccaaggctcagagagcgtacatatttccctaaggtcagagtgaattaatggtgtccctgtcttgctgctgggagagaggtcctttcttgcatctctttcacagcagggggaaggtgactcacctggagagtggagtgtgtgtgtgtgtgtgtgggtgtgggtgtacacacatgcataagccttcccttcttctagagtgggtgtcccatcccccaccccacagggactgaggttggggtgggagctctcagagaccaggcctctctccacttcactttcaggcctgaacaatggggacctggtgttgaaggatatctccagagcagatgatgggctgtatcagtgcacagtggccaacaacgtgggctacagtgtttgtgtggtggaggtgaaggtctcaggtaggtgcagcagtcttgagggctgggtggttgggagggttgaactggaggaggctgggctctggtttggagcctcagctgcttctgcctttccactgccatccatttgccagtgggggctcccagcccctttcctacaagtgggccaagatcagtgggtacgatcttgaccctattgagctgggtcaagctcgcccagcacagcttccactctgagctctagagcccagagcagctggaagccctgggagaagcatgctgacacgaggggttaacttgcatctccccatatcttccccactgggtgttccagggctaagagaccccctgggtccctctccctctttcccattaacccctgacctggcacctcctggtgctgttccctcaggcacctgccaggctgtgagaaagcctgacctgcctccacttctctccacagactcccggcgtataggcgtgatcatcggcatcgtcctgggctctctgctcgcgctgggctgcctggccgtaggcatctgggggctcgtctgctgctgctgcgggggctccggggctggcggcgcccgcggtgccttcggctacggcaacggcggcggggtcggcggaggggcctgcggcgacttggctagtgagatcaggtaaaacctgatgcatgctgcatgctgctgtgcggcagggaaccggcgccctgcccacctcactcctgcctgccaccggccggctgggccccccaccccaaccctgcccgccatcgccacggagtgctgggactgcggcatgtcgacctgccacccaactcatggctttcccctccccctgccaccccagtcttcacctctgctccctgccttccatttccctcctgcctacgcacctgtctgtcttgtctagactgtaagctcctggagggcagggcctatgttttttcacgtttcccctgtactgcgccggtaagaactctgacattattatttaagaagagctaataataagaatagtgctaataacttatattagaagcaaactagaaataaaaatagaacaagtctagtagtgctaatgattgcaatgcctcggggatggagggaaagatggagaagactgaggggcaggaggtgagaaagagagagattgctcgagcaaggtcaggattagctaaggaaagaagaagaggaaaagcaccttcttctgggcctgcgaaacatcagaaagggattgcaggggcctggagggggctgcctgcagggctctccagatacgcgtggacaagccctgtctggaggatggggatgctggctccgggaccgctgcagggtcgccgacccaggaagggtcacaaaggacagtaggtcgaggccgagggagagagacga

SEQ ID NO: 3028 - DNA, 2300 bp, Homo sapien
ctgaagtctttctatattagaaataaaacctcatctttgatccccatcaactcccgctgcttacgtgtctttaaaccatgttccaaccctaaccacagcctatttcaatgtgaatctcaaacttagttctaacccaatgctaaatcaatctaaacccagcctttgatttagccctaactgtattcccaggcagagctgtaaatgaaactaaaactctattccttatcgtaacacaaatcccagccataaacctgagcctcaattctagctgtatttctaaccctaatcccaaccttaactctaatcccaacctcaaatctgacctcaacctcattcataattcaactaaccccaaacttaaccccagctctaacattagcccacatccagaacccaattaaatctgaagcctgcactgtagtttagtggaaccacaatgttactgctttctcctcaatctctctgttcgtggtctgacctgttttccctcccactcaccctgaccttccatggttcttgttcgtgagtgggtctagtaatccacaggatcaccaagaccattttttggacctctctggactgacaccctgggtacctgggtatcccagcttaggcaccagccgcattggctgaatccccatgtttctccaggtctctgtttccccatctgtaaaatggggataatgatccctgctcttcaaagggagcaggacaatcccataaacctaaaaataaataaggaaataaagatattcattgtgtacatctggtaggtctcagagcgccctgttattgttgggagttcaggtgcaacggcttggaatgcagagacgcgtggactccttgtgtttccttaatgttctgacttatttttccccagaggggtgggccctggcagcatccctgagccccataactctccctaacactcttcctcctctgccctttctgtgccccatggtagggatgggggcagtccctgactcctttgagggagttgagctattgaatggggtcactcatgtcctgactcccaccatggagtccaacaaggcacatgcccattctgtcccccttagacaagccaacaaggggtggcccttcacttgctccccatgcctaccaggaccctccccaccccagcacgaacttacccagaactgtgctggtttagtcagcccgatgaccagtccaggttatgagggtccttggtctcaaggacccagttaatactgggactgcattaaccctcaagacctggctactctttctgggcagagaagccaggacaccaagcgatccctcaagaagttcactcagaggggcttagccatcctcacagagacaccctgacacagacatcctgcctccctcccacagacattgctgaggggtgcacacgcttacacaggcacccccttccctggtcctcttggcgctgttctctccaacactccctcactagcccatcagtcaccttactcctagcacacaccctggaccccccatagcacccctgctcccaggggtcccctacacttggggatggccttgagtcgagtatgggtgtggaggacagttccagaggggacagccaggaggagactctgttcctgcacacaccccttctctcctctttcagctcaggaggcctgagtccctttgaaaggcctgaagcctgggggaaggtgggctggacactcctggggaaccctatgccctgggatcaggattaactcttcaggtcctggccactctttctcccaagcctggcttctccttcctcttccccacttcccccagggaaggaggcagcaaatgagtggtgaggggagcccttggaagctgtaaatgaggtgactgttgtcaccctgaggatgtggccaggaggaagtgaagtttaacaggtgcctaattacaagtcccgctggctgtcctgtgccactcttaggacagggaagagcttgggtgagggctgggtaatgcccaggtaggccaccctgtcaccctgctaattagggttcctgggactcctccccaaggcggggaccaggccccctccctcccatagaaataactccagctgctccccagctgggcactcattgcaccttcctgccaccccaggcagtgtctgggccctcagctccccctccctccacctaccccctcacacccaccactacgaccccacgggatacccagcccagacggaggaaacaccgagcctagagacatgagagttggaggagcattccaccttctactcgtgtgcctgagcccaggtacggggctgggca

SEQ ID NO: 3029 - DNA, 2300 bp, Homo sapien
acagggtctcactcttgtcacccaggctgggtgcattggcacgatcatggctcagagcagcctcaacctccgaggctcaagtgaccctcctagtgcagcctcccaagtagctgggaccactggcatgtaccactatgcctggctaatttttgattttttgtagagatgggatctccctatgttgcccaggctggtctcaaactcctggatgtaagcaatcctcctgccttgggctcccaaagtactgggattacaggcatgtaattgcctgctgggaggcaagtcccttacactgcactctgtcattccctccttcctgccataacttttttaatttttctttgagacagagtcttgcattgttgcctgggctggagtgatcttggctcactgcaatctccccctcctggcttcaagtgattctcctgcctgagcctcctgagtagctgggattacaggtgcctgccaccacccccggctaattttttgtatttttagtagagacggggtttcactatgtcggccaggctggtctcgaactcctgacctcgtgatctgcccaccttggcctcccaaagtgctgggattacaggcatgagccaccgcgcccagccctttctgcctcaactttgcaccttttcttcagagagttaccctgggctgagaaaagaatagattttcaatttggacagttttttcttggcttgtttcctctttggttacacggatagtaactatgtcatgcagatgtgcctgggagaatggggtgaatacaggaagcaccttattcacagtgggccggttacttgtcttcccttctttctgagctgcagggaacggggttctaatgccaaggcttagtaaggaaggttcccacgaacaaaacagccccttctctcagtcccaagcctcccagggactgtgctcctcctcttcaggccttcccttctccctctgattaagccttcaacacttggtgggactgggcaggggacacaattttgtactcttgatcccaaaggagataaaggctgggaaatctagggaaggaatgtgaagcctgttggagtaagtccttttaaaagcagcaagaagtgaccttgtctccctctttccattcccccggggcttgtgaatagccttcagtgcccaagttggagtaagagcttcagaaagactggctgtgagggtttggagagaggtttgagaaagcagctcagagactcacagagtcacaccaagagcttagctaatcagctaatcagcactggaggaagacaaatgtccttggtctggtgggacagcttcgtgaggcttggagcatgcagcctaccaaagtgagctcagtgccagccctgcaagttgggaggtagagaggccaaaccaaattggaaaaaatgacaaaacccctatgtactttctagaacaatacataccagctaggaagtgttaaaagacaagctccccaaagtcagttccttagcttttgacttattctaatgtagggcctccatttttaataaactctcccaggtgattcttagctgcagatttgaggcccgcaatttaagaaactgctcttgagactgcatagacatcctcagggctggaagttctttgttgacccgaccagattctctcctgctgtggaactggtttgtcctgatcctgctggcttctctgcagactacactcatcaggggttggcttggcgcctcctgggcaatggggcaagagtaatcatagcaacctaggtgaagtcccaggggaaaactgtgaccctgggccaggctcctggggccgctgacagttagaaccccctcggcccatagtaagttctttaggttcgggttctgaccgaaaagtttggccaaagccaaagtggagagcagggcacgccagggcgggtcaatccttcagagccgcggttgggctggagcgtggagctgcaacggttggagcgacgggctccggttcctaagccaccagcacaaggcaactgcccgctggaggtgggaggggcggggccgggggcggggcctgagccgaagaacgcgggctagtggttgccaaggtaacgcgtcaacactagggccttggcggcgccgaggcggcagcagaagtccggagtcagggcgtgtggctgaggagatggtgagggagaacctcagatgggccccttgtgtcctgaattgggtgggggctctgagtggggaaagtgggggcctaggggaggtcacagttgggtctaggggtcaggagggcccaggagtaaggagaacacctctagaagaagcaag

SEQ ID NO: 3030 - DNA, 2300 bp, Homo sapien
tcacctggagacagcttcacttgccaggactgatggctgtgccagcagccagccccaccctctcagtgactgagaagctgttccaactgtagaggcagacccagccaaaggcagcaggcaggattagccaattccattgactagaaagggccttacttccctgtggacactgcctacatagtctgcattcagctgtgaggtcctgtcccctctcaattccaacctacaccaccccccaaagcaagtgagaatgaggatggggaggaaactcaagacaggggttagcactgcaacctctcatctctgccctccttcctgtatcactcactgcactttgcccagtattcctcccttccccacagtggcacagtggccccagacacagccagagtccattcaaaaatgacaaattctttatttaaatcaacaaactcatcttcctcaagccccagaccatggtaggcagccctccctctccatcccctcaccccaccccttagccacagtgaagggaatggaaaatgagaagccacgagggcccctgccagggaaggctgccccagatgtgtggtgagcacagtcagtgcagctgtggctggggcagcagctgccacaggctcctccctataaattaagttcctgcagccacagctgtgggagaagcatacttgtagaagcaaggccagtccagcatcagaaggcagaggcagcatcagtgactcccagccatggaatgaacggaggacacagagctcagagacagaacaggccagggggaagaaggagagacagaataggccagggcatggcggtgagggactgaggcccctaaattttggtcccaggggaaaggaagaggccagttggtccagttttgatggctatggggaagggaatgtattagtaagcatgggggagaggatgccagcaggcacctcagaggtgacaggacaggctgaaccccccaccctgacagaaaggagcttgagagctctggggctctctgggaatgtcactgctaaaatatatatctacatatatattaaccattcgtgggagggcaggggcaaggcctggggtgggatcagaggatctggcgtggcatcccgtagccagtcatgcctgcctgagacgccccgcggttggtgcccatctgtaacccgatcacgttcttgccctcttgcagctggttatccgagaagttccgaggattctccttggatttcctgggtgacaagggagtggtggttagaggagatcacaggctgccctagtaaatcccttccttggacagagcacaggctttgctgttggctcaagggctggtgccagctctgccctcgagagccataagctctctgaagccacctcctcatctgtccaaagggacagtcatttgccatcccagagggtgttgtgaggattaagtgagatgaggaattttctgaaagtgctttgtaaagggccagctgctactgagataagttatttcctagggacaggattgggcagaaacaatgcacctgctggaccctgcggctgtcccagcaatacttacttagggaaccagttgggatccccagagaagagcccatcatctcgggctactgccagcccacccagattcatcagcgtccgctgcacacaggccatgttctttcctgggaaggagaatgggaatgtgtcagcctccgcagtgtcctagataccagggttccgcctctatcgctaagtcagcaggcctggcttcctaattatttctactgttcatttccatacccttctccattccagcctccaatatgaccaagtgctccatggaacacaaacacacccctctttctctgcagggagccagaaaacagccccttctgcctggtcaagagggcccagcccaatctctggcctcctggatgacaggacccagcccctcgccctgtcccaccttcccagaggtccacagtttggaagatgtcagtggtgttaatgccatagcgctcagctgcttgcaggaactgagagatctgctccatctgcttgaaggccatggtggaggcctggatcttctttactggggcctgcccctcggggtacagtgcattaatgagctcacatagcacctggatgaggacagcaggggtggaaaggtgagaatatgcctacctatcgcagctcagcgtgcaccaccctcagaaccagagacaatgaaccagagaggctcctgtcttgcctgaagacagcttggactctttcactagagtaagcctcacagtccttcttgccagcctccttcctccgag

SEQ ID NO: 3031 - DNA, 2300 bp, Homo sapien
cttcctacataaacacgcccacagtgtttagctaactttctaggcagaaagtttcctactggggcacaagtctacgggctctcggtggaggctgaggtactcacgggtggagaccactgcagccgcctttgtagattcagactccccgaacctttaacccttgctctggtctactgtccctctgtctcaagcagtcctccctccttctgcgctgcggcgcctttaaaccttcttggcccttgccccgccccgggtccgccccgtctgaggcgggaccctcctgaaaatccccggctgggcagggcgcaccacttgcagctgcagcccttgccttgagtcagtgcgccgctctccagcccgcttgaacggtgagcaggtcgggggtacgggggtcggggacatgtgcgtgctgtgtagaaagcaagaagccagcgctttgaacttgctccagcgagctcggggatcaagggctggtaccaggcaagggtccggtgactactttaccccgccccgtgctgtcaggtcctgtccccaagccctgacccgacattgttggacgatgaggtcaggcgaggttagcccatgcatagacagggcgtccgtctggagcagggactcagggactgagccccacccgcgggctccatcgctgagtcctcactggggcgaggggaaaaaagggcgtcggactttagctggctggccccgagtgaccccgggtcgtggcgccggccctgggccagctcgtgctcctgggctttcccgcgcgacccttcacttcctggttccaggagcacgtgtgagcactgcgtgccctctgagtccccgaggccgcccttttcattcctgttcctgctagcttgctattctggggacttgaggtcacgggctggggctagggggctctgcatgggtcgcacggtgaccttctgtgaagctccagtcatctctatgacggtcccctgacctcgggggtctgggtgctgcagccctgactgcgccccggggtgccctgtgtgaggttgtgggggtggtggtggctgcttttaccctgcccgagcgccgctgcccccaccgggtgccccctgctgctgggaaagccggtggtggccgcgggcggacgggcgggctgcccagaccactgcgtcaccccagcggcgggagggcggtgggtgactcatctgttgtaacggcccagggtgtggtcgtgggggtggggggcggcggctgggaggccggacctgcaggaccggaggtggactgccgcctccccccgcgccctgtgcctcctggggctacctgaagccggtgtcctgggagatctgtgagcagttggtatctgtggggcagagagaaacggggtgagagtggggatggagtgtgggattcgatgtagaagacctgcggctgggacggggctcccccagtgttctcattgacttcaaagcaccagacagcaatggctctctatctctagccccctcccagtttctcctccccactacaaggggcagacctacaactgcagaggaggccaaggcagggcgggcccagtagggccctaccattccagaaccaacaaataggttttgtccaaccgcaactccctccctcaccccaaggcctctgcccctgtcccccaccccgggattggcccctaatcctttcttcattccatcccttctccctccagaattttcagctgtgggttctctagctcagaacactttcccttcccaggggatttcttctcctgaacaactacttcctgagtcctcttcttcaccccaacacgggtcatttcctatcttcccccacacgctgtccatccccactatagctgtctcctggaataatctcttgcacctggctacacccgagcactgctgagacgatcccacttctgctcccgtgctcacagcctgctcaccacaacgtctgtgttgacagggtgtttctgcccggagcccccacccagcctccaacactgtttggtacacagaagccatggcaacggcccccacctcatcccctcctcccacgcaagctttggagcttcctgtttgtgtagcctcagctttctcttctgctcctgactctcggtggtgaggggctgccctacggtggttcccttaattgtgggccgccccccatccttgctgctggctgtggcacctcgctctgtgggctggtgccctcactgtgctgctctttgagaacactccctgtcccaaatctgagttgggaagttctcctgtgttccatctgcacggtggatggagagtccctttgtcttccca

SEQ ID NO: 3032 - DNA, 2300 bp, Homo sapien
gctctagactgtgccttgcccccttgggccatctgtactggaagggcctagcgagcttcacatctgagctcttcactcagtgaacctcagggcttcttctcattgtcctgcccgcctcttgcaggtgtgaagactccagaggagggctgcctcctgaacactgcccatgttactggccctgaggcccgctgtgctgcccttcgggaggaattcctggccttccgccgccgccgagatgctactagggctcggctaccagcctatcgacagccagtcccccaccccgaacaggccactctgctgtgaacatccctgatgtgaggctgtgaaaaggcatatggacctgcaaaggaggcccccaaccagacagacctagtttcaaacgagggcactgcccctgcctgcccctttggtgcccaggcacagaccctgatagtgggtttgggtcaccttggtatggaatgtatgtgctgaccccctaggtgagtctggggattggaacagggatcttaggtctgcctctctctctctctctctctctctctctctctctgtgtgtgtgtgtgtgtgtgtgaagttttttacaggtgaataaacaaagtttgaaagatgtttctgtgtgttatctgtctttgagagagtgccaggaaaatccctggacccttaaagaagaggagaatcttcttgaataaatggaggtgcattcagcattcattcaagaacatttattgagtgcttacggaggccagctactaaaggccagccactgaagtagatactgagaaaatacaaagctctggaagcacgcctttgcccttgaggagttctttctagtcagtgaggcggacaaagaaatagttaccgtatgataagttccgtgataaagctatgtgttggttattgtagcacaaaggaagatgttgcattcaaggccacctttagtgaacgctaatatcgtgtgctgggacaaatgccacatattgggggggagtcctcaggaccctcacagatagatggtggtaataatagtattcactatgtgccaggcactgctctaagccctataggtggactgtttagttctctacaattctatgaattaggtagtactattagctctgttctatagaccagggaactcaagcatagaatgcacaacagtcacacagcaggtaaagggtagagcaggtggggagccagtcaaggaagggaaactgtcctaggcagaggaatagcctttgtaaaggcacagaagagtgagaatgcttgacaatcagtgggactggaatatagggctgtgtaggactcggggagggaacagagaataatagaaaggttggacaggactggatattgacatcctggaatctcaggttcaagggaggactctatcatgtgtgcagaactccaccccgggggactctattcaactgaagcctgaaaggatggggggctctttctccacccctgaactgtgctgtcctccaccctcagagacaaaagaaccccagccagcctcctcgcgctgaggtctccccctctgatccctccaggatttaggaagagataccaggtcatagaaaaggagatgaaaggcagggagaagacaggtctgagccctgggtcccaacaccgaaaacacccctagggccctgggcagagtgacctcactgttagtccctgcccaggcttgaagtaagaggtgagcaagatcacgtgggggtgctgtcccggcctgcaagtcccagtcctgtcacacactagtcagttggggtcgggggaaggccttcctgtgcctccttttaccttgccagcctctaaactaggaggcttcttcctacataaacacgcccacagtgtttagctaactttctaggcagaaagtttcctactggggcacaagtctacgggctctcggtggaggctgaggtactcacgggtggagaccactgcagccgcctttgtagattcagactccccgaacctttaacccttgctctggtctactgtccctctgtctcaagcagtcctccctccttctgcgctgcggcgcctttaaaccttcttggcccttgccccgccccgggtccgccccgtctgaggcgggaccctcctgaaaatccccggctgggcagggcgcaccacttgcagctgcagcccttgccttgagtcagtgcgccgctctccagcccgcttgaacggtgagcaggtcgggggtacgggggtcggggacatgtgcgtgctgtgtagaaagcaagaagccagcgctttgaacttgctccagcgagctcggggatcaa

SEQ ID NO: 3033 - DNA, 2300 bp, Homo sapien
gtcactggcacatggtaattcctggccaagatccttcctttagaagggaaactgagaagcagaaggcctggactgtgccttcatagagcctattatctttgtggggaagtgagactaattggggaaacagggaagtgttgctgtccgtggtactgtaagaaaggcagtgccgggtaatggttaaaggtgtcgtctgtggcatcaggaagcctaatatgaatgttgcctctcctgctgtccttgggcaatcacctcacaatctctctgcctctgagccttcacttcttcatctagaaaatggagacaattcccaccacaaagcttttggtgaggattaaacgaggtcgtgcaggtaaagtgcttagcactcagtgtcccgcatgcagtcagtgctctgttgtgtcagctcgcatcatgacctcttcttactgactgctcatgcggtaccggcccagagaggggaaggagtagtggaactgtagtagccagaggtgcttttgcaggaggtatgtggcgcggccaggcccttgggaggggcattccagaccgggggtgcagggagcaaaggcatggagatgggggacagccagctgcccatactgacctgaaagagttcatgagggctgacatatggaaagatggctggccacgtagggagggtttggatcgcaggggtccacagggctgggtttgagcttagtgtagtaggagccaggtgctgttgcaggttcctgagcagaagtgttctgtggctcaaggggctgtttctgtatgaatggccattagagtggcagctgcaggggagcctggagtcaggggctgctgcagcatcttgaggtgaggtattgggcacctgggttagggccagagacagagaagtaattcaagaggtgacaagcagggatacaaatggtaaatgagcagagttaaactgactcccccaaacacacacaccattcctaggcagtggaactgcatgaatggagttgctcttgatggaacagagagaatttggaaagaagaatgggtctcagggagaggatgaattcttgttacatacagggggaagcttctgcttccactccccaaagccctgtaacaacgagccctaagattccagagagcagagctgggaagagttgtagaggtgacctcagggttctgggaagactgtgggctgaggccaccttcctccccttgtgcatcccacaggacccccagtcatcgtggtgccccccaagaacagcacagtcaatgcctcccaggatgtttcattggcctgccatgctgaggcataccctgctaacctcacctacagctggttccaggacaacatcaatgtcttccacattaggtggggtcaccctcattaggaaggtggaggtggggaattcacaaacagtctctgaagagccgcttggctgggcaaggcctggacccctcctcacacatgccacattgcagccgcctgcagccccgggtgcggatcctggtggacgggagcctgcggctgctggccacccagcctgatgatgccggctgctacacctgtgtgcccagcaatggcctcctgcatccaccctcagcctctgcctacctcactgtgctctgtaagcctgaccccagcttctccctcagcctgctcccttcccctgggccaggccaagcccctctcccccaacttgccactactttcccccagacccagcccaggtgacagctatgcctcctgagacacccctgcccataggcatgccgggggtgatccgctgcccggttcgtgccaaccccccactgctctttgtcagctggaccaaggatggaaaggccctgcagctggacaaggtacaggcttggggcaggggaaggagggtcttagcttggcgttattctgctcaggacagcagggtggagttagctcggtttaattcagttcagtgactggggacacacatcttttgtgaatttaatttgtgttataagacatgttgcataggaaactacttaaaacccctgaggaaaaatttccatggtttaaagtggtggttttgtgtcttctttggggaaagaagagagatgatctctggggaaaatgatggcaaagagtcaagaaggagaactgaagtttctttcgtgtgatgactgggaaattgtgtgtcccgggggaacacacacttcttaccaggtgctgtgtggggtagtgggttgagggcaggggcaaggaggcatccatccttaaagtgggcaccatctgggcagaggacagcaacactgtctggaaggccagggatggagctcgt

SEQ ID NO: 3034 - DNA, 2300 bp, Homo sapien
cagaaagttattttaatgtctaaatgagattagtttatcctcaagaaaccactggagacagcagtttagatcaaaggtgtggccaattctaacagcggggagggagatccttcccaatgattggtaaagatccaaagactaaaaaacacttggctcggccgggggcagtggctcacacctgtaatcccagcattttgggaggccgaggtgggtggatcatgaggtcaggagttcaagaccagcctggtcaagatggtgaaaccccatctctactaaaaatacaaaaattagccaggcatggtggtggccgcctgtaatcacagctgcttgggaggctgaagcaggagaatcgcttgaacccgggaggtggaggttgcagtgagccgagattgcaccactgcactccagcctgggcgatagagtgagactctgtcaaaacaaaaaaacaaacaaacaaaaaacccgcttcactcttttaccatttcttctagccttgcttccatgctgcattcattaacatgtttccattatagtcttatcaatagatcagggtattatgttgaaatgcattgttgaaaagctgctactttgggactatttgcaggagggatggtgggagagactggcccactgctcctgcctcttcccttccatctcagtcacccaaaagcactaaaacctttacacctggaagaactgtccagcaggcagagcttactaaggatggaatgggtacaacagtagtgctgagcttcctggcccaggatgtaatgagataggggcttggatgactacatggagaaatgatgtgccagggattctggggccaagtagtgcttaggcccatcctggaggttctctcatgatgctgcagcagtgattctgtgagtctgatgcctggtgcactcagtttgagtcttagtacttcggattgggatgagatcagcacgttgctttcatggaaggcttccaagggagccaactgaatgggaaggacctggacaggcaatgttgcttaagccgacccagcatccctacagcatcaccaggctgaggaggtggaatctctgaggggcaagatatgcaagatatctttgtgtctgagggcgaagcctccaagggagtaggtttgatgaagtttgggttgggtctcaatccagctctgccataacctagttgggaaagcttgggccaagttacttcatctccctgagcctcagttttctcattagtcaaagggagctctacttacttcgcagggtttctgtgaaggttacacaagagttataaagcatctagtccagggtctggcaccctgcatgggtccagtaagtgatcttgtatttcattcctccctttcaatctcccgtgtcaggatatctgtcgtttctcccctctgggcctgtttctctgggtcgttggtgccagagctgccttgggagctgacttggcaaccccacgctcagagcacagccttcctcagctgcacacggtgggaggcgcctgggcaagatttgggagctcgccaatgcagacaggtatttccagtcctgctagagaagcaatgggtggaggtagaaatggggatgggggaggagatcggatgagcccgggacctgggtggatcccctgggaggagggcggggagtcatgctccccgcctggttctcctacccccaggctcagatttcaaccctcgctgccgcctctgtggcgcgcccgttcggggagcggagagggtcgcccgtaggttccgaaagaaggacggcgtaccagtagcctggcaaggggccagctcccgcagccctggagcgcgagccggaccctgctgcccctcttgctggcggcgggaagcggcccaccggcctttccacgcttggctgtgcagaggtccacgagggggcgacctgagcccacgtgcagccgagctcttccctcctgaaactacaactcccaggccgctcaggggtcccgcccgcctcgccgtgcctctggcggctccaattggccgccgcgggagggggattggcggtctccagggcgacgggaggcgctcggggcatccgaggcggggaggcgggtccgccccctattgtgtagcggcgagagtggagccgagcggtgcggagcaggtgagggagggggcgtactggaggtatagaagtggtggtgctggtagtgcggagttatgggggacaggagaaagcggggagttctagagagaagtggaattcgttgcaggagtagaactaggggagttctggggagtgaagtggaattcttggcgggtgggtgggagt

SEQ ID NO: 3035 - DNA, 2300 bp, Homo sapien
aggattacaggcatgcatcaccatgccctgatcatgtttaaaaattttttttgtagacatggggtctttctatgttgcttaggctggtctaaaattcctggcctcaagggatcttcctgccttggcctcccaaagcgctaggatcataggcatgagctcccttgcccagcctccttctttgtttaaggatggatagtattccattgtgtatatatctacaatttctttacacattcatccattgatagacacttaggttgattccatatgttggctctagtgaatagtgctgcaataagcgtggagtgcagatacctcattaacatactgatttcatttcctttggatgtatacccaacagtgggattgctggatctaattttatttgttaaacagatttattacataaaaacgttttatactcagactgaaatctggttcacctttaagaaaaaattctaatccctcaggttttatactcataaattgaaatttaagaactactcacttcattatcttcttcactaagcagattctaccaatctttgaagaactaaggtctcatcttaaatatctctccttgatagcttttccccaaccctcctgactccaactttgccaaatcgccttattataggctccttcaattattcctttggtaagattcatcaaacttgtagttacttgtccaatgtcaattgttagcattatgagctccatgaagtcacgatctaaaattcttggtcactgttaattccccagcacttaagacagtgtatggaccatagaagctactcaataaacatttaacagatttctgaatttgctaacctaaaactaggaaatgttggcacaagaccaaagctgaatacgtcttcctctattgttcccttggtcttgagacaccactcttcacagcacagactcataaaattgattattagaagaaacttaaagattatccagtctgagaatccatctgatggcagagatgttgcagataatccaagcaagtgattgtcctcttagcttgaatactagggacagaagctactttctaaggcagcccattgcatccagaacagctttgactgccaggaagctatttaataaccctgatcctctgcagtctcttcttgaatctgaattcatataagttgatcaacattgtattctcacaaaacgatttaaagtcttttcataatatgaacaacatagatcaactctctgatcaaactacttttttttttcttctctcttttttttttttttgctttgagacagagtcttgctctgtcacccaggctggagtgcagtggcacaatcttggctctctgcaacctccacctcctgggttcaagtgattctcttgcctcagcctcctgagtagctggcatacaggggcacgccaccatgcccagctaatttttgtatttttagtagagacggggtttcaccatgttggccaggctggtctcaaactcctgacctcaggtgatctgcctgcctcggcctcccaaagtgctgggattccagatgtgagccattgcacccggccaaactgctttcttaaagaggattgaatcaaatgtttttcccctgcgaatagcctctcaggtgggaacataactagctttaaataaaaaggcttaatcattcatccattataaagctatcaattgagtgcagacacatgtctagtatggggccagcaataatgggacatacacaggaaatgaaagatgaagtctgtctggggagatatagatgtttataagatcaaatgatcacagcaacataggaattacccagagagagctagggaagaatatcctgggagccaaataacaggatagggaatgttctacgagttcggggcatgcagtacgtgcggggacctggggcgggtaggaagtcttgaaagacttcatttaggaagtgggatttgggctgagtttggtggatggcatcatgagtcagtgagtaaactgtcatgacaatcaggatctgaaagagaactaagagagccatgatacatagggaggggcttagtgaggacagaggacgtcagagggctgtagtcaggggaaaattatttcccttttctcaggaccatcagtcaggctctttgtgtctaggagcctcctaatgcagtcttctgcacagtcctggggactgactgactgaatcacacctctggggctgggggctgctgacatgtgtgcctttccttggctgcttcttctcctgctgctccaggagggtgagtgaagctgccagctcgtgcacaggaatgtccc

SEQ ID NO: 3036 - DNA, 2300 bp, Homo sapien
tagctgagtggctttgcactctgtgggcctcacagatggctaagatgaactattttttgttaagggaagttttgctggttaagtttctctcttaccactggttccctctctcttacccctgaccaggaggtggatgcatctctattctgggtggtcctttgcaactccttcatcagcccctggacatctggccacacatctcatctcctcctccccagaggcctgtccaaatgcccctatcgtacagcacccaggacaaccaagcaggctgtgtctcatgggtggcccttagctacccatgacaaacattccttgccctggcagatcctaggatctacaacatggcaccatactcctggctccctcatgggagcccattaccggttttaactctcccagacctgtcataggtgcctgtcgcctctgactctcacttgcggggccacattccaaagctccctaagccctccccttgaagtcttctttacttggcttgtggtcagaggtgacatcactataccctggggaagaggtgtggactcacagtaaagttctttccaaagaagtctctttcttgatctccctttctcagccctccatccatagatgagggggttccaaaggcagtgacaccagttctccttgactcccattgtacgttcctcaagggcagatctccctcacattgcctttgatctcctgatacccatcacactgtcagcttagcgtagcgtaactaaggcaggaagagacccattctaacatcttgcttgtagcagacacttagggttccctgtagcacagcctgtttatccacctgacttctttatatatatatatatatattatactttaagttctagagtacatgtgcacaacgtgcaggtttgttacatatgtatacatgtgccatgttggtgtgctgcacccattaactcgtcatttagcattaggtatatctcctaatgctatccctcccccctccccccaccccacaacagtccccggtgtgtgatgttccccatcctgtgtccaagtgttctcattgttcaattcccacctatgagtgagaacaggcggtgtttggttttttgtccttgcgatagtttgctgagaatgatggtttccagcttcatccatgtccctacaaaggacataaactcatcattttttatggctgcatctacactgctgtgtgggcagtttcatgatggagtgccccatgaagtttgcacctgggcagtctgtttttctgcttccaggctttctctgatgatctttttttttttttttttcctttgagacggagtttcgatctgttgccaaggcttcagtgcagtggtaccatctcggctaactgcaacctccacctcccaggttcaagcaattcttccacctcagcctcccaagtagctgggattacaggcgcatgctactacgcctggctaatttttgtagagacgggtttcaccatgttggccaggctagtcttgaactcccgacctcgtgatccacccgccttggcctcccaaagtgctgggattacaggcatgagtcactgcccccggccacttccaggctttccctatgacagtggaaggccactcagccaagcaactgggaagtatgcaggttgggggggtgcagctgagggagtgccatgttggtgagtaaacgtggataaatgttccagcctccctgccctattccatgagcaattctgaggcatgttctccctggttcctcagagggattgggccccagttgtccacaacggtaatcaactattaacacacccttttctttggctttcctcccttccttgtctcattttcctcattctttcttcttggattatctcccagaaagacgtcctccacccaagtttttatctaagggtgtgctttggagagagaccaaactatgacattattatatataataaagtagttgcaccagtaatgtttagactttctctctcttcttcctggatctttaggagcaattaagccaatgagaaatcagacccacaccccaattctgatgtaacagccttgggaaagaggttgcagtgaaaagctggtcctgctgtggtggagagaatggaggaaagataataaaaggccaaacctttgctccaactttctccttagcttccctttggatctggaaagctggggacccacacggcagagccatggtactggaggagccattaacaagtaagttccaaataaatcacctccctcccgaggcaatgtgtgttgagatctgcatgtgtcttctatcctattctgagg

SEQ ID NO: 3037 - DNA, 2300 bp, Homo sapien
ctatcttagggaactaagcctcacttatctattatttgcagaagaaaagaataaatcagaggtagaaagagtcacagtgagagagaatatccagaatatcaagatgagagatcaataagagaaaacataggaaaattagaatttgtgatcaacattttattggcaagtcagccacataatgattaagatattctaggtcagacagactgggttttgagttctagcactgtcactagttagctatgtgacttgggaaaattacttaatctccataagccttggttttcttcatttgtaaaggtgggaatatctaccttacatgaaaagtacttagcataatgcctggtacattgcaaatgagtcctcaacaaatccagctattataaataatagtaatcatcatcatcataatcatcattatatgagtggtgatgtgctgccactatatatatggctaatatactgcaaaaaaatggttagaattatcaatctaaggcatgtaatgataccaaggcatataaaaggacatagagctatcacaatatgaatatggaatatataagattaacacagttcatctccaagggataaattgaagtgtaggatggatgagcagcaggtagttctgggagctgcatgttcagactgcatgaagtcacctccttttccttattctagtctagaagacttcccctaggaagcaggcttattctataaaatccaattagtcagtatttactaagcatttaccatgtgcctaagactacaataaattacacataattgaaaaaaattaaggataagatataatttctacccccaagaaccctataatctcttgtgagggctatgaatacaatctaaaataaagtatcaaattctacaatgcggactatgtaagtgcactaagtaaccacggaaagggaagagctaatgggttacagtccttggcaagaaattcatggaagtagggttggagtggggtggggggagcaggggaccttgacatacataaaggatatttaaaagggaaaataactgggagttgggagcaatccaaagatgccactctagaaatattctggtaggaggaacctctaaaatcaattcaactttactgaatggctactagtactgtgttagatgttgaggtagagaaaagaacaagataatctctgataccgaagaattgaaagtgtcctgatggaaaactaggagagcaaaacaaacaaaaacagttattacaaagcagtgtgacaaatgctgtaacaaaggaatgaccagggagttctggagcactgggagaacttttagtagcatggcagggtcttctgtgtgagtgattttctggaacttagatcccgtccgccccagtctacctatcctcggacaggggaggggactggcatctaagtcattcattctgcgtgatgaggaagtgagtgggagctgggagctaacacttgcactgatgcctgaagggttgagtaggtatttgccagagtgattggagagcggatggcaactttgacagaagaaatagcaaatacagagatactgaggcataaggggctgacaagttaaggaattttgtgacgctttcctgtcttctttcccatcaccttcacctagggttgccggataaaatacaagctgcccacttaaatctgaatctctgattaccaactagtaatttaaaaatataagtatgcctccaatattgcatggaacatacacactcagcccccttcaactcatcctgtcctgtccggggcccacaaatccccggtgaataccggcgagctagtggagtaaagcatgagaaggcttatcttcctttcactcctacatttttcactctcggatctccagcccaggactgaaggatgtagcgcgcagcccgcagctcgctgctcgtcggagggttttcctctgaggactggaaatggggcgcgggaagagggcggggggcggcgggctgtcacttacaaagaaatctcactccactccataaaatcctcaagccagtgccggatttcccggcaagcggacgtctcccctcccacggaccggaaatcccgcctccgctggaagaagaagcggaagcgagaccgtccatccagaggaaggcaagtttttggctcgggcggctgagaagaccgcgcggggctggagacaggtagcagtacgggggcggggcttcatgccggatgtgatagtctgcagtcgtttcggttggcagcctggcgggtgggagatgcggcggccacctgctgcaaagaaccgaagggaaggttaga

SEQ ID NO: 3038 - DNA, 2300 bp, Homo sapien
aacttgtaatctggttcccaccttgctcactcttctgaaattgctctcaaatgtcactagagactttgtcactgccaaacccaatgcctcttctctctgtacttgttggcactgttagaacctcctccttaacagtctctccttccttagctccatgacatctcactttctttgtctccttcctgcctgtctggtggattctctttcactctttgggggtccttcttcttcccatcccctaaacataggtgttcctcactctctgtgccaggctctcatttctctgtgcagtctttgttgggatctaccctgttctcatagcttcaactcacactgccctggcagcaatgacctcctttctctctctggttctgacccctctccacagcttccagctctgaactcatcacttcctcttcccccacctcagtctcctcaccaggtgtgatcccccccaggctcccctatgcccgtgaatgacctcgcagttctgatcacctgacttgagactctagtatgatctctgaagcttccctcttttgctcaacatgtcaagttggcttcaaacttttttcattttcttttgatttttctgtactccaattcattttctgtgttccacttttcaccattgccacgctgatttgggctgtcatctcttcatgcttatattattgcaattattttctatcgtctacttgcctactatatccacttggttcaaactattttgtcacctcccgattaattttcctaaaatgccatagctttctcctactccatccttcccaagaaccttcaattgctctccgtagcctacagaaactctggcctgaccacaaatcagcacaactctgtgtttcttccggatgttccccttaacacaaacactgcctatggtgcctaacctttagtcccgtccttccagcttctccaatgaggctatttgaatggacatttacttatcttatggcttttagtggttaaactaagctacattcctagtttctttcctttttttacctgaatttatagcaattcaatatggtaacactggttattgattagcagttaaatgtttatgatgatcagaaatgaggaaataattatattctttttaaataaatgctgggggtgggggtgaattaaaacctctcaacacatagattcagaaaattaaagaaatctttggtgatgaaagggttgagaaccatcaccctgcactctaatctagtaaatgggacagtttgatgctgtttcccaagtgaacttgtattttcacgtctccccaggactctgctacgttgttccctctgccttaaatgcaacagagtcctggggaccatctctcagcacctgaatcttctgcttcctttgggaccctaatcagatgttacctctttcctcccacatctgctaggagccctctgagtagaatgacctctcccttttacagccttcagtacctcccgcacttcgctgagggttccggccttatctttccttacagagaaagccgctgcaggtgggcaccgtgtgctgcgcgtctctcacccagcaccgcaccggggacttaggagacggtgaacaacacgggaattgtgcccaaagatacagtcctgtggctcagggagcccaggcctactccgccccaatctcacttccaggcgccgccttcggcgctgcctgcagggccactgggccggtcctgaattcatttccacttcgttaactcggtcccagtcccgccccccggctccagctctcgtaacccatcgctgacaggaccgcctcccttttcttccttctcccttcccctgtcaccctgccagctcagctcctatcgtttcgcatatcgtctcttcatctctctttctccccgggtctgtctgggtctctgtctttggatatttctctctgcgcctgcagctgtctgggtctccgcttccttgccccgcacgccccgccccctgcccaagaccctccaatctcggcggctcgagcctggcgctccactctcccattggtctgttcggagccccccgcccccgcctgcccggcccccctccgggcccctccattcacacaaagtttggctccggcgctgcggagggagggggcggcccggcccggcccagctctgcccccggccggcccgaccccggccccggcccccggacaagcccttatctgatcccagctccgggtttaagagtcctggcccggcccgtcgcacagctctgctcctaactcctgcccgccccgtccgtccatctgtcccgctgccccgcggcccatcc

SEQ ID NO: 3039 - DNA, 2300 bp, Homo sapien
gaatatttttaggttctgcttttttatgtaacagtgtgttatatacacattcacatatttaaacacagcaattattatggctttacagtaacccatgatattaatattccacagatattacattactgaggcacactaggctaaggctgacaacaccaaatgctggcaggaatgtggagcaacaggaacaggaattcgtggctgatgggaatgcaaaatggtacagctactttggaagaaagtgtggcagtttcctaaaaaactaaacatactcttaccatacgatccaggaatcatgctccttggtatctacccaaaggagatgaaaacttacgtccacatgaaaatctgccgatggatgtttatagcagctgtattcatcatggccaaatcttgaaagcaaccgagatgtccttcagtaggtaaatagataaataaaccatggccatcctgaaatggaatattattcagtgccaaaaagaaatgaactacaaagccatgaaaagacatggaggaaccttaaatttacattactaagtgaaagaagccaatttgaaatggctacatattgtacaattccaacgacatgacattctggaaaaggaaaattatggaaacaggaaaaagagcagttgttgccaggggttagggaagggggattgactaggcagagcatagaggacttttacagcaatgagactataatggtggatacacatcattatatatttgtccaaacccacagagtgtacaacaccaaaagtgaaccctaatgtcagctatggactttgggcgattatgatgtcaatgtagcttcatcacttgtaacaaatgtgccattctggtggatgtgtggggacagggggcatacggaaaatctctataactttcctctcagttttgctctgaatctaaaactaccctttaagaagtcttcttttaaaacaatttacaaagcatgaggtgatacagatgtgggagtttggctcctgtctctgcccaactctgtgacattcgataaattacttaacatgtctctgtttcagtttcctcatctataactgggaaaaataacacctgtcttatagagttgccatggggatgacatgaggcatgtgtctcgttcatatcccatgctcagtgaattagtagcagcagccactgtgtgtttgtgtgtctttatccctcctgggttaatgagctccttgtgggcagggactcacccattctgtaaccaccccatctaacacactgcctggcacttgggctccgcagaagtttgccgagtgaatacttagtaagccctaacctaggcttttctctctggtggacatttgggttgtttctagggtttttgctatgaataaaacacatttcaaagccctttgtggtttttttggtttttgtttgtttgttttttcttcgtttgatctgctgactctgtgaagcaggcagaaaggggatatttgctcttgtccacaccctggtacagatggaataactgtggctcagggaagtgaagtgactcctatgggacacagtgcaaatcagtggcaataattagaacccctgaccctgcctcccttcctttagtagatctattttccttctagctaccgccttctggatccatggcctctccaaaactagaccatgatggtcagcctgacctgagagcagcacctgcacgcagagacccatgttgaaggtggtgagctgccagctaccagatggccctctgaaaccccagggaacctagcaccttattctcaaatacatgagggcttgtattttcccccaggaaggagcttcttaggaaagagccagcgtgccagctttgtttttctttcttcttctttttttttttttcctatgagggggtgaggagccaagctctgagttgtccaggaggagggactttggctaaaaatagctatggcgtgtggtttggatcaacccctagtggtacccaggactggggaggggagggggatgctctggagctgtcgccagactggttgccgtggaaacaagagaggagcaggggagcctgggaagtagggatgacacagatagcaagtcctagtcagagctgccgctacatttaggagaaacagcggtgtctgcggctcccacccttcggggggcccgtggggggggcggtgtcaggggcatggacgccaccccccaggggtctctgctgccggctactctcctctccacgtgctgtgagttgagttgcgggggacttggggtttgggcccctatttccaaggcaagtgggggtttgggaggagctg

SEQ ID NO: 3040 - DNA, 2300 bp, Homo sapien
tgagatccaggtgtcttatatcacagcatccctttcctattctcagaacagggtccaagctgtggacaagctttcccaggtctcctttccttttgtaggcagagatcaagaatggtgcttgtggcggcagagggcatggaatgaggaaccaggcatctccaactccttctgcctttccctacaggaatgggatgctgggcccgggaggtgctggtccccgaggggcccttgtaccgcgtggctggcacagctgtctccatctcctgcaatgtgaccggctatgagggccctgcccagcagaacttcgagtggttcctgtataggcccgaggccccagatactgcactgggcattgtcagtaccaaggatacccagttctcctatgctgtcttcaagtcccgagtggtggcgggtgaggtgcaggtgcagcgcctacaaggtgatgccgtggtgctcaagattgcccgcctgcaggcccaggatgccggcatttatgagtgccacaccccctccactgatacccgctacctgggcagctacagcggcaaggtggagctgagaggtactgggccctgggacggggtggagccacacaccctctcaaggcagaaagtcaaggccacaagtgacctatctagttgccccttaggttttgtagccaaggaacttgaggcccaaagaggttaagtgatttgcacaaagtcacccaataactcagtggctgatgtgggactcaaacccagagttcctcacccaggccagtgctcatcttatcatattaagacccctcctgggagaagaaatgtccttaagttgtccagtccactttccattcccaagaacgaagaagactgttgggttgaatagcctctactcctggacagtacaggacccagatctgggaaagagagtagagttagggaaggagttagaccatgtgacattctcactctcttaagtttctttgtcttctgagaagaaagagccgcttttctcagtatttcaaacagaggtcagtctcaaacataagggtgagtaggcgatgggctggttctatgaaattctacaagtatttattgagcgcctgtgctgtgcccagtactgcccttggcaccactgagttacagaagaaataatacaacatgcgatctttgccctctgggagctcacagtttatttagggagataggctatacacaggaaacagtaacaagggctgccagctcccagccctccctcactccagctgttctctccagttcttccagatgtcctccaggtgtctgctgcccccccagggccccgaggccgccaggccccaacctcacccccacgcatgacggtgcatgaggggcaggagctggcactgggctgcctggcgaggacaagcacacagaagcacacacacctggcagtgtcctttgggcgatctgtgcccgaggcaccagttgggcggtcaactctgcaggaagtggtgggaatccggtcagacttggccgtggaggctggagctccctatgctgagcgattggctgcaggggagcttcgtctgggcaaggaagggaccgatcggtaccgcatggtagtagggggtgcccaggcaggggacgcaggcacctaccactgcactgccgctgagtggattcaggatcctgatggcagctgggcccagattgcagagaaaagggccgtcctggcccacgtggatgtgcagacgctgtgtaagtgccacttatacatcccactgtgggagctgggagggacagtatcctggtgggcactgtggccacagggggtaccagatagccatcatctgactccaaggaactcatcttccacagagtgagcagccttgctagcatttctctcccccggcccttgatgggttttctctgctcagaaattgggtatagagataggaggcccatgctgaggggtgagattcaagcccctaaatagaaagatggtcatacctagtgagggggagacaggaggttttgaagttgctgctgtcaagtaggaaacaggaagttggggaatcgggtgcctctgtgtcccctcctgcctccatgacacctcttcccctacctgtgtttcagccagccagctggcagtgacagtggggcctggtgaacgtcggatcggcccaggggagcccttggaactgctgtgcaatgtgtcaggggcacttcccccagcaggccgtcatgctgcatactctgtaggttgggagatggcacctgcgggggcacctgggcccggccgcctggtagcccagctggacacagagggtgtgggca

SEQ ID NO: 3041 - DNA, 2300 bp, Homo sapien
aggaactggggcaggcaccttctgtatctgctgggctagcccggaaggttggcaggcactggaggaggggatcttctgcccccaatggccagggcagagcctggatcttgccccagaagccccagctgcctgggcagccctgtggggtgagagaagcagtgagctcatggcgcagctggagaggggagggcattgtgtggtgagaactgactgggcctgtgccctttccagctagggtcactggctccattgtctcgcccaggtgacacagctgagccaactagcacttctgagcaagactgccagctcccctcaagcaaaggagagggacatgtagtctcagagtcccctagccagaaggctccccttgccaggtgctgaggaaggaatggcagacatggaggtgggtgagtggcagggacagatcaaggttcagttggaaccaaggcctggttaggtcaggaatcagatgtactcctttctgccttcaggtgctctgcttctagtccgccagaaatgggatgcatctggatgccaaggcaatcctgggcccatgccacctccttgagatccaggtgtcttatatcacagcatccctttcctattctcagaacagggtccaagctgtggacaagctttcccaggtctcctttccttttgtaggcagagatcaagaatggtgcttgtggcggcagagggcatggaatgaggaaccaggcatctccaactccttctgcctttccctacaggaatgggatgctgggcccgggaggtgctggtccccgaggggcccttgtaccgcgtggctggcacagctgtctccatctcctgcaatgtgaccggctatgagggccctgcccagcagaacttcgagtggttcctgtataggcccgaggccccagatactgcactgggcattgtcagtaccaaggatacccagttctcctatgctgtcttcaagtcccgagtggtggcgggtgaggtgcaggtgcagcgcctacaaggtgatgccgtggtgctcaagattgcccgcctgcaggcccaggatgccggcatttatgagtgccacaccccctccactgatacccgctacctgggcagctacagcggcaaggtggagctgagaggtactgggccctgggacggggtggagccacacaccctctcaaggcagaaagtcaaggccacaagtgacctatctagttgccccttaggttttgtagccaaggaacttgaggcccaaagaggttaagtgatttgcacaaagtcacccaataactcagtggctgatgtgggactcaaacccagagttcctcacccaggccagtgctcatcttatcatattaagacccctcctgggagaagaaatgtccttaagttgtccagtccactttccattcccaagaacgaagaagactgttgggttgaatagcctctactcctggacagtacaggacccagatctgggaaagagagtagagttagggaaggagttagaccatgtgacattctcactctcttaagtttctttgtcttctgagaagaaagagccgcttttctcagtatttcaaacagaggtcagtctcaaacataagggtgagtaggcgatgggctggttctatgaaattctacaagtatttattgagcgcctgtgctgtgcccagtactgcccttggcaccactgagttacagaagaaataatacaacatgcgatctttgccctctgggagctcacagtttatttagggagataggctatacacaggaaacagtaacaagggctgccagctcccagccctccctcactccagctgttctctccagttcttccagatgtcctccaggtgtctgctgcccccccagggccccgaggccgccaggccccaacctcacccccacgcatgacggtgcatgaggggcaggagctggcactgggctgcctggcgaggacaagcacacagaagcacacacacctggcagtgtcctttgggcgatctgtgcccgaggcaccagttgggcggtcaactctgcaggaagtggtgggaatccggtcagacttggccgtggaggctggagctccctatgctgagcgattggctgcaggggagcttcgtctgggcaaggaagggaccgatcggtaccgcatggtagtagggggtgcccaggcaggggacgcaggcacctaccactgcactgccgctgagtggattcaggatcctgatggcagctgggcccagattgcagagaaaagggccgtcctggcccacgtggatgtgcagacgctgtgtaagtgccactta

SEQ ID NO: 3042 - DNA, 2300 bp, Homo sapien
aggaggggagagagagctgtgtggcaactgatttcctaaggctgtggaggtgactttcccatgggcatctccaagcatcagcagttgtggagccaggaaaatgggagggggccttctgagcagtctgccctgaggcagtcagggaaggtgtcagcttggctgtctccaccgtcactctgattatgaaacttgcctggcctggggcagggctctcctgagtcacatacgcactcacacatggtcagagctggagctcttagttctcctccagtgtggaaactgaggcctaggacagaaagagactggatcccaggccacacagctgggcatggggatggtgctggaatcccacttcctgactggcagctgtgcccttaacaacagaccatgagttctccctgtgacccagccagaggatgaaggaaggggctaggagcccagaagcaggggtggggaagttcagaggagccgttctagagaagctggagggtagagtttgaccacagactcctgggcattttcctctagctcctgcagaaagtccatggtatccccctgggaggcctaaaagtgacactctggttggtgaggtcagtcccttcaggcctggccttggagtttccccatcttcctctctggttttgcccctctggaggagtgtgtggaagccatctagggacagcatgatcttggctaacatattatacttttcctgccttacctttctcatctgtaaaattgggagaggtggggaggggtggcctagccctctttacattgaggttctgtgatcttatctagtgggagctatggaaggaaagaagggaggagctaagccctctaagtctgccaggagtatctgctggggtagggttgggcataggggtggagtagggtgaagaagagaggtttggcctttctgaagggagagagatgagaaggggcagctggggatttagtgcctccctacagaaagagagccatatatgtaaatgaatgcataccatgtgcaaatgaaggcttttgttaaggaactggggcaggcaccttctgtatctgctgggctagcccggaaggttggcaggcactggaggaggggatcttctgcccccaatggccagggcagagcctggatcttgccccagaagccccagctgcctgggcagccctgtggggtgagagaagcagtgagctcatggcgcagctggagaggggagggcattgtgtggtgagaactgactgggcctgtgccctttccagctagggtcactggctccattgtctcgcccaggtgacacagctgagccaactagcacttctgagcaagactgccagctcccctcaagcaaaggagagggacatgtagtctcagagtcccctagccagaaggctccccttgccaggtgctgaggaaggaatggcagacatggaggtgggtgagtggcagggacagatcaaggttcagttggaaccaaggcctggttaggtcaggaatcagatgtactcctttctgccttcaggtgctctgcttctagtccgccagaaatgggatgcatctggatgccaaggcaatcctgggcccatgccacctccttgagatccaggtgtcttatatcacagcatccctttcctattctcagaacagggtccaagctgtggacaagctttcccaggtctcctttccttttgtaggcagagatcaagaatggtgcttgtggcggcagagggcatggaatgaggaaccaggcatctccaactccttctgcctttccctacaggaatgggatgctgggcccgggaggtgctggtccccgaggggcccttgtaccgcgtggctggcacagctgtctccatctcctgcaatgtgaccggctatgagggccctgcccagcagaacttcgagtggttcctgtataggcccgaggccccagatactgcactgggcattgtcagtaccaaggatacccagttctcctatgctgtcttcaagtcccgagtggtggcgggtgaggtgcaggtgcagcgcctacaaggtgatgccgtggtgctcaagattgcccgcctgcaggcccaggatgccggcatttatgagtgccacaccccctccactgatacccgctacctgggcagctacagcggcaaggtggagctgagaggtactgggccctgggacggggtggagccacacaccctctcaaggcagaaagtcaaggccacaagtgacctatctagttgccccttaggttttgtagccaaggaacttgaggcccaaagaggttaagtgatttgcacaaagtcac

SEQ ID NO: 3043 - DNA, 2300 bp, Homo sapien
gggctttggggacagacagacaagcctgggctgaagtcacccctaagccacttaaaaactgtgtggccttgggcaaggtacttaacctgcctaacctcaagtttctcttctgttaaatgacaccaccttgcaaaatatgctataaggactaggactaatatccaaaagggccttcttgtgtaagcatttcataaatgacatctatcattattacaattggtaacatctttcatccctcaagcatcatgaaggcattaaatccactcgataattaaatccattataaagggagagacgtattcttccaaaagcttcccctatgagtttcagttttcacatagctcgatatgcctgtggatggatttagatgatgaggttctggagcaaccttctggatatttcaaagtgggaataaacaggcaccttattgccctgttcatgggccagtgctggcagtcctgggaagtgagggctggacctctgatctcccttcaaggcctcagtttctctggtttctccagggttcctcaatgtggcttctactggcaaccccgtgagcatcttctcagagtcaggcactgtgccacgcttgaggaataccatgtcaaggaaggtctggtctggcctgtgccacttaccctctctgggcctcagtttcctcttctgtaaaggggggtgagtgagtgggagggaagggggatgagaggggagagggaggatgttggagggtagagggtggtaaatgggctctggggtcacctcccactgacagccactctgacagccttggctttgcaaacctggccatctcttctccccattctggtctcatccttcctgcccctgcccacttcccatctttacagttcaggaagagacagagcacctgggaagggtgcctcctccattctcccacctccagggcaagccccactcttcctagaacagagcaatgttcatctcttcccactgtcactgaacatagagactccttcacctaaatgccaggtctaaactaagcctcttaggaagcagttcaaataataattcaaaacctaaaacaaaataatccttatctcccattttgtgttagtttcctgtgccaaacactttatgtacattacctatcatcacaataaccctttgggtgatgtgatcaacctcaattcaatttgcagaggagaaaactgaagttgaaggaggttaaacaactgggctaggatcacccaacccagaaatgacgtcacatggacggccccctctcctaatccatttttcttttggttttgccctctgagggggtgaaaaacaggtctccagtgaccttctggatcctggaagcgcccttcagctcaaacccttcgcattcaggaactcctggcttccgccaacccctacttcagcagggtttgcagcgaggactatggctcagagcaaataactgaattctaaatgcgtggtcacagtcacctcgccaatcccagggaccctgcacccaactctccaggaaaggctggcaggtgcggggtggaatgcgctctgtgcgagggtgggtgggaatttcgatgcgcagaggtgcagttagctcactcctgcgggggcctcgggcggagccagggccaggggcggggcgaggccggggtccagggcggagccaggattggaggctgacgttagccctgcggggacggggaaggggtgcggcttgggactggggcggggccggggcccggggaggagccaggattggagtccgactgtagtcctggtggggcggggcgggggaggggccggaactggggctgggccgaggcccggggcggatccagggctggagtcttggcggggcggggcggggaggggcggggccggggcggggctgggactcgatgcgactcaaaggtgagtttcgaggggcggggcggggccggggccaggtgcggagcaaaggccggagtctggcgggggtggggcaggcagggccaaggctgggtccggggcggggcgggcctagacggggcggtggaaggggcggtgccggggcgggccggggcgagaatggtttcagaactgccgagggctggagggaaagcagcgggaggggcggagggaggggattcggcagctccagttcagctcgctcggcgcacccacgcctcgctgccccgcttcctgccctcaacctgggcatgcgccccccacccttccggccccccagaacccgcgccatcccccggagcctccccagagctggccgcgcaggatgggcgccctcaggcccacgctgctgccgccttcgc

SEQ ID NO: 3044 - DNA, 2300 bp, Homo sapien
agaggaggaccagaggagcagggctggagagctgggcccaaatcaggactgggggagagaagtggggtgccggggcgggaggagggacgatgggggtgatagagcctcccagctcttccttccctcccactctccctcctcctctctctctttcatgatcttgaaacaaccttcaagtctgggctggaggccccaggaggccagtcacttaggaaacaaaactgtttcttggagaccttgaaagcccatctgcagctgagcagcgtccccaccccctccctgtgcacacacacattctcccatggactctcacgtacacccacacccggcttcacatgagctccccaatggcccacatgcacgcacacacggactccacacttgatcttagccaaaaggccgagaagcgatgcgcactcacggactcacacgcacctctgtactcatgcttgcatacagacaaccgattcatagcagattggccacacatccgaatgagtgttgtcctctcccctgaggagctcctcctttggaatgtggtttggtaccaccactccgtctcatacctcacacaggacccaacgctcaggtcctcccagtcattaactagcacacatctgtacacaggcacatgcacactcctgtctctctccaactgtcttggtctctctctctctctctctctctctctgtcacacacacacacacacacacacacacacacacacacacacacttcttaccaaccaaatatttgattcaggaccactccatccccactttgcccttggtggatccccctcctgatctgtgactttctcagcccactccccagcccaggcatcttggccttccatcctcctgctttcaagtctttctttctctctcctttgctcctcttactccaagggccttgatccaaactggtactgctgactgtgtctgaagaaacagtagcccaacccaggcactccagatcaaacgatcaggtgtctacacctgttaatatcctggaggctgaggttcatggtggacaagaaggaggtagaccactccagagcctcagctctcactgggcaaggagggtggtcagtgatgcacggtggaagtataggccctgggtgtcctgcccactctttgatttctctgagccctaaatatgtgagcagcagcgcccctcgggctgtgctctcgcccaaatgcagggcatggcagggagccccagcaggctgtaggggcagaggaagggcacatcctttccggtattgagtttggccacagggaccagagccagggcctttggaaggactgggcagtactgggaggtgccagcaggggtgaggggtgggatgaaaactgttagagtgcttgaggtttgcacaccttcagattcggggactgacgttttctctcctatctcaggttgtgttctggagagggctgggcagaagattacccaggaattccaacccaggaacctacggaacaggcgcttcctaaaccccaatttatcatgttgttcccacagcccccaggcaagcctgccccaatgttgatctccctagctgcctcggggccactctggagtgactttgctttagacagtctctcctggtgtctaaccacaggctttcccgctactcccctctcactctctccttaacacacaggggctgaactggtatctgttcccttcattgtttcctccctctgcccattctctcccaagaccaaatctgagctcggagaggggggccatgagaaggccctgttggccccatcctacccaccctttctgactgtaacccagagagggaaggagcgtggaagtgagatgtgacctaccaggtccctgtaatggaaaatctcaactgcaggcccggagggggccagttatttagggaattcagatgttagccttgtgccctgagagtggatttgctagaggagaggctgataatccctctgcagggagttccctctggggccagagatggacccagcccagccagcaggcaccttaggcctctggccaaagccccccttccctccctcccttcctctctgctttctttgcactcaggacacttagacctgccccactccgctggcttcccctcactccatctctgtgcccagagaaacaggggtactccaggggaatcctgtcctctgactgttcccagtagaaggcgggagcagaattttttcttttctctctgccccttctgggttccccttcctctctgtgcccctcatcctttggattactcatcaaatgagcagcaacaacaccccta

SEQ ID NO: 3045 - DNA, 2300 bp, Homo sapien
cacaccttcagattcggggactgacgttttctctcctatctcaggttgtgttctggagagggctgggcagaagattacccaggaattccaacccaggaacctacggaacaggcgcttcctaaaccccaatttatcatgttgttcccacagcccccaggcaagcctgccccaatgttgatctccctagctgcctcggggccactctggagtgactttgctttagacagtctctcctggtgtctaaccacaggctttcccgctactcccctctcactctctccttaacacacaggggctgaactggtatctgttcccttcattgtttcctccctctgcccattctctcccaagaccaaatctgagctcggagaggggggccatgagaaggccctgttggccccatcctacccaccctttctgactgtaacccagagagggaaggagcgtggaagtgagatgtgacctaccaggtccctgtaatggaaaatctcaactgcaggcccggagggggccagttatttagggaattcagatgttagccttgtgccctgagagtggatttgctagaggagaggctgataatccctctgcagggagttccctctggggccagagatggacccagcccagccagcaggcaccttaggcctctggccaaagccccccttccctccctcccttcctctctgctttctttgcactcaggacacttagacctgccccactccgctggcttcccctcactccatctctgtgcccagagaaacaggggtactccaggggaatcctgtcctctgactgttcccagtagaaggcgggagcagaattttttcttttctctctgccccttctgggttccccttcctctctgtgcccctcatcctttggattactcatcaaatgagcagcaacaacacccctagaccagctggtcctgtcctgggtcatctcgttgtccccagtttctagctggtataaggttaaagataccctttccagccccaggcaaagccttaggcatttctgggattgctcctgactctgatgggcatcctcactcctcagacatttccaatctcccccacttcactgcagagaggcctgttctccagcctcagtcctgcatgctgcagctttgcttccccttccccactggaagaaggaaacagtcgctctcctttcccgttcacatgtctgatatttgctatgatattgaccttcacacacatcttagaggttctgtattttcctctcttttgacttctccctatcactactctactcaggcatagattcagtctagagctcttcaacagcaatgaaacggtaaacgaggggtaaacaaaacccagagatgtcatcaggtgcctgctaggagtcccacccgttcccctctagccctggcctgcccctccctaccagagtcttgattctccttcaaaactttggagaggttacatctggcagggtttggggacaccctcttgcctccatctccaaacttcccgctgcctcccgagccacctttgactcctcctgggccccccttccaggtgcctcaagtgcagaggtcagccttcggttcaaattctatttctgggcttcagtgtccctgcaacctctataatagaaggaacagagtggtctatgtttctttctttctctgggagattggatgtagactcgggagacctgagttctggctctgtcttatcaattcaaattgtttaatctctctgagcctcagtttacccacttggaaaagaagagttaggccacatggtctctgtcatcctgggattctgagtcaactgctccccttcagccagatccaagggggcatatccccccaacctgggacccaggcccccttcccttgcagcctctctcagttgtgagtgccacaggccagagggggttgagaggagccaagggggggcatgccgtgggacaaacgggctgtctagggccagtggctaaaggggcgggaggggaggagtcctcagggatcctgtttcaacaaacgtttctttcggaggaggggaaggcgggggagagggggagaaggacctatttaaagctaccctgttgctttggctttctctgtctgccagggtctccgactgtcccagacgggctggtgtgggcttgggatcctcctggtgacctctcccgctaaggtccctcagccactctgccccaagatgggccgtggggtgagtatccctaaagagcaggggtcgcagtctagagggtgagggaggctgctgaggaaggatgaagtgggaatgggatgtgga

SEQ ID NO: 3046 - DNA, 2300 bp, Homo sapien
ctcagaaccaacctggattcttaggagtctttggatttgattgatgcttctattccttgtggttctgggcctcgctgcccccttcgataacctttgctttggccagggccccagggtctgggagggccaagaaggcattctggccaggtgaacacttggggcctacttcaggctgcttctaacctttgttacatcaaaagacatgtttcaccatgcacagactacccagtttgccccatccctgttctgggttctagagataaacaaaggtcaataagaactcccagagctgccatcacttaatggcaggggtccaagcacaactgaaacctgtgccctctgtggtaaagccagtgagcagagtcagggctgcatcagagaaggagtaggagggaagagacagaaagaggcctcactagaccagtggcctctgaaaatagggcaaaggaggcctcatatcccaatccacacttcccctgtccattactcatttctcctcagtgtattatgtttctctgtggtttttttcccttcttcgacaagttggaattccactgcttggaatccatgagggattggttccaggacccccttcgttaccaaaatctaaggatcctcaaaggccctgatatgaaatcgcataatatttgcatataatctgcgcacatcctcccatatactttgaatcaactctagattacttataataccgagtgcaatgtaatttttatactgttttgtttttaaatttgtattatttttattgttgtattgttatttttatttagctccaaatattttcgatctgaggttggttgaatctatggacatggaatctgtgaatatggagggccaactgtacaaataaaaatcaccacacattacatttcctaagtttgttttttgttttgcttttgagacaagatcttgctttgtcacccagactggagtgcagtggtgcaatcacagctcactgcagccttgacctcccaggctcaagcgatctcccacctcagcctccagagtatttgggactacaggcgcgtgataccacacccagctaatatatatatatgtatattagagatggggtctcactatgttacccaggctggcctcaaactcctgggctcaagtgatcctcctgcctcagcctcccaaagtgctgggattacaggcatgagccaccgagcctggccaaatttcctaaatttttaatgtactgagattttgaaatttacatttcccacaattgatttattcagaaatgcctagtaatacattcctattgcttactctgcaattggctttgaaaagaggaaaggaaataaatgagatatttgttgagcacccgctatgttccaggcactggcctaagtatattaaagcacaatctcatctaaatattaaaacagcaccgagataggaattcaaataaggattcaaacccaaatttggctggctccaatgtgcatgcttttttcaatacaccacccttccttcccagaagacccctgtaatgtcacacaagggttagcaattgcctggcttcctctatagagattcatgcctaatgttgagaaagaaaatcttaagactggatggaaaatccataatgagtgctttactttgtgttcataatatacttttggatggtatcaagtatgggaatgattttaccaaaatgccacaggcaatttttatttattgaatcttgtctatttgaactttgagattatttgcaagcttctccccaggctcgagtacaagagaaaataatttgctgttgtattgattcaaggattggcgatctatccagggaaaggaaggccaagtggggacaacctactgaatgtggcctccagatctgcggctttggctcacctatcctgtgatgattttccttgctcaggaaataggatgggactgcagtccctgggagccacaaggcacccaacctgatgccccaccatgttgcaggcactgccaggggcattgtgattgccacaggagaccggacggtgatgggccgcatagctactctcgcctcaggcctggaggttgggcggacacccatagcaatggagattgaacacttcatccagctgatcacaggggtcgctgtattcctgggggtctccttcttcgtgctctccctcatcctgggctacagctggctggaggcagtcatcttcctcatcggcatcatagtggccaacgtgcctgaggggcttctggccactgtcactgtgagtgggtcaggctgaggtgccaccaggggagggtctcactactctttc

SEQ ID NO: 3047 - DNA, 2300 bp, Homo sapien
ctagcaattttattaatggttaaaaaaatggaaaatatctcataaatccatcagtaatgggaatgattgaatagagcatggtcaatacagaatatggaagcctcacagcactgaaaaaaagaagctttatgtacatgacaggttggtagagagttgaatgattgtttaaaagttgaaaaatacctccttttagatatctatttgtataaacatagaaaaaagactggaaggacatgcagcacattgttaccagcagtaacttcagcagtggggagaatctgagtttggagggagggaaggtggggctttcaatttttatcttaaacatttttaatagagaagaaaaatccaatctgttaaagaaatagacgatcatttatcccagctgggaagggagcatttctatttctgaatattcaaggaggattgcatcagcaccaagatgaatgtttccagatacagtcatatttttaaaaagcatgcccaaccaaaatgcaattaaataaatatcaggccaggcttggtgtctcacttatgtaatcccaacattttaggaggccaaggccaaggattgcttgagcccaggagtttgagaccagcctgggcaacacaggggcaccccgtctttactaaaataaaataaaaaaaattagccgggcatggtggcacatgcctgtggtcccagctacttgggaggctgaggtgggaggatcacttggacctgggaggttgaggctggagtaagccataatcgcaccattacactccagcctgggcaacaaagtgagatcctgtctcaaaaagtaaataaacaaatatcaaacaacagaatgggaaaatctatgtgacgtgcataattgaaaaatatatataatggttgacagaaaagtatagatgcttcagattattcttggaaggaggtagaatcctatggacatgcaaaacatatatacagttaatatagtcaaagcacttactgagacaccagagaaggtcaatggaagaggtaagtacatcattttaaaatgagaaaatgcaacgctatcacatggaaaagcatatttttaccctcactgagaagagctgcatattaatccacaaataaaactactactgaattcaagctacctattgagcacatactatatatgtcacatagtgctttttgtagagcacctcacttaaggtagaaggtatcctcttttaaaaataagaaaagagaggtacagaggttaggtaacttgctcaaagccacacagctgacaagtggaggagttgggattgaaatccaggactggttccagagcccaagatctgatctattctgctagctgatctcctaaaattaaaagatcaaacccaatgttagtggaaaagtgtgccttgctaaaaaacacacacagagtacctgctttttttttttttttgagatggagtctcaaaaacagacgggagaatattagtccaaactgcaactgcaccattttgtaagctccctgctatggttttttgtttgtttgtttgtttgtttgtttgtttgtttgtttgtctgagatggagtcactctgtcaccgaggctggagtgcagtgatgcaatctcaattcactgcaacctctgccttctggattcagatgtttctcctgcctcagcctcccgagcagctgggattacaggtgcccaccaccacacctggctaaattttgtatttttagtagagatggggtttcaccatactggccacgaaggtctcgatctcagcctcccaaagtgctgggattacaggcatgagccaccgcgcccggccgaatacccgctttatttttgagtcatctatttggcatacctctaagcctccaaagtctgcaggaccacacaagaactttgttctagttctgccctcagactgaaactctttctgtagcagggcctgctccaatcgtcctcaaacccaaagactgagacttctaggttcttggttaaaaccttcatgaggcctttgcgacagcagacctggaccatcgccaaggcaagacttctggattcttggttagaactttcaggaggcctttgtgatgccagacctgggtcattgccccagcaaccacagggcctgggactggggggttcccagatccttgaagctcactccgcctcctcactctcactgcatttcccaccttcctgtgggccttgcggcatcttcatcactgaggcacctggttacgcttcacctcttgtttcctgccctcactgcattccctcacctctacctttttatccttccaccctaggcttctct

SEQ ID NO: 3048 - DNA, 2300 bp, Homo sapien
agtagacagggtggaaaatggcctcagggcagacaaaccaccccagggaaaagggatcactagcgtctcttttgttgttgaacctttcaagtgcagggtcttcctgatatgtaaataggtatcaggaataatttagctctcaatattacactgactccttctgcccatatatttcggtgtcttctctttcctcaatgagagaggaagcaagtttcaatggaaagtgcattggattatcagtcactgagagtgagttctagtattggctaaatcacttaacatctccagacctcaatttattcatcagtttatggaggaagattaatttggaattatagaatcctacaggaaaggacttcaaagatcatataaattcaacctttcaaccagtgctgaatatcctctataaaacccatgggagatgattattatttctattaattgggaagcccacccctttctgtctcaattcgtttcattgttgtcttgctctatttacatttcactgtgttaagcagaactataaatccctgtttgtcctaagtttcccagctgaagaaacacaaaataagtcaattctttctcttctacagactagccctttagatttttgatggtagccattatgtcccctcaaactctggtggtagcaggtgaaataatccctcttcccttagccattcttcctatgacatggtctgtaggccacctgtcttgatgatcacctgttgagggtatgctctagtttgtcaatattcttaaaagagaaatgacaataatacttggggtgtgtttggactagcacaaaaatgtagggactagtgatattatgtaaatacattataacccctaatcctgttattagaagcccatacttagataaccacagcctaagaattcattagcttttaaaacaatcttgcttcacacttgacttacattgccttcacaatcaacaaaagtcttttggtttaaatgatttttcaagtccttttcaatgctgtgatattattgttatctcctccacgttctttgtttaaactattggtctgccgggcgcggtggctcacacctgtaatcccagcactttgggaggccaaggtgggcggatcacgaggtcaggagatcgagaccgttctggctaacacggtgaaaccccgtctctactaaaaatacaaaaaaaaaattagacaggcatggtggctggcgcctgtagtcccagctacttgggaagatgaggcaggagaatggcttgaacctgggacgtggagtttgcagtcagcagagatcacgccacagaatgagactccgtctcgagaaaaaaaaagaactattggtccaacaccccctccacacctagcatcttataccaccataaaagattagctatctatgtggtccctggaaagattggacttaaagaggtgtggcctaaacttgaatgaaaaagagattgctgaatagaaaagatgcaaagatcctgagggagcagaatattccaggggggaataaagaggatccctgtctatgataccctggtaaagaaatacactcttttttggccaggcacggtggctcacatctataatcccagcactttgggaggccaaggcatgcagatcacttgagcccaggagttcaagaccagcctggccaacatggtgaaaccctgtctctactaaaaatacaaaaattagctgaacatggtggtgcatgcctgtagtctgagctactcgggagcctgaggcagaagaattgctttaacctgggggatggaggttgcagttagccaagatcatactctgcactccagcctgggtaacacagagtgagactctgtctcaaaaacaaaaacagaaaaagacattttttttaaatacactcttttttgaaactcttaccataaagcacaaaccacaatcactttcctaatttcctttaccacagccagaaatgaaatgtgtaaagagtaggtgggaacaaaagggaagtaagtacaaaaaatcaaaatagcattaaaaatgatcaaatatccacaatgcaaaatggtgtgagtattccatctcccatgtgtattctctcctctcttcttggctttaggtgtgcctgaccctcacagccaagcgcatggcgcggaagaactgcctggtgaagaacctggaggcggtggagacgctgggctccacgtccaccatctgctcagacaagacgggcaccctcacccagaaccgcatgaccgtcgcccacatgtggtttgatatgaccgtgtatgaggccgacaccactgaagaacagactgg

SEQ ID NO: 3049 - DNA, 2300 bp, Homo sapien
ccagacttctccctccgtctcttttatatgtaattttctatcaagatgtgattttcttccgtgacctctgagattactagtaggtcttgccatcacctcctgggcccttcacttattcaacacattttactgagcacttagaaaactgagctctttaaactttttccagctttctgcttaagtgagttacggttcttcctcttaattgcttaagcatattttgaatgtaactgaacaaacgaacagaacagttgtaaccacgttttgtgcactggtttcccaccctgcttaccctgtgggcagtacagtccggcctcctctgcactcccgctgttcctttcaatgcatcgattttgttctcaacaggcgacctagcgggcatttcctgtccatcacaagaggaaccccatggagagctccttttcatacatcagagatcaagaggaaatgcaaaacccacatttctctctccttgctgcgggttgtcccctcgggttcatttcatgaatgtgccctttccctcccccaccacagccacaaggactcccatgcccaaccacactagctagcccctctcaggagacttctcacgcttttaggagacagaggcccagggactagaatgactaacttatttttggattgtacttcacagttttcaaagtattttctacactatctcttataaaaacccaatgaagggccaggtgtgtggctcatgcctgtaatcccagcagtttgggaggccaaggtgggcagatcacctgaggtcaggaattcaagaccaggctgaccaacatggtgaaacccccatctctgctaaaaatgcaaaaaatcagccaggcatagtggcggtgcctgtaatcccagcagtttccgaggccaaggttggtagatcacctgaggtcaggagttcaagaccagcctgaccagcatggtaaaacccccgtctctgctaaaaattcaaaaaatcagcccggcatagtggcggtgcctgtaatcccagctactcgggaggctgaagcaggagaatcacttgaacccagaggcagaggttgcagtgagctgagatcacaccactgcactccagcctgggcgacagagtgagactccatcttcaaaaacaaaaacaaaacacaacaaaaaaccccatgaaggaggcaaggcagaggcttttatgttttgtcgaaggaactaagattttgcaaagttaaatggactgacctgaggtcataatgcattcttgctagccccagaacacaggtctttggacttttttttttttttttttttttgagacggcgtctggctctgtcacccaggctagagtgcaatagcgcaatcttggctcactgcaacctctgcttccagggttccagcgattctcctgccttagcctcccaagtggctgggattatgggcacatgccaccatgcccagctaatttttgtatttttagtaggagacggggttttgccatgctggccaggctagtcttgaactcctgacctcaagcaatccacccgcctcggcctcccaaagtgctgggattacaggcatgagccgctacgcctggccttccgactctttttctttcctgtctactctcttttctttctttgccagccccactatttctgctctctcgccatccagttggcaaggatgcaggggaaaagtgagagtgcctggttctgcccccagggagcttcaggctgagaagataatggagattcctgtgcaaataataccaggctgcagttttctggaaaaaggaggaggggctgggttcaacctggggcgagatgtgactggggaggggagggaacaaaagaaatgggggtatgaaacacatttttttacctttgaaaccttccccttctttttgcccctgatccttggtctctcctcctgtcccatcagtgctccctttgctctccctagatgtccatccaccttcgggaggacagctcccagacccacgtactgatgatgaagggtgctccggagaggatcttggagttttgttctacctttcttctgaatgggcaggagtactcaatgaacgatgaaatgaaggaagccttccaaaatgcctacttagaactgggaggtctgggggaacgtgtgctaggtgaggagctttgggagaagtttttaaaagaatggcatcaaaatggttattatccctggggtgagaaatcaaggatgttggggtaagcagataggaatgtagagtgctggatgactactggtccctccctctgtctctctccaggcttctgcttcttgaatctgcc

SEQ ID NO: 3050 - DNA, 2300 bp, Homo sapien
tactaaaacatatggcaatccacatcataatcatgattaccatttcattgaaaccttgtataatcctgacactttgcttggtattttatatccactcaattcaataagttcgtttgaacactgactatgtgggaggcactatgcttgatgctggggatacaacagtagggagaacaaagacacaaatccctgccctcgtgtaacttaatttctagtggggatgacaaacaataaaataattaaattatatagtatgttaaaagaagataagtgccatgggacagaccaagcagagagtgcagagagggattcgatctttgaaaaggcagtcagagacggatgcagcaatcttgcaaggcaggaggaatgaagctcacggaggtgagggtgcccaaggtcacagctagctatggcagaagatgggatttgaacacaagcctgtcccaagccctggctgtttccattccagccttaatcttgtaaaggcttttatactgacattctcaaacatcgcaggattaaccaggcccaaccctgctaattttcagagatcagataacgttagctagggtgaatctaagaacaaacagtacacagacggcatggctctgattaaaaggcacacaatttagaaacaatactgggaccctggaggtctaggacctccagaccctttcctggactgtgacacttctttgaggtggcctgtctgtcccggagctggtttgagggaggcgtgttctcccagggcttctcacaggaggttgaccttcctccccaggccgcctgatctttgacaacctgaagaaatccatcatgtacaccctgaccagcaacatccccgagatcacgcccttcctgatgttcatcatcctcggtatacccctgcctctgggaaccataaccatcctctgcattgatctcggcactgacatggtaagggccaagctggtgagcaagagattcccagaattctgcctcctaagctccctgctttctgcctggagctatcttactaaaactcatgacaacccacttatgatccagctctcgcacctcctgcaagatggattgaggctgcgtcaagacagaatggtagagcttgaattactgctgggtttccttctgaactttgtgacccctgtcatccccaccctccatcctccaggtccctgccatctccttggcttatgagtcagctgaaagcgacatcatgaagaggcttccaaggaacccaaagacggataatctggtgaaccaccgtctcattggcatggcctatggacagattggtgcgcccagaggaatgaggggtggagggagcagggagtggtttcccctgcctggcaacgtgagccatctcagtttggaagtcagggagatattttctcagcaacaaactgtgctaggccctgaaaacacaaagaaccactcatctctgatctgtccttgacttagagtccagtacaaaaggaacaaacatacataaaatgatagcatctccaagtgccaagtaatgagtatagacagaacatactacaggattacaaagcaagcaggctcaccattatgaggatagccagagaggccttatgcaggaaataggacttaaacttggtgtgggagagtggggcttagactagtaagtgtatggtcaggtgtgggagaccaaaggagtggggaatttcagatggcacagttaaagaagactgaataaaccaggttggtagagcccttagtctttataaagtagtgaaaaataagactgtagacagagatatcatttgtgttggggtcagccttgacagacatttgagagtcattagaagtctttgttcttgattttccaggtgcaatggtatttcagaaaatagggtgagtgatgaacagagtaagatcctgtctcaaaagaaaaaattgggagagggaatcagtggcctctaaagtcctttttagttttaagaccatgtgattcaaagctgactctgggtcagagtttagaaacaaatgtcagggcttgaaggaaagtcccacagagatgagagataacaggcttaggcagctgatggcaagattcttccgcattactcttcagacacacaccagcccagccagaagcaagtcccagcccccagccctcccctggcctaccttttggggcccttctctgaaccaggctcccctgtcctgcaactctgtcattcacagggatgatccaggctctggctggattctttacctactttgtaatcctggctgagaatggttttaggcctgttgatctgctgggcatccgcctc

SEQ ID NO: 3051 - DNA, 2300 bp, Homo sapien
acagaggccccaactcacggtcatttgataccagtggctgaggcttctcaagtccaagggcctgaagggaaggagactgagtagaaagtagacagagtgaagcatcaagagagagcagtgggggcgggcgctggaaaggggaagggtgggactggagccagagagggcaacgagagggaacgggatggatggcaatgtccggtagctgtaggaaaggaccaggagatggaacagactcgccaccagagtcccatctcatactcttgggggtacaaaaggtcagattcaagatggaacaagttttatgctccagcgtctctgtcccagtgtctcccgcctcccctggaatgcagaagtgagaaatcagggctggacatcacctagatcatctgcttctgggcaggcctccccatctcacctggctgcctttgctctggccttggggctttcccacgttagccactcttcagggagaccaggatatgggcttctgaggtctcttcagctccaacgtgctgtgcttaggctagctccaacctctcctgctacagtgacagctgtccctcttggcctcactcctgccatgcttttgagattttctgtggccttccgtgttcagctgtgtaaggtccaccacacagacatgtggaaaagttattctgctaacataattacatgaccctccctggatgcaaaacaaaacaaaaaaaacaccactgtccctctagaatcagagatacctcagggtgcagtggcagcatgtgactttgatctgaccctctatggtctccctcatgcctcagtttacctgtgcatagtaagaaccctggagggccatgaagaggatccttccttcctacgtatccagagttaaactcactactctgtcctcaccccccaagctggatccagaagtttaagcccctacccgcccatctctgctttggatctcgggtgcacagaattaatcatcagtcttggttcagggcacagggttcacctcttcatgcttgcctaatgttaatttttttttgccctggtgtcaatacctgatcctctttgtcttgtcaaagacatgggaataaatagtagctattcactctccttggaagcatgcagcctgggaaaacctcccttcccactgtgccccagaaaaccgagtcccataggatcagggtagggagtgcacacacaggtggcaaccaaaggacagaccccttctcattgtgggctttataggcagagaaaccccaaacccacatctctacaggacaggatctgggccagccctgtccttccctgcattcccaagttaggagtgctgagtgaagcaaaggaaactggctggagctgagccaggttgccagtcttggacgcggctccatcttttattcagagaatgacctcatccttggtcctggttctttaaaagaaagtggagggggtctctttcctgcagcctggcttgcacttttatcgccccactctcctacatagtatcaaagaatcagaatcagacttcacctacagaagattcccaggctttaggacatagagccaataccacatttgtcccccttttgtcctatattatcaatttagcctctgacccagttagctcctcctctccactgcatttaacttctaattacccttgccccaccctcggcccaccctaattacccttatacctcccctcccccagccccagcttcatttacctccgactcatctggtcttatttttagctccggcatctctccttttcctttcttaatatggcgatgagctcttaggccagtgtggggaccggggctgaggtgccctggacactggaggagggggagggaaggagcccctgggagcctggggtagaagtgtaggaggtgggaggattccggcccgcatggagctgtcctggcctcagaaggttatccgtctctcctgccaaccatggagacatatttagacaggaccaggtggggactgaggggtgccaatttcagggggcagctccggttccctccccgccccctgctcctattcctccacctgaccctttttcccttggctctgtcggcagtttctccaggacccagcagtgccctctgtccactgctctgggccattccccaatcccccctcccacttgagcccctaactcagaatctgggacccaggggcccctccctaccccagctaacctcttctggaccaggagagccaacccagatcccactacctccatgagtgctacagacaggatggggcccagagctgtgccgggtctgcggctggca

SEQ ID NO: 3052 - DNA, 2300 bp, Homo sapien
cccataaataataaacattatatatatatttttgagatgatgcccataaataataaacattatatatatatacatatacatatatatgtgtgtgtatatatatatatttttttcttttttttttttttttttgagatggagtctcactctgttgccaggttggagtgcagtggtgagatctcggttcactgcaacctccgactcccgggttcaagagattctcctatctcagcctcccaggtaactgggactacaggtgcccaccaccacactcagctaacttttttgtagttttagtagagatggggtttcaccatgttggtcaggctagtcttgaactcctgacctcaggtgatccacctgcctcagcctcccaaagtgctgggattacaggcgtgagccaccacgccaagccaacattatatttttcatggatcaggtgtaaagttgttgctgagagacttagaggatttctaagtacggaaagatgagacctgagattagatatattttcactctccacagacaagtccaggaagtgttcctagagaatgtggcaggggtgtagaaagcagaaactatgtattcattccaacttgtagctatttaataaatgtttaataagtagtatgggcactaagctagtcttacaataatattgtggagcttactgtctagcataggtcagtggaaggccccggtctaaataatagctcctattttttaagcacccatctgtgccagtccctagagacttactatttctgaatctcagaagaaccctcagaaatagacattggcaccctgatctgaccggtgaggacactaaggctttcaggcataacttgcccaaggaatgggtggaactagcacgcagcccaaggcccctgtgtcttgttgcctccagacctgagcctttcacttagaaactacatgagtctcaaagatgggtcaacgaaatagtttttgtccctacaacacagagcaaacatgatatatacaaaggcaaatgattagtgtgtgacagggaatgctggggagaggaaacagcagagaaatgctatgaaacccagagcagcaggaacttgggcctcttctaggaatggtgtagacccaagaaaggaggggctcgtttgaggtttctggaggagtctctgccaggtaggaactgagatgagatgggtgatcctggaagtggcacaaacactgaggggaatcccccaacctgggcctgctggagttcctggcaggaaggacctacccagggtcagacttctttccagggccaaaccctgcccagagctgaggcaagaccccttaggctatagagatgggggtgaaaacagatgcttctccaattcttcctttcctcttttcagtctggctgagaatctgggggaggaaagtccctggggtagaggggaagtgagagctgccacattgggcctgggcagaggggcagagctaggagatggagctaagtgtggctttgcaagttgtctatatttgcatgctgagctcactgctgctctttttctccccagaaaataaaattacatcatggtagggggaaggcaggagtggggcatgtttgggaaaggtgagaggcacgcaagagggcctgaaggcatcatcctggaaagagaagatccagggctcctcaagtccccatgtggccccaacccctcactcccaatgtggataagtctgatcagtcattttccactgcgcccctgacccttaaggcaaggcaagaagtttttacaaatattaaagccagcagctaagagaatccagcccccaaaggctttccaaccccctaaaccaaacctactctgtgcctcccaggggtcctaggcaccgtggtcatccaaaggtcaaaaggggaggagggtgccctactgggtaagaattaaatatgagaattgtttcgcagttcagggggaagagaccgtctccgctccagccctccgcccaattctgtcccccatcctaggagtcttccagaaccccagcccctcggtcccccgccccctcctgcctctccatccctccccctcctcccgccattccccgccccccgcccctccccggctctgacatcaccggccagccgggtggagtgagcggcgctgggctcgggctccggctccgcgggcggaagaggcggcggcggcggcagaagcggcggcggcggcggcgggagccgaggaggaggttccggacgctgcttaggaaccggggactcaggagtgcccgcgccctgagcgctcagctccagaggcggtgagaggggcgga

SEQ ID NO: 3053 - DNA, 2300 bp, Homo sapien
ggatagatgcctagttgcttggtctgatggttccttggccccaccatgctagccttgtattcagtcattagggttcgaggtgggggaagcaatggaccacccccacctttgtggagcccattttctcctttgatggttaccaggcccccactcagctctctctcctaccctttgtgctgtgcctgcagcccccgtgcccaagaataccaagcaactggctctggccccctgcccagttcccaggctggctgggtggtggggggaggggactttagatgcggctttgggagaatggcaaaaggggactgcccccccttctcgtatcgtatcaacatcctactggcactaccttcagcatggtctgatgagatcagcaaggccagatctcacctaggctttcaccctatccctctttcatgatccttaggtgagaagtagagaacattcaaggccttccttccactaagataggaactgtggctaagacagaagaaagaaggtcagatgtttgaatggactttctggatttgataaaatgtgacactagtggtaagctcaaaaatggaacttatttccacaatgagtatctatttccttttagtcagaaaagtaaagcatgttttaaaaagtaaattgtatcataaacactctgtatgcgactagaccaaggggtgggcaagcagcaagatgaccttgtccctgacggaggctgcctgcaaatcaccccagcattaggctgggaatgtggcagatcaaaggggcttggttgacacattcacattttccttcttgctctactgcaggggaactgagattggcatggtggtcacaaaataagagatacagacccagaagtccccattcccagccccctacctggaccagaataaacaagcctcccttggtggcaggcaccatgacacaggcagacaatgagccagacaggagggctaccatgacccccgcaagaaacaggcagtcataggcatgctcagttgcacacccaggtgcaaccagacagaagggcccagcagtggccctgccaggccgggccaggaacaatgctctctgactgtcagcaccaggaactgtctctgccttgaaatctaggtcacagcagcaagctctggagcccaacccccctcacttcactgataatccaaggacagaaggaggggggtacgggtgagggggatgatggggaggggactagagatggagataagaatgagtaggggggcatgagtacaactggaagggaaagcgcagcaggagacaagaagaccctgccccagtggaggaaactctggggccaagccctcagctggaaaagggggcaggattgggggttatacttccctgctttcatatggaaggagagtttgtaaatattacagatcctgcgggaggaaagagtgcatctgtgtgtgtgtctgtgtgtgtgtgtgtgtgtgtgtgtcgggaggagttcagatttagggctttgaatctaaaacagatctacagaggaggtaggcgggaagagattaatgtgtgtaacacactcacccacaaagacttgggggcagtgggtaggagctttctaagagagtgaaagatacaaggaggcccctaagagagatgggggtaggaatgttaaagtggcagaggagaaatgtgtgtgtgctcggatcttatggatgctaatccccgggttgtgggcacagctctggaggaggcagtggctgggtatctgtgggtgtgtttggatgttctggtaatggaggtgtatgtgccagcactggatatatggctgtgggtgcactggctgtgagtatctgtcatgtgtgtgtttgtatgtgtctaaaccagccaagagcatgtgtaagaaggcatataaccacaggctcacatccagaggggtgaggggagcctacagaatggagaaagagagctggagttgggagacagaaagagactaaggctgcaaatgaggcatggggggcgagggggaggagagcatacagtccacaactatagaaggctgtagcctcatctcatctgttactatagcaacctcagttctgggtgccccccacccccagtcgttaggatgacaccactagatgggaggagtgtagggaatggtgagtaagaagggacagaaaggataggaataaggccccctgacggtacaaggaaaggcagcccagttgcctcccttcttggagagatccatttgcctaggccttagtatggcagaagaagcaaagggagtgttgtttaggggaactgctctcaattctcactgatcaacagtt

SEQ ID NO: 3054 - DNA, 2300 bp, Homo sapien
gataaaagctataaagagcattttttggacagttgggaaaattagaatatggtttatacattagataacatggtattcaatattaaattgatttgattacttagaatattcttgtacttaagagatacatgttgaagtatttaggggtgaaatgtcatgcgtacattcaaatagataacaaacacatatacatgtgtacatataaggagaacgcaaatgtggcaattgttttttagtagctgagcagtctgcttgctgtataacccatgatcgtatcatagtctgcctggcctttgagttctgcagccctctgtggagttagggcaaaaaggaagagtgagaatcgagttagggaatgaagagcaatcagctcttaagatgtatctggttaaccttatctttttttttttttttttttttttgagacctagaattaggaaggagttcaatcgctttctgttacaaggtttttggaccacaggagatgggaaaaacacagtttggaagactaaattatactgattgcccagaatagtctggttatccaaggcctctaaggaatgactgagacagctaagtctctcttcctttttattccttcttagctgtggggaacttcaaagagcctagccatctcttgatgaggttttttcagagagtggttttagaatttagaatggttctttgcaatcaggatcccattccttatgtttttcttgccctggtgaaagggtatttcaaattttcttctggtttcctctaaatttcagggacctgggacctgcatagatctagggtttttatggtttgaatacaaatggagaggagtctagaagttcaaggtgtgtctcactcttccctgcttcatttccaactcttccataggtccccctgtgtcatctgcagtgaacaaacccaaaacacttgagtcttaatgggaattatgcaataggcatttagagaaaggaagtcagaaggggccagtgaattttttcttgacataagctattgccttgcattctgttccagagagatgcagggctgaatgccctctcccaggccagcatttgtccattctccaaaagcattctgcaggccagtttgcttttagctcagccaatgccagggtttgatgattaacccatttgcccaggtgaggaaggcatctacttgggatgggtgggccccaggcctaagttttagtggtcctaagagtaaatgagtagaataagagatatagaggctacccctgaagcaaatttccttacatattcttgtctctgtgtaagctgaatgatcgatgtggtcttttacttggctccctctgctctgttttttggtcctaattttccagcagtgggggttaccaggcactactttcaatgtagtagactcagcagttctatatcatgcaaattgtaaatgtagagtagaatgtaattgtaacgtagaatgttagaaccaaagatcttagaagttattttctgccttgcccagatctcctgactgatttgaggatcttttctttgttcccattcagcttcacagggacaagggttgggggtggtatcagaggacagccccttagtctcccaagagcactttgatgcttgatcccattctctacattcccccagcccagtcatctaaggccagagctcttttctctgctcaggcattattgacaggataagtcctggcattcagacaggtctggtgaagtgaccaggtactctggcccagaagttctctgtcggctccccccgcaggctccaattcaggtactgtatgttattctcttgttcctcttgccactggctttttccttagtcttaagttccaaggaattgttcccctgtgtttttttattttcctgacttattcaagcagagctagctcagagtacaggtctgtaacaagggcttattaggagatagatgaaaaagtgcaggtttgtatatgtaagttgtccattactatagatagatactattccaggcattggactttaactgcactgcctaaaagagcccaaagataaacttcacaataggctgatatgtggaatgggaggaggagataaagaacggggtttctgttttattcataagctcagtcttagcttcagtcttttctgagcatttgtttatttgtaagatggaagtcaaagtaagtgggaagtctgtaggtcagctctattttccatgcctgcccttgacttctcctcagctgttctctgcctgtgcaggtgaggcagcggaggtggttggtccagagagaactaaaagaagttgttttct

SEQ ID NO: 3055 - DNA, 2300 bp, Homo sapien
tgatgaggatcactgtatagcccaacaagaaggaaaaaatgtattcccttcatggcaaaaaaggaaagtataaagaatagttgcagtagaagtaaacaacattgcagcagagagggaaagaattacaacacggccaactctgatcaggtgtgctaacagagagtccaagatgaaggaaccaatgaacaaaaaaatttactgatgtttaagaatacattttgaaatatacatacaccaatatctaatattctctgtcctctggttatgaacccccaccaagggtttcatgttcagaagacaactctaggtgggcacttacaaaggacacgtctaagctgaccaattaaaaatcagttgggaaaattaaccagaaaaatgtgttctaaggcaaaatgtaaaagaagcataaattaacgtataacttattcaaagctgtatcaatgatgtgcaaaaaaaaaaaaccaaaaaacaacattttttgagtgtgtaccacgtgttcttagattactaagagctttaaatagattccctataatactaacaatgaccctgggaggtaagtggtattatcacacttttagagttgtggaaattaagagtcagagaagtttaagtaacttgctcaaggtcacatggctaagaaatattagtctagtatttaaaccttaaaattaaattaaaagtctgtccaatctctaaagactgtacttttctctttatatcttactgatacacatatacaccatcactaataattttattccagtccatgatgagcattttctaattcagtcatcagatggaataaaactcaccagtgtcactcaatattttcctactacaaatcataaagatattaggaattggccaggcctaccttccagtcacttagcttttctgtcacatgccatgagcctctagtctctgctaccagaaacctgaaagcctcacgaaaactgcatttataagtatgttctgactccctttttggcaccaacccatgctgctgaatgcccaggatgtttcttctgctaaccaagaattcttcagaccagctacaaaagaaagagcagccactattttttttttttttttacaaaaaatttcccactatatcctaaaaagtcggaattctgaaatagactggactcagacaccaactaaaggcagcatcactcatcactccccagcttttagtcacaagcagctaaatattctcctctaaataccaagggatgacaacccgaagctgtgagaggggaagagacctgatttgacaacaggatgaacagaactcaggcaaactaagttccagtttttaacaacgtaaaaaatatgatcgacacaaagacaaaatacaaggaaaatgaataaagaagaaaagaagacatggggcagggggcacacattcacttctaggcttaagtcatttggagatacacagcaatagtttaggacagaaagacaagaagcccacagacaattaaacttgtaaaagtaattcaaccagagctggaacaaagccaagaacaacactcaagctctttgggaaactggtaggaattttatgactttagtggtcagcagttgagcatcagcgcagtctgtcttgaactcaagaattttaatgcctccaactcccactcacctttcctccttttatcactgaagtaaggccaggctgagctcctgagaaaataggtctgtagattcactgaaggactgagaaaagttaaaatttacatggcaaaggtgtgtcttctactgaacataataaaaatatttatgaatacactttagtatttttaggccttctcaaaactacttaaaagcagaatactttatctaattctaattactgaacaaataacccacacacatatggaaataaaatgaaccaacatgaagattagaagccaggcaagtaatctcccagctccactaaaacgtaaagtcatttaaaaggataacctgaatcttttcaacgctaaaccataaccaaacaacctctcaacaagaagccacagagcagggggggaaatcccggagagaatgtgatagcgctagtgccggtttgtttacagagactccagtaacaatcatgagtcagaaattcaagccaccagatgctttccaactaacagggaccaaatgggaccgttctaagatatcctaaaagatttgggagttagaggaggtaaactaagataattatattacaaagggtacaagaccacaagacaacaaccgactccggaattcttggacctccgccttccgtacaaggtgctgggcctggg

SEQ ID NO: 3056 - DNA, 2300 bp, Homo sapien
cgtagagacgggtttcaccatgttggcctggtttcaaacgagtttcgaactcctgacctcaagtgatccgcccacatccgcctcccaaagtgctaggattacaggcatgagccaccgcgcccggccagaccttacatttttaaaaagcactctggctgccttatgtttaactgtaatggcaataatggaagtagacaaacgaggtaagtttctattgcggtagtcttaagtaatatgtaatgacttggaataggagagtagcggtaggggaggtgagaaagggtcagatttttgcaccctgggcttctggtaagaaaaaaaaaaaaaataccccagcctggcagctgggagtaatcctctgcagggttactgtaggtgtcataacgaaacagagtacaaaagtcaccccacatcacccggcccactcttgggaacctttacccacaccacctctcttcagaaaagagcttctggaatagctacacctcaagctactgagccccttctttaaaaatacgtaaatggggactctcaggggaaaatgggcctcgatagtatagaaaccacttaaggaaacaaagccctgaaaggaaacggggattttcagaagaaatccttgtggcaatcattgctcgttccagtgttcaaaaacggcaaaactggccatcatccaggaagtggcctgccaatccgctggaaatttagtttatttctatcacaactctgggtagcccctaactcgcatttgtttagagtatcacaagataagcaagcccgaagaaactacaaaaacaactttgcctcttcggtaatgcgcaggcgcctctcgctctgttttccgttggccttaagccccgccccttgtgcgtccttcgaggagggttgcgagccgtgagctcgcgcgaccactcttccctcagtcttctcgagcacatcgtcgcaaacggggccggaaagcgtggcagcgcaggcgcaagcgcagagagcggaggcggtggtggtggcggccgctggccagtgtaagatggcggcggcgttggtggtggcagtggacggggcggctgggcctggaacagtcggagcagccgctagcagaaggatgacccaagacgggaagcgggctgctgagcctcgccgattcccgtgcttgtaactgccccagccggacaccccccctcccttgacctacccggtctgtgtctcgttccggctcggcctgcgccccccctcgcttcccagccggtttcccctaaggatgggcctgacccgtatcccaagctcttagcgctcaggtcttttccttccgccgacccgaagtcatcgctgggagtactggttgccctttcctcaggtcagccctggtgttgcccccaagagccagccgcacagttcacagggacgccttgcttcgttgggtgacccatgtgtgcgctcctatttctccccttagattgagggacacggctcgccctgcgtctccccgtcacctcagggccaccgcgcaatgtgtccccctcccccatcccaagttcccaggcccagcaccttgtacggaaggcggaggtccaagaattccggagtcggttgttgtcttgtggtcttgtaccctttgtaatataattatcttagtttacctcctctaactcccaaatcttttaggatatcttagaacggtcccatttggtccctgttagttggaaagcatctggtggcttgaatttctgactcatgattgttactggagtctctgtaaacaaaccggcactagcgctatcacattctctccgggatttccccccctgctctgtggcttcttgttgagaggttgtttggttatggtttagcgttgaaaagattcaggttatccttttaaatgactttacgttttagtggagctgggagattacttgcctggcttctaatcttcatgttggttcattttatttccatatgtgtgtgggttatttgttcagtaattagaattagataaagtattctgcttttaagtagttttgagaaggcctaaaaatactaaagtgtattcataaatatttttattatgttcagtagaagacacacctttgccatgtaaattttaacttttctcagtccttcagtgaatctacagacctattttctcaggagctcagcctggccttacttcagtgataaaaggaggaaaggtgagtgggagttggaggcattaaaattcttgagttcaagacagactgcgctgatgctcaactgctgaccactaaagtcataaaattcctaccagtttcccaaagagcttgagtgtt

SEQ ID NO: 3057 - DNA, 2300 bp, Homo sapien
tttcccaagtatgtatagcttattgtctcacttcaaacctttatttagatgtcacctcagcagaggggccttctctgaatcccctatgtaaaagagcacacccatccaggtaacccatttttattctgctttattttcctttacagtactctttataactttattatctgtgtgtctctcccctcctcctatgctcccaacccttgcactaataagttccatgaatgcaagaatcttggttctattcactgttgcagccccagcacatagaacagggccttccagagcaggaattcaatagttgttgactgaatgaatgaaagaatgaataggacggtggggcattaaatagctactttgtgctgtagccctcttctaggtgttgagattacaaagatgataaaaacacagtccttgccctcaagaatttatattctagtagtatagctggatcacaaacataattttagattaaatgttataggtaaaaaatgttattaaaaaaacagtgcagagtaaggggatagaggaggatgacatgaggttccattttagttacaatagtcaagagctgcctgtgttaggaagtaggatttcaatagacacctcaagtctagtaaatatctagtagatggacattccaagaaaaggaaaaaaaccctagggctgggacatgctttgactggagtgacagtaaggctagtgaggctagagcagagctaggcagtgtgggaggagatgaatcagataaataggcaggtgctagatcagatcatgtagggtcctccttagaggcaattcattttttgatggcctctaaggctatcatacttttgacttttattatgtgatgggaattggaggttttgagcagggtggggactggggaaataatacgacattactttttttttgagacggagtctcattccattgcccagcctggagtgcagtggtgcgatctcagctcactgcaacctccgcctccgggttcaagcaattctcctgcctcagcctcccaagtagctgggattgcaggcgcgctccaccatgccgggtaatttttttttttttttgtatttttcgtagagacgggtttcaccatgttggcctggtttcaaacgagtttcgaactcctgacctcaagtgatccgcccacatccgcctcccaaagtgctaggattacaggcatgagccaccgcgcccggccagaccttacatttttaaaaagcactctggctgccttatgtttaactgtaatggcaataatggaagtagacaaacgaggtaagtttctattgcggtagtcttaagtaatatgtaatgacttggaataggagagtagcggtaggggaggtgagaaagggtcagatttttgcaccctgggcttctggtaagaaaaaaaaaaaaaataccccagcctggcagctgggagtaatcctctgcagggttactgtaggtgtcataacgaaacagagtacaaaagtcaccccacatcacccggcccactcttgggaacctttacccacaccacctctcttcagaaaagagcttctggaatagctacacctcaagctactgagccccttctttaaaaatacgtaaatggggactctcaggggaaaatgggcctcgatagtatagaaaccacttaaggaaacaaagccctgaaaggaaacggggattttcagaagaaatccttgtggcaatcattgctcgttccagtgttcaaaaacggcaaaactggccatcatccaggaagtggcctgccaatccgctggaaatttagtttatttctatcacaactctgggtagcccctaactcgcatttgtttagagtatcacaagataagcaagcccgaagaaactacaaaaacaactttgcctcttcggtaatgcgcaggcgcctctcgctctgttttccgttggccttaagccccgccccttgtgcgtccttcgaggagggttgcgagccgtgagctcgcgcgaccactcttccctcagtcttctcgagcacatcgtcgcaaacggggccggaaagcgtggcagcgcaggcgcaagcgcagagagcggaggcggtggtggtggcggccgctggccagtgtaagatggcggcggcgttggtggtggcagtggacggggcggctgggcctggaacagtcggagcagccgctagcagaaggatgacccaagacgggaagcgggctgctgagcctcgccgattcccgtgcttgtaactgccccagccggacaccccccctcccttgacctacccggtctgtgtctcgttccggctcggc

SEQ ID NO: 3058 - DNA, 2300 bp, Homo sapien
tatggtgaaacactgtctctactaaaaatacaaaaattagttgggcatggtggcgcgagcctgcagacccagctactcaggtggctgagacaggagaatcacttgaacccgggaggtggaggctgcagtgagccaaaattgcaccactgcactccagcctgggcaacagtgaaactctgtctcaaaaaataaaaccaatagagatgcctgttgatagacaagttttctttttttgacgtgcttgttacaactatagccatattggagatacacgtgtaagcagtttgaatgagaaagtctggaataaattatgttgcaggtgttggaaaacaggtttatcaggaaaggatttgattacagaagtttagaattgtaaaggacttcaaaagtgattagtggcagaattggggctggaatttaggctttctaactcacagttcataatattttgatcccaaaacacactacttgtggttggaagaaaacaggttttgcagatatgattttacaagtctgtgccctatctgtgaaggacatagtaagtgcttgatctggtgcttgatgcagtactcaaatgtgtgtttaggaagctaagaatgaaagtgatgaggtgacttaacacaggattttttttcatttaaaattcttaccttgtatcatactgtgtgtatatctcatcatacctccggctcacccccacttagctaccttacagcagggggtggtcctgatttatctctctgtcctcactgtgcccagaacaagaccttaataataggtgctctctaagtgcgaaaacagatttgtatgtgaaacagttgctacattctgacatctgaatagaacaattccaaaggaggaaagggacgtctagagttacctctatctgagcattccccgtgttcactcagttggaggttgggttctgtgtggagaaaaggagattgttcagggaaagtaagtctattactactgcattcgaattgccctgctcagtccaaggtaccagaggctctcttaataacatggagttctaagttcctggccggccctgtgtcctttaatcaaacagttctaatagataataggaaatgagagatgccactagattgggcagacagatgtgcctgattagggactgcgagagcaaagagtggccaatgaatgcctactaagttttaaaccctagcctgggagttgggctttacagcagtgaagacaacagacgaaaatctttgcgttcatggtgtttaaattctgcagggtggggagcggagaataaaaaagtacggtagatagtatgtcagatactgttcagtgttaggaagaaaaggaacgggaatggccaaggaaagcgtttcagaaaagataatatttgagggaaacaatgaagtgaagccgggcgcagtggctcacgcctgtaatcccagcacttcgggaggccgaggtgggcggatcagctgaggtccggagttcgagaccagcctggccaaccagcctggccaacatgttaaaaccccgtctctacaaaaattagtcggacgtggtgtcgcgcgcctgtcatcccagctacacgggaggctgaggcaggaagaatcgcttgaacccgggaggccaaggctgcagtgagccgagatggcgccactgcattccagcgtaggcgacagagcaagattccttctcaaaaaaaaataaaaaaaaaaaaatgaagtgagagaaagtagtatgttatgtgccataattgtcatatcaattatatatgtttagattctggttatttgtaggcagtttgtctcaatctggcctactcacagctcaggaaaaaataatgaaagagcttcgccaggtaatttgggaagttgaaagaaaggagtccgggcctctaaaaccagacagaaaataaccctatcttatccctaattctgtttcacaggagaaaagggaaaaatacccaaaacacaaacactcaaagcttcctggccctttaaaaatggcggttccgcactggtcaacaataccattggttacccgaggcagaagagggcgggagcgaaggggtggagggcgtgtcggcaccgaggaggtcccgcctcctacggcaagtcggaggtagcaagatggccgccgctgaggaaggctgtagtgtcggggccgaagcggacagggaattggaggagcttctggaaagtaagagcccatagtgggaaaggcccgaagagggcacgtgtgaggacccattctgggggttaagtgaacctgagatattagggacgggcaggagaggctctccaaaggttaaa

SEQ ID NO: 3059 - DNA, 2300 bp, Homo sapien
gggtctgcaggctcgcgccaccatgcccaactaatttttgtatttttagtagagacagtgtttcaccatattggccaggctggtctttaactcctgacctcaagtgatatgcccaccttggcctcccaaagtactgggattatagatgtgagccactacacttggtcaattggctttaaactaatgtaatataagcatgttaattaaaagataatagatgataattaaaatggagtcaaaaacaagcatgattctttctttgcattatttcttaaacttctttctgcttttctatttttactcctaatattcctaacatctcatctcagtatttactgacctactgactgctccttctgcccttctaatgtatagcgaatactgttgaataacagtattttataacgctttcatatcactctgttccttaaggatttaatggttctccacagtttatcgaacaaattctaattcttgcctgggagtcacaattatttcacatcttgtatttttagtagagacagggtttcaccatgttagccaggatggtctcgatctcctgacctcgtgttccgcctgccttggcctcccaaagtgctgggattacaggcgtgagccaccacgcccggcctttttttttttttaagacaaagtcttgctcttgtcccctaggctggagtgcaatggtgtgatctcagttcactgcaacctccgcctcccgggttcaagcaattctcctgcctcagcctcctgagtagctgggattacaggtgcctgccaccctacccagctaatttttgtatttttcgtagaaacagggtttcaccgtgttggccaggctgttctcgaactcctgacctcaggtgatctgcctgccttggcctcccaaagtggtgggattacaggcgtgagccaccactcccggctaatatgtacattttttttttttttgagacgaagtctcgctcttgtaccccagggtggagtgcaatggcacaatctcattagtagtatgtactctgttgagaaggcagccttagtttagggatgctgtttaaaaaagcaactcttaagataaagctaaaaaatacaacgtatagtatgaagagaagtaaaaaacaaagtgaagctccctaatatattgatacgagaaaataccaaaaatgttaaatgaaaaaacaaaggtacaaaattgttaaatagtgtggtttcatttgtgtataaaaggagatagagaatggcatagtgatatcagcatgtgcatgtatatgtgtgtgtgtgtatatatatatatatataaaatttctggaaggatgtaagaaagctggtaacagtggttacctgtttaggggaaggtgataggaactgggtggctgatgaaagggtggaaagatttgtcacagaatagctttttatatttactgatttttcaactatatgcatttattatttattgaaaacatgaatttaacacgcaaaaaagtacttattttaatcgaaggcacagtaatgtcactctacccaattattcttagcatatgacaagcaaaatattgtattgttaatgtaatcattgtatcattgtaatatatataaagtactattcttttatctgtatattacatgtaaaatatctagaacagtgacagtcacatggcaggtgctcaataaatattgctataattagcaaaagataaaaggctgcaatcaaaaacagaataagggagctacttgctttctatcattttcacagcagtttaggtcctcatatataccctatgaaaaacatgtgcttctttttttctttctttttttttgagatggagtctcactctgtcgcccaggctggagtgcggtggcgcgatctcagcttactgcaacctccgcctcccgggttcaagcaatcctctgcctcagcctccagagtagctgggattacaggcacccaccaccatgcccggctagctttttttttttttttccaatagtggatgtttattttgtaattaaaaattattactggaaggaagatatgtactttggtggggtgcctgcatgggtgaacaagaacatgagagtgtccaagaaataaatggccaagtcaagaagctctcatagagatttatttagtgtgagaaatatgagaacaatagttgtaaagaacaaatcaataacccgcagtgtgcattttggaaaaccaaataacttcttcaaatttctgagtacacagagggtacctgccttgaaatttaaatgtctaaggaaaatgggagatgattaagagttggtgtggcctagtc

SEQ ID NO: 3060 - DNA, 2300 bp, Homo sapien
acccttaacctcctcctgttttctgggtctcctagttcatttcccgtgagtaagagcctaaacagactcttgagcattttgtgccaaaccccactcttttctccacctcctctatctaccctatgcctgatgccctgtacacattgtagtggtggtagcttagcaaagcgctcaggaagaaattcaagagttggtagccaaaggctggtaagtacaaattatttaagagccagtttttggtagcaggaaggccagttccttccatctgtcttctattccctccctctgtgaaagctactgcaagttagcataacatatataccacaaaaataaataatacacaaaaataaatagtaagtaggcagaagcttggcacctgtttttgaaaggatttaacctgcctacagaaaaggccgtatctcagacttgctggactataaccagttccgttctgttccttccctctgtagggaagggaggagcactggctgctgacattgacattgacactgttggtacagagggctggggagaggatgcagagctgcagttggatgaaggtaaaagtgctgttttaagactgttctggggtgatggacaccttggattgggactgggttgtgggtagctctgcagacttccaggccatgaaacgaactaggattgattttacttcctttggctaagattatgccactgcccaaatctgttttgagcttgaattttccttacagatgggtttgtggaggctacagaaggtttgggggatgatgctcttggcaagggacaggaagaaggaggtggctgggatgtagaagaagatctggagctccctcctgagctggtatgtggaatttgtacccttagaaggttctctccgtatctccctgtggaagccagaggccttattgtcccctaccactatcctcaggtctcctatcctatcccctaccactatcctaaggtcagcccttctgggaaggggactagaccctcctagtctgatgcttatctcccatttgaaagaaggaagatggctgggcacggtgactcatgcctgtaatcccagcactttgggaggctaaggcaggacaattgcttgagcccaggagttcaagaccagcctgggcaccatagcaagaccctgtctctattttaaaaagtaaaagaagcaggaagaacgagagagtcaaagttagtggccttgtcacttccatctatcctgatatgctccaagaggagaggatgtaggacttatctctaatctgatgcttaactcccatttgaaagaaagaagaatgaggtaatcagcgttctgccagcagcagcttatgagaaggtagcaagctgtttcatctgaattggagtttttgatatgtcattttgtcactggtgaggtggctcctattttggcagccttctcccacaactatcacccctcttcctcagtgggggcagggaacaatgtaaatggttgtgttctagattcaacagaacaaagtgcttgaatggcttaaaaaattactcaatttggctgggcacagtggctcacgcctgtaatgctagcactttgggaggctgagccaggcagatcacttgaactcaggagttggagaccagcctgggcaacatggcaaaaccccatctctacaaaaaaatacaaaaattagccaggtgtggtgactcatgcctgcagtcccagctactcgggaagctgaggttggaggattgcttgagcatgggaggcagaggttgcagtgtgccgagatcatgcctctgtactccagtctaggtgacagagtgtgaccctgtctcaaaaaaaaaaaaaaaattactcaatactcaatttttgtttttcccctaggatatatcccctggggcagctggtggggctgaagatggtttctttgtgcccccaaccaagggaacaagtccaactcaggtaagcgggaagaaacctagcacggcagggatgagtggctaatacttgattggtatataacaggtgttggctacttttctactatagttacagaggagaatagagaagggacaaagtttcacttggcttgggtttttttgtttcttgttagatctggtgtaataactctcagcttccagttgatcacatcctggcaggctctttcgaaacagccatgcgggtaagtaaccttggcttttcctcttgagtgtgcctagcccagggtccccgggagatggttgactcattttaatcaagggaaattatcctacccataaggggaaaggtgtatatttttcatgaaaactctttatctttg

SEQ ID NO: 3061 - DNA, 2300 bp, Homo sapien
atggaagtccccagaggtaacaactactaacagtttgaagtgtatcctttcagatttttaatgcagttacacatagacataggctttagtattttatgaaagtggggatcacgttatgatgttgttctgcaaacttcttcctcacttaactatataatatggatctcatggaagtacatataaacataacctcattctttttaactacaagggacaaatgtactacacttatattattctaacaggcattttgtccgccaatttttggctatcagaagagcctactgaagatacttctacacataatctagcctatttgcattattactgccctaggctaaagacctgtgagattgctcaggaatagaatatgtgcacttaacattttagtacatatagtttaaatgtaaaaacactgtatcaatatacagtctcatgaagtttatggaggtgcccattttgcacacaggctgctatcagctatttgttgttttgttttataaatctaagaccctccccccaaaaaagtaacttaactttttttttcttgcatttctttcattactagtgaggtggaactattttaattatttattgaacatttacaatttttcttctaaattgtctatttttccattaggttcttttttttaattatgatatataagtacactcaacaatggatgtttgccctcaaatattatgacatctttgtttttccttctgtactgcccagcaagaaattaggagcagaaaagaaaactgaaagattatgaagacccatttcacatttcacctatacaggtctcagaaattcttaatggtacccatctttcaaggtcaagtttcccaagagacttagaaactgctcagaatatattcacacattgataacaacctccagtttttgagctactgagtctacaccaggcgctgtaataaatacactccatatactttctcattttaatactctctataaaagacgattttacagatgaggaaatacagacttagagacattaagtaagtcatccaagtcacagcttgttagtggatgtctcaggattccaaggcaagcccatctgacttcaaagaccaagttcctaaccactttgttacgctgcatctcactaaatattctagatactattttttccaggtcttcggagaccttacttctctgactttcacattctaacgttctgaggctaatactgcgatctcagtatttgccctccacccccaacgacccacactcgagctctagagctgccgtacttagcaaataaaaatacgagatttccagataaatttgaacttctggtaagcaacgacagactaaaaaactattcattgtttacctgaaattcaaatttaactgggtatcctgcattttatctggcaactctatcaagttgagactttattggggttataagcctcaagtactatttccgggtagtaaataaagccgaatggaggcactgatgttgagatgctgcagccaaggcctccttaagtgaggttgccactactcgtctccaaaaaggctactgactcgggtgcgagtaacagagatcgagactcagttcccagggccactccatataacacagtcatcaaaaagccaacagatcacagggcctttggagcagaacaacacaaatcgggagcacagccaagagagaaagggggaagaaagaatagggagggggtctaaggaatcccctgcagtgtgggagccactttataggtaaatcgaagcccaaggacacaccaaagaagaggggactggagaaccgctagccaggcccaacctctctcccaccctccgtcttcctccgggtccgtctggtgggcccatttcgaccaacacctctacccattttctcttccccggtgtcagcgccgctcctgacatccaacctccatgttcccccttttattctccactacctttgacccgcgcgctcttggtctcgaatttggttaacatctctcaggtctccgactccgatgtcttaatccgagccccgacacaccctgctgcccttcggacgcctccacgtcagcgaccctctcccgcggtttccggaagcgcctggaaacacgaacttccggtctcttaggctccgggccacagagacggtgtcagtggtagcctagagaggccgctaacagacaggagccgaacgggggcttccgctcagcagagaggcaagatggctacggcagggggtggctctggggctgacccgggaagtcggggtctccttcgccttctgtctttctgcgtc

SEQ ID NO: 3062 - DNA, 2300 bp, Homo sapien
gggggggtttcaccatgctggcagattggtctcaaactcctgacctcaagtgatccacccgccttgacctcctgaagtgctgggattacaggcatgtgccactgcgcccagcctatttggcattttcagtgccttctcttcagatagttcattgcctttagcccattttggttccaaaaagttcagagtgcaagtgataactggacaccatagaatatgagacttttttctccttaaaaaacagtataatagggtggttaagagtgctggctcggctgggtgcggtggctcacgcctgtaatcccagcattttgggaggccaaggtgggtggatcacttgaggtcaagagttcgagaccagcctggccaacatggtgaaacaccatctctactaaaaatacaaaaattagctgggcatggtggcaggtgcatgtaatcccagctactcaagaggctgaggcaggagaatcacttgaacctagaaggcagaggtcaccgtgagccgagatcgtgccattgcactccagcctgggggacaagagtgaaactccgtgtcaaaaaaaaaaggtctctcagcttagtgctcgggccaccagatcctggcatcatcacttattaccagtatgatcttgggaaagttactcaacttctttaagttttagtttcatcatttataaagtgacaataacagtaagacctattttgtggggttgtggttggggttgtatgagatgcacatgtaaaaagcttggtatgcagcatttactaaatgttagttcttattaattatcttgcctagcttgacagacggttatctgtaactgcctacatacagtccaatataagtgtcaaatctcctaagcaggacatggatgttacttagtatctagggcacagacaaatatcaatgtccacaaacatgaatccatctcaactcacactggcagccaatctgatgagtggcgttgagcaggcgaacacagggagctgttttatttaaggggatatatatcttcctctccactgagtttcccctgcacaaacctgatcggaagataaaaagtgttagaaaaatttgagagacacaggtactagcttctatcgtgtcattaacctgaagtatggcttgggtaaatcatttaatatcatactttctaaaatgagattaaagtccattcttctgatttcttgggcacacacttatcgtaacagatacatgttctacatggcacccagctatgtgcctcaaagggttattacaaagtccatgtagcgccattgacagtgacactaaaagagagaaaacttggtcaaaggaaaggtgtttgaccttagatttgccagattctggttgcacaggtgatcacacttctgcttgtatatcctgtatgtatattactaattggttaatacacaggtgctgggctaagaaaactttctgaggcatttttccaagagtgtgaacagaattgagagaaaccttatgacatacacgggtcagttaatttaacatcagcaggtcatttgtgtgcccacagtgtggggcagctgtagtttctcctttgaggatccttaaaaacaatgtgaattgggggaaggcacagtcatagttatatacaggcatttgcattttagggcttgaccaactaaaaagccatgtatcagtaaatgaacgcgtatcagcaaacacttaagtacattataaatgccaaaagttccttgaattgttacttcagggtcttcacagttaagagtacccatatcctaccttattcttgctttactgattaaaaaaaaaaaaaaaaaaaaaacctgaggcaaggcagggggacacagacttaggatgtaatcaacagaggaagaaataagaaatccaccttttaagcgccgcacagcacccacagaacaagattgctttcgtctcaaaaagtctaaacgcgaggaagaaagctaactttcacacctgttcctttcgactgtggggtgggtggctggggttgtgggaaaaacgagacatctggacaaagtgggagagggtcaggctcgaagtccaggaagaggcctagagaagggagtgaagcgacacgacgtgctgcgggggagaagggaccttcaggtccaggcaaagggggaacttctgtcgtgggaacgaaaaagaaagaggatttacagggtggggggacagaggggcagcaggaaccagaagggagacagtggcggtcgcggcggggccgatccgagagttccccttagagaacggagctcacgggcggggaggcctcacctgctagtaggacgca

SEQ ID NO: 3063 - DNA, 2300 bp, Homo sapien
atctctcccatagcttgggtctccaagtcttccacaaagccttggcaacctggcaattctgtttccattcttttttttttttttttttttaaatctttttacctcctttgtgtctcaatctccccatgagactgtgtcttcccatttccctatgtctttcccatgtctgttacccaatgactctggtttctcatttttttctctccctgagtctcggtatcttcccgtgtctttctcgtcgtttccctccgcttcccctgtctctgttcatctccccttctttctgtatctctcatctcccccatggcactctctcctgagtctcttggtctcccaatttcttggatggggtggagggcaggagagtggaggaggtagaattgttgttgctgggggctcattaggtggagattggtttttaatcagcaccatggcaatgatgatgcaagaactgagatgccacctgatcccctgccccccagcccccctcctcaagcctcctttcccctccagctcagcccatctgctggcgcctgggcacctgtctgggcctgcccaggtgggagttggcacctcccagactcagggatgggggcaggtgggggagcttggggaggaattatgggacccccttagggaatgcttcaccctggagaaagcccagaaaaggttgaccagcaacagggaaatggcaagtccctccagcctgaaggtgggatgtgctcctactaagctctaggcccactacacatattatctcccttaatttccatggcaacctaagaagcagctataatcaaccccattttacaggaaaagaggtccaggctcaaaaggttgttatttgtccaaggtcacacagctgacagagcctttttcactgtaccacactacctctggagtcctctccagtcatggttcttttgaatactctcaaaggttcagagaagacatccaacagctgagtggggagagaacttcagacactgaaaccctctatgcactgtctctctatgcactctggtccctgtgctgcccctcctcaatcctgccactcggcaacacacacatacacacacacactcacacttacattcacattcacacacacttgcatatacatgctggaggctgctgagctattgatgggagcttaatcagtgcccatttgcatataattttgtgtctggttttcttattgctgatttgatgccctcaaaacacactcagagcctgcctaggctgccctgccctcctctcccagtgtccttccaatcctggttcttcctgtcttggcactcctccactcctctccttttagcccttacctctttcttcctaagagccctctaattcccagtgggtcaggttgggctggccagcctagaaaaactccttgtggggtctgtgtcccaaatttgatcctgctcctccccttggtgatgggttaggtaggaagatagcgggtggggtaagagggtatgggggtgattgagtcccagggtgatgagggtaggggcctgaacagttgctacaggcaggctggcaagcagtgggtaccagctttatgaaggataagagcttgagggccaggaccctagggtcctcttctgcattttagtgctacccacttgctcttttctcggtttccctgttagtaccttgaagagtctccctctcaggaaaaaagagacaccaggaaggggctgtccaagtcacgctgggactccgaatggggccatggcacttaaccatagcttgctgggagcctctgccctgctgcctctggtgtgggagactgagggggttcatctgtggtcctgccctggctctcgccccagccccaccccttccccagctctccatttcttgcttatgaaatatgcatggagaacagatgtccctgctcccccgctccccgcccccacccagggccagcccccgcccccagctcccgaggggttcccagatccctctgccaatggctgcctggcctggctgtttaatattgatgaggggggggtgggcctgggccagccaatggagagctgggggtgtgtgtgtgtatctccatatatatacatagggctgggccagctcaggtgtgtgtgtctgagggtgtgtgtgtgagtgtggctggccccagtacctggccaagcccaccacttccacctgggccctacacccccacaatgtgtacccctcttatctgccctggagcctgtacagccatgccacgctacccctgagagtctagaaagctggtcactaactttgcagacggatgagccttgagcacc

SEQ ID NO: 3064 - DNA, 2300 bp, Homo sapien
atgggacagaccacaccaataaaattttttgttggactctgtaatccagtgttttcattgcagagatgtaattgaaagcccccaacctcaccgtcagagaaaggagggactaagcttattctagcctgatgcctgatacctgttaattgggaagccttgtctgttaacatcctgacttaggtttcaagctttcagtggggccagactatggaattatctgtaattctggcatcagaagccctttttccagttctttgggccattttggggtctgtgaaacaggctagcagcatgtgaagataattcacactaaatctgcctgagagtcaagacagtgccacggcagccccgactctgtgtcaaattacacactagctgcctagcactggggtgtgctttggggcagggctggggacacccatgtcctccctacttcccttaacccttccccagctctcctgccactccctcatacacctggtcgtggtcactgccaggagccccagtgcggcccagtgcctgcacatgataggcacaaggtgaatgagtgcctggacgcatgcagggacttgggtacctgaaatgatgattctgcatatttcatgtagtcttgatgctgagtcacctgcttacccatactactggaggaggggatgaggaaagacagagtttgggcaaaggagaaaggaagtgtgttttactgttctgcatctttgaacaatgcagcatagttggttctgtcctcatctttggacaggttagaatgaaccatcaaaaggggtgagattaggtctcaggaaatagttttcatcagggaggagcaaaaattcccaaacaagtgaggaacagaggctgggagtctctttctctgggattccttaatcacagggttgttcaagcaggtgccaggattggaaactgaaggaggctgagatattgaaaaggccttggcctgcttagggagaagtatgtgaagatgcttttgaaatgatactactctaagtggcgggttgcacggcaataacattaatgataattgaatactgctttcacttactccaaggggaacatggacttcccacagcccaggcttttacggtgtgggttcactcttgtagggtcacatgtaaaagaaccctaactggtttcttggcatactgggaggcacaaatgccccaaacgtgtaggatattttgtgagatcctacaatccctgtgtggcaccttcaactctaaagtatctgaaactcctgggatggacaatctgcctgcttggggttggggacccaactggccaaggcatttttcctcttggaggtttcctgggagaaggccccctctcctctgccattcaaactcccaggcgcccgcgtcttttcctcctccccttcttccctaaggcagggttccctttgtaattaatcccaacactcaaaccagaggggaggaaaaatgtgttaatgagggagcgtcccagactgactggggcggtcgctgctcgcagctagaactccaagtaattaaattatttttggaaggaggggatatggtggtgatggtgtcagggaaatccccgtatgcatgggaagaggcgtgcgcctctcgccactaattaaaatcagggatgaccctcccttctcggacccctagggggaaaaaaaaaatcaatcttcccacgtcccagattccattggattttgtgtagtcgggtccgtggccctaaagagaatatggccagccccagggatctgggggctccttctccgacaggaggggtccaggaagacagccccaggagggactgcgggctgggccaagtccaagaatcgaggcattcccctgcccaccgttcgggacccgagtgtcagccccaccgcggattcccaggatcggggagggccgctgggcatctgaaggcgcagggctgggggagcggcgactccgggaagagcggggccgcagacaatggacgcggcggtaggaggggcggcggctgtgggaacagccgggaggcggcacccgggagctcgcgctcccccgccccctgcaccccccaccctcatcccctccccctccgccccctcccccctgcgccgccggctcccgatctgattcctgatccttgattccttgatccttggtcccgccatgggagcctgagcgccccctattcccccctggcccccagcccccggggccttgagggggaagaggcagcggtctgggacggagcagggggtgaccagactcaagaacccccccctcaacatcccccatcgcgcgcgctgcctgtccaggagc

SEQ ID NO: 3065 - DNA, 2300 bp, Homo sapien
cttcaaggagaactacaaaccactgctcaaggaaataagaaagtacacaaacaaatggaaaaccattccatgctcatagataggaagaatcaatatcatgaaaatggccatattgcccaaagtaatttataggttcaatgctatttccatcaaactactattgactttcttcacagaattagaaaaaactactttaaatttcatacagaaccaaaaacgagcccatatagccaagacaattgtaagccaaaagaacaaagctggaggcagcacgctaactgacttcaaactatactacaaggctgcagtaaccaaaacagcatggtactggtaccaaaacagatatatagaccaatggagcagaacagaggcctcagaaataacatcacacatctacaaccatctgatctttgacaaacctaacaaaaacaagcaatggggaaaggattccctatttaataaatggtgttgggaaaactggctagcaattatgcagaaaactgaaactggttcccttccttataccttacacaaaaattaactcaagatggattaaagacttaaatgttagacctaaaaccacaaaaaccccagaagaaaacctaggcaataccattcaggacaaaggcatgggcaaagacttcaatactaaaacatcaaaatcaatggcaacaaaagccaaaattgacaaatgggacctaattaaactaaagagcttctgcacagcaaaagaaactatcatcagagtgaacagggaacctacagaatgggagaaaatttttgcagtctatccatttgacaaaaggctaatatccagaatctacaaagaactcaaacaaatttacaagaaaaaaaaaaaaaccccaacaaaaagtgggcaaaggatatgaagacacttctcaaaagaagacatttatgcggccaagaaacatatgaaaaaagctcatcatcactggtcattagagaaatgcaaatcaaaactacaatgagataccatctcatgccagttagaatggcaatcattaaaaaatcaggaaacaacagatgctggagaggatgtagagaaatgggaatgttttcacactgttggtgggagtgtaaactagttcaaccattgtggaatacagtgtggcgattcctcaaggatctagaactagaaataccatttgacccagcaatcccattactggttatatacccaaaggattataaatcatgctgctataaagacacatgcacacttatgtttattgcagcactgttcacaatagcaaagacttggaaccaacccaaatgcccatcaatgatacactggataaagaaaatgtggcatatatataccatggaataccatgcagccataaaaaaggatgagttcatgtcctttgcagggacatggatgaagctggaaaccatcattctcagcaaactaacacaagaacagaaagccaaacaacgcatgttctcactcataggtgggaactgaacaatgagaacacatggacacaggtaggggaacatcatacactggggtatgtcacggggtggggggcaaggggagggatagcattaggagaaatatctaatgtagatgacaagttaataggtgcagcacaccaacatggcatatgtatacatatgtaacaaacctgcacattgtgcacatgtaccctagaacttaaagtataattttaaaaaatcagttttcttttggctttttcttagctttatacttaaatatttttttctaatgtaattagagtggaattgttttttgaattttatttttggattactcatagctagtatatacaattgcaattgaattttatattttgattttgtatcttttcaccttgctgaactcatttatttgttctagtagattttaggaaattccttacagacttttacatataagtttatgaaagatgcaataaaggactttatcttcttttccaaaaaaaaaaaaaatttgtgcacttagctcagaaaaaagtaaacaaaaaattaacacagttacaaattaggatttttagtgcaggggaagaagttgtcaccacgcctctaagaggaaggggaagtctcagaagtattttcagtttatgacagaagggcaaaaacattgactgcctcaaggtctcaagcaccagtcttcaccgcggaaagcatgttgtggctgttccaatcgctcctgtttgtcttctgctttggcccaggtaaatgtcaatccagatcggtgtagtcactgagtgactccctggttttgtgcagcttgctcaacctaaatcgtctgtata

SEQ ID NO: 3066 - DNA, 2300 bp, Homo sapien
agttggggtaaaaggtttcaagaaataaatcttggcaaaattcaagagctaatagacaccacaccagaggaattaatggaagatgacttgatggagaagaatgcatctaagccaggatcaaacaatgcggaagaaaacatagaagcagcagtgccagaaaacaagctgacattagacagtctgacagaaggcttctgactattcgggaccgcttttgacttcttttatgatatgggcccatctatggtatgatacaggcactaaaactaaaacaaatggtagaagtaagaaggggtaccatatagaaatatttttagagaaatgaacaagcaaaaaagtcagacaaaaattaaatatacttctgaaaagttacaccgactgtgcctgtctcttccaccttcccttcaacctcctctatctcttcttccccagggacccctgagacagcaagaccaactcctccttatcctcctcctccttagcctacttaacatgaagatgatgaggataaagacctttatgatgatctaattccacttaatgaacagtaaatatattttgtcttcatcatgattttcttaataccattttattttctctagcttactttcctgcaagaatatggtaaacaatgtatatgacacatagaatatgtgttaatcaactgtgttgttggtaaggcttcctgtcaacagtaggctattagtagttgagtttaggggtgtcaaaagttatgcatggattttcgactggttgaggggacagcactccaaacccctgcattgttcaagggtcaactatattcagtattatgtaagtatatatgggaaatgatcagcaggattatttaatgtgtgactctagaggccaggttacctaggaatgagctagctagcatgaggactcgtctcagttaaaaaaaagctcctccaggtctcaggggtagtgtccccagccttctcattactccccaaaacagctgagtcaaacttaaatattcatttctatccccattcccagacaacatctcccatacacacattacacaatcactcttattcttgttaaccaagatgaagaccctctacaagaaatagtcctgttacatctagctcaactccacctaagcctgcctctgcacctgctgtctctcatgcccaggagtcacagtctttgccaagtgacactgctggcttttaactcagttccctaattcactgtgtgatatagggaaaagtcacttcctctccttctgagccagtttctccatctgcaaaatagattcaatagtctaaaaatcccttttgacttcatttttatcaaacactttttgtgtccctaataaggtgtgatcataatcataatgtttcatgatgatatcatggaattatacataattatatgtatgtagttatactatattatatattaatatattatataattatatattattgtatcatatataaatataattatatattattaatataatacttaatattgattatgttaaataatatcacatgttgattatacattataatacataatcatgtacttgtgatcattttatataactataattatgtaattttaattgctatgtttttttaagctcctaccatatgtcaaaacatttttcctctttcatatcccccaccgccattcgcctaataatggtaattcattctttgagcctgtctcaggttggttgtcagtttctttaggaagcctactccaacttttcttagcctgagttagatgcccctattcctctcatagttccctgtatttttcctattgcaatgcttactacattaaattggaactgcttatagagttgttgattactccaaaaaagagtataaatgccatgaaaggagggtgatcaattgttttgttgctctgtatattgccagcacccagaagagggcctggcacatagtaggcacacaataaatatgtgttgaataaataattaatgctaggcactttaaattggaaaaaactagcacagtaatacaaagaccaatgttaactaaatcagttaacatgcacttcctttcttaaatgtcgttataaaaaggaggaagaaaactcaagtgaaactgactctgctagaacagtgccgtgcttttccacagaaggttagaccctgaaagagatggctcagcaccacctatggatcttgctcctttgcctgcaaacctgtgagttctgacccttgctgatcgcctcctagttttccataaagttttaaaaattgcccttaaggaagacattgaactgtctttttg

SEQ ID NO: 3067 - DNA, 2300 bp, Homo sapien
atgatagtccgttttcacactgctataaagatactacagcctcaaactcttgggctcaaggggtcctcatgcttcagcctctcaagtacctgggactacaggcatgtaccaccatgcccagcttaactgtaagtttatataatttaatttaattttatatgtttaataatggccatgttcatcaagcacctcacaagattcctgaaaatctattttttatttttattaaaaaaaattgtttgtagacatgaggtctcactctatcgcccagactattttcaaactcttggcctcaaaaattctcccacctaggcctccacaaatggtggggttacaggcgtgccactgtgcccatccagattcctgaaaatttaacaattttatgagttggtacatgctgactcgagcacacaccactgggaatagttgtgaggaggacagttgagtgctggggaaaggaaggaagaaaacagtgaggataaagttcacatatctcaccagcttttattacctgatccccatggggaggcccatcagagagtgcctatgacctgttacaatggactctaaaaacacttccctactctttcaagtctccctgtgagcattggttacacttccagtatcccattcttatagtttaactcatgaaaaagggcgggatcctccttctgccaatactagttccttctcctcaatgaaaagttagacacaaactccaaaataaaggcaactcccagaatacaacacagccccaattaaattaaaatggcttttatccaaaagacaggtaataacaaatgctgacaaggatgtggagaaaaagtacccttgtacactgttgttgggaatataagttagtacaaccactgtggagaatggtttgaaggttcctcaaaaaactaaaaatagagctaccatatgatccacaatctcactggtaggtatacacctaaaagaaaagaaatcagtatattgaagagatatctgtactcccatgtttattacagcactattcacaatagccaaggttggaagcgacctaagcgtctatcaccgatgagtggataaagaaaatgtggtacatatacacaatgaagtactattcagctaaaaaagaattagatcctgtcattcacaatgacatggatggaattgaagatcattatgttacgtgaaataagccaggcacagacagacaaactttgcacgttctcacttgcttgtgagaggtaaaaattaaaacaattgaacttgtgggcatagagagtagaaggatggttaccagaggctgaagggtagtgggggttggggaagaagtggggatggttaatgggtacaaaaaaatagaaagaatgaataagaactagtatttgataatacaacagtgtgactatagtcaataataatttaattgcacatttaaaaataaaaatataattgcactgtttgtaacacaaaggataaatatttgaggtgatggatatcccatttaccctgtgtgattattacatattgcatgcctctatcaacatatctcatataccccatacaaatatatgcataccccatacatatatatatacatacacacacacacacacacacacacacacacacacacacacacacatatatgtatatctactatgtacccacagacgttaaaaattagaggagaaaacacacacacaacaaggagactgagctggaaggatggagctctgggatagatttgtcctacatccctgcctgggagggaatccacacacatgcaagaagacaaactaggagcatgggctactaaattataccacattgcactcatcggggtcacagggtttcttccaagtgacccgcacatgcccttcccatctctgtgtgacagtggcacctgcaccagactgcatgttgaggtgtcatctgaaattatgaaataaaacagaagtaagaggtctattagctcatcaaaatgcagttatctaagttcagctgtgaactgccaaatttgaggagtgatccaatgaaacatcttttctttgcaatccaagaagacttaccggagagaactgctcagagaatctgcaacatccggttcctggagacagctaaggaaagaagctggggcgcatgtttctgcccaaagccgggttttggccgaggtgactacacaccccctttcctggctcccataggctaagtgcctggcttcttgagaagcctgcttcttgagaacaaaaaagtgatttaaagcctcatgggagatgagcaatcctcaagacacaagcagaaaaagtccc

SEQ ID NO: 3068 - DNA, 2300 bp, Homo sapien
tctcttttaaaaatctaatacaatgttatcttttcttgctgaaggagcagggtcgtatcctaaggttaaatcaatttataggaaaaatataacacacagttccaaagtgtaacaatttgaccaagaggaatttgattctggtgctgtttcaaattttatttgcagggttctttcttttcacttttatgtttttttcccttttatttttagttgacatataataattatacatatttatgggatacagagtaatattttgatacatgtattcaatgtgtgatgatcaaatcaaagcaattaggatacctatcacctcaaacattgatcatttctttgtgttgggaacattccaaatcctctcttctagctttttgaacatatacattaaattattcttaactgtattcactccatagtgctacaggatgctggaacttattcctcttctctagctgtaactttgtatctattaaccaacttcttcccatcctccacttccctctacccttcccagcctctgataaccacaattttactctctacttctatgagctcattttttaagcttccatatatgattgggaacgtggttttttatctttctgtgcatgacttatttcacttaacataatgtccttcaggtttgaggactgagaagagcagacattttattgttcatctccatgttgagaatcagaaatgtccccaattaaaaagtgattacaaatatgttatatcaggaactgtggcttgcctgtgggtcctgggtgggcaaataactaatttacattcaataggaatgagcttgaaatttcctagacatgatatgatttggctgtgttcccttccaaatctcatcttgaattgtagttcccataatccccacatatcatgggagcaacccagtaggaagtaagttaatcatacgagcagttaccatcatgctgttctcgtgatagtgagttctcactagatctgatggtttcataaggaaggggctttccccattgctgctcagtgcttctctttcctgccaccgtgtgaagaaggacgtattggcttccccttgcaccatgattgtaggtttcctgaggcttcccaagccatgctgaactagaagtcaatttaaccactttcctggccaggcacaggcccatgcctataatcccagcactttgggaggctgaggcaggtggatcacttgaggtcaggagttcaagaccagccgggccaacatggtgaaaccctactaaaaatacaaaaattagctgggcatggtggtgcttgcctgtaatcccagctatgtaggaggctgaggcaggagagttgcttgaacctgtcaggtggaggttgcagtgagctgagattgcactgctgcactccagtctgggctacagagtgagactgcatctcaaaaaaaaaaaaaaccaaaacaaacaaaacaaaacaaaacccctctctttcctttataaattacccagtctggggtatgtctttattagcagtgtgagaacagactaatacagactacaagggtgggaaatccattcttttgggccaagtaatcttactttttttctgatgttcagtggataggctgatgtcaaacttcaaatagtgaattatcataaaggaagaagagcagagggtggtgctgggggtaagatatgcagcacaaaggctacgtgggtctgatttcccagacttcaggctctgaatgacacctacccaggcttgactgggaagctcctatgtcttagcccctgaattaatcagagggattcctgcctgggaacgaaaagcagacattctctatcagggtcccttattcttttctgagtactggcccccctgagagtacagtagaagctatgaatcttccccctacaaaaaagcactcatgtaccttcaaacaaaattgttctcagtttccgtgatgctcttagataaaaaaatttacaagacctccggtttctggtttctggggccccacacaagtgtgctgggtggagagaaaatctcagtggtttttttttttttctctctaaccctgtttggtaagttccgtttttagccccggcctttttctagccaggctctcaactgtctcctgcgttgctgggaagttctggaaggaagcatgtgctccagaggttgggattcgtgtctggctctggaattgctactgctgcctctgtcactcctggtgaccagcattcaaggtactttccaccaactgtgtatctgtgattgtgcactgaaggcatggtcagttgggaaaggggagacgggatgtagtt

SEQ ID NO: 3069 - DNA, 2300 bp, Homo sapien
taaatgacggctgatttctcactggaaaccatggaggggaggagtgtcatgacacttttcaagtgttgaaagaaaaaaaactgtcaacctagaattttatacccaggaatgagggttaaatcaagacattctcaggtgaaggaaaactaagataatttgttatcagcaggcttatcataaaagaattcctaaagaatatcttgaaacagaaagaaatgattaaagaagaaaacttgaaggctgggtgtggtggctcatacctgtaatcccagcactttgggaggccaaagttggtggatcacctgaggtcaggagtttgagactagcctggccaacatggcgaaacctgatctctactaaaagtacaaaaagtaggtgggcatggtggcatgagcctgtagtcccagctactcaggaggctgaggcaggagaatcgcttgaacccaggaggcggagattgcagtgagccaagatcatgccactacactccagcctgtatgacagagcaagacttcgtccaaaaaaaaataaaaagaaggaaacttgaaacattagaaataaagaaataacaatgaaaagagttaaaatatgggtaaatgtaatggattgtccttctcctcttgagtgttctgaattatgttcaacaattgaagcaaaacttataatcttaccgatatggttctcaatgaatatagacaatatatttaagacaagtataaagatagactaataaagaaacctaatataggtaagttttctatacctagttcaactggtaaaatgtcaacactgataggtagatcaaaagttatgtatgtaaaatgcaatatgtacagcaaccagtaaaaaaactcttcaaaaagatacattatagataaatcaaaatggaattataaaaaatattccagtaacacacaggatggccaggaaagtgaaacagaggaacaaaataaacaaacaaaagcccagaagaacaaagagaaaataataacatggcaaacttaagctctgatatataaataattacattatgtaagtcagttaaatagaatagatagctccagaatatacccacacaagtataagtgctgatttttgataaagatacaaaagtaattcaatgtaggaaagatcatcttttccatcacatggtagtagaacaattgaacacccacaggcagaagaaaaaaaaacacgcacattgtaatcatacttctgaaaaccaaaggcaaacaaaaaacttttaaaacagctagagaaaaatgacacattacctatagggaaaacaatttaaatgatggctgatttctcactggaaaccatggaggggaggagtgtcatgacacttttcaagtgtcgaaagcaaaaaaaaactgtcaaccatattacctgatatggttctcaatgaatatagacaatatatttaggtgaatctcaacctaaacttcacaccttacattaaaacaggatcatacatttaaatgtaaaacataaaactataaaactttcaggagaaaacctttggaccctagtgtgggtagaaaaaaaactgataagttgaatttcatcaaaattaaaatttttgctctgccaaagaccccgttaagaagatgaaaagacaggctacagaccaagagaaaatatttgtaaaccacatatctgacaaatgactcttatacttggaacatataaggaattgtcaaagctcaacagtaaaaaaaataaagaatctgattataaaatggacaaaagacataaatagacatttcaccaaggaggatatggatatatagatggcaaataagcacatgaaaagatgttcaacattattaggctttagggaaatgcaaattaaagccacaatgaggtatcactacagcacctattaaaacagctaaaatataaaatgggaatataccaaatgctgatgaagatggggagcaaatagatctctcatagattgctggtggcaaggtaaaatgctctattcactctgaaaataatttagcaattactcaatctcacatgtctgcggcgtgacccctcctgcttctttaaatatcagctggggaagaggtctgagtaatacctaagagggaagtggcttcatttcagtggctgacttccagagagcaatatggctggttccccaacatgcctcaccctcatctatatcctttggcagctcacaggtgagtccggccggattctcttccactctcctgtctaccccatcctgaatagttccaggtttcttgttccactctgggcctctggctcaactcgggaggctctgtgtt

SEQ ID NO: 3070 - DNA, 2300 bp, Homo sapien
cccatcactgcagcctcacaacagccctgccagtatgcaggtcaggagttttcatttctaggaaggaaacggaatcttagaaagggaaaataagacacctatgacatggagctagaaagtggcagatttgggaatcgaactcaggtattctgatgctgtaccctgtgccttcattctctgggtttctggtatgtcgccatatttattggatgagaaaagggccaatagaagtcaagtggcttgcatcccagggcctgatatataggagacacagtggggagagccagcagcaaggtacccacctgtggggatgtccaggctgccttctcctgggggacacgctgggcctgtgtggtcctactttgcacagttgagtttcccctggggctgcagtcgtgtgggccacagggctgaggctgagtagcagagtagccttgttctatgcaatatgactttgttgagtgtttcaggcctggtgtctgcagctgctcttctcgcctcccccaaatcctcctgggtctggcctgggaggctggtggacaaataatggcaatgtggacacctcgagcacttaagaatatctgggtcatggccctggggcaagaggagacggggagcaggtccaagggagtgcaagggagtgggagaaacctcaaaggcacacagccacctcctctgggactcttgatcaacacctggaagctcagtgtatgctgcagagccccctacggggaaaatatgtaattacaacacagctccgtacttgcattcctttatctattcagggcagggttgggaaactcagttttgggctcaaattcactggatttggattttggctttaccacttaactagatgagactttgggcaggttatctaagcattctgagcctgtgaaatggagttgatataacatcttccctgtttagttcatggagttgttctggaaatcaactgagatgttaagtgacatggccttacatagcacaaagttctggaacagatgtgggcagatcctgcctctgctgttccttctgtgtattcaaggtgatgcaaggtttgggcactaatgccgtgcattttctgtcctgtgaagtggaggcccagagcagtttcccagtcctcagtttattccctttcgcacacacagagcagctggcctggcctcatgtcacactgagctccaggattagtgaggatggatgctgcattgtcactctcatatgccattgacatgtgtggcagagagcagaggaggcagtgtgacttacagctggacacccctgggaccccagactgttgttgtgtcctgtggagggtctgtcctcagtgtctccttgaggcttggggacagtgctctaacttttacctgcatggtcaagaacccattcagtaacagcagctcccaccctatctcagtgcctcacttctgcatatgtaccaggctcctcagtctgcccaggggcctgagcagctctggggttgacagggagggtggaagaagaagtcctggttcccttcagaccctggggcaagggggctaacaccattgggagggtgggagtctggggtgggtgggtgttggtctgtgtggtcatggcagtgggaggagaagacccactggagctggtggggaggctggagggactcacacaggaggagctggatggagcctgtggctttcctgactaggtggggagacactgacactgaggttgtgggttctcttctttgtctacagggtcaggaacactgggagaagatacagtggggaagatatccttggggagttggccacttggcccctggaggtcccagcagagcaagaggtagaaagtgttacatggagctcttgagagcgtgttgctgttttacaacaaggatgaacagacaaaccagttctggtttctgagactcagggaccctacagtggatgactgaacattccccaccacagctactctcttcagatcagccccctgaggctgcaggactataagcctataagcctgggtaactctgcatacttcctcaatcattatcaccagggatttcaccctgcttgtctatggtaaggagggctggagggccccacatttgaaactgagctttcctctaccctgtttggccagaccagagccttctcatagctcaagctttcccttcttggttcagagatgctgtaggagttgaacatctttgccagctcccagatcatgaaggatgggacctgcttcatcaccctggcctgctccctggaacaggctggagagaatgtgcagaacagctgggagcctcc

SEQ ID NO: 3071 - DNA, 2300 bp, Homo sapien
tcagtgatgttactttcctaaatctcagttttctcatctctaaaatggggataattggagtatcatccaaatagggtctatcttaggattaaaggagaaaacatatgtaaagttctaaacacagaggctcactcatagtaattacccaataaatgttagtaatgatttttattattaccaatctctctgaattcccttctgcctttgccctcgcctcccatgcagactgttcctgctctcatgttctgtacccagactccttcaatagcttccgcacctgtcttctcatccccaggctcatcccttccacccattctccctccactctgcagctccaggaagcttcctactcctactggattcttgttgcctttagcttggtaacaggatgctttatctgggctctggtaacctctcctgaccgtatgtcctgcaatcccctctagacagcccatgttctagtcacaggaccaaggctagagtgaaacaagacacgctcctagtgcacaaaatttaaagattttcgagattctgtcactttcaatattgtgcaacatcagatcatgaccagcctctaaagatgctttccatggacataagcctgttatcttaatggtttctctctctctctcccttcttcctttgaacccagacttcctgggttcaagtccttactaactataaaacttatagtaagctatttaacccctctccacctcagttttctcatttatagaatggggatgataaaagatatctcataaaactattgtaagatcaaatgagtgaatatgttaaagtgtcagaagatggactagcactctgtaagctttcatcgaatattagctaaaactacacattctgccagcctcaagttttcctgccaagtccccttaatgttacagcctaagtaaacaaatgacctgaagcccgaaacacaaaccatagcatggccagctattacgctactgacaagaagaaggaggagaaaaagacagtttcccaagtcaggatatagggaatcatgccattctccagcctaccttttcaactcagtcacctctacgctgtcacatacgatgtccacccccattgcagtctccctgatgcctttgtccatattaaaagtccttcattgcatgtgacagaaagctagcacaaactgccttgagcaaaatagaaaatgtattgggtcactgtattagttatctgttgctgtgtaacaaattgccccaaacttcacagctaaaaacaataagcatttttgatgaaaaataaaaaattgaaaaaaaatttaaaaaccaaacatttattatctcacagtttctcttgataaggaatctgggcatggcttagctgggtgcctctggcttaaggtactcacacaactaacatcacggtgtcagccagggctgcagtcatttcaaggacctcctggggaggatccacttccagtctcactcatgtgattcttggctagcctcagtcctcatggacagttggccagaggaatcagctcctcgccgattgttggctgggggcctccctctgttctttgttttggaaccctctccctaaagtatctcacaaaacaatacctggctcccctcagtgtaaggtagggagacagagatagtgggaaagacagagagggagagagggcaagagaaagagagagcgcatatgcacacacatgctaacccaagatggaagtcacagcttttttgtaacctaatctcagaagtgacccatcccacatctctgccacattctattcacttgaagcaagtcactaaatccaggccacactaaagaagaggtgattacacagaggcatgaatgccaggaggtacagatctttagcagtcacctttaggagccaaatttagaacccaagtcccttgatgtcaaagcaagtgatgctccacatcagtcacaaatgaggccctgaatagacttgggacctctacctgcctgcgcagatgggaggagtctgtggtgttttgtataaacaaccctccctctgagacacacacacatacacatacacatgcacacacacactcatatacacatgcagaagctgtgacacgtgcggaagctgtggtaagtgcatcctccttcagtctcagttctgaaaatagatcatcatggtggcaccaaagagtcacacagatgactgggctcctgggcctttctccagtaagccacagaggagtcagctgcaaatattctcttctgttctacagacctctctcctcttcctgctcatgggtaagtccactttatggccaccactt

SEQ ID NO: 3072 - DNA, 2300 bp, Homo sapien
tctctgggtcccaagcagtgtgcattgatgttgatggtggctgcaatggcctgggcagaccagtctccaggaccacaggtggcacttgcaggtaggtggtagtggctgggagttaggcccaccctaggcccctgtggaaaaatgctcaggtgcccaaggcagtggattgggttgggcaatccccaagatgctggcctatgtgttctctttccaagggggaagggggaagccaggctgagtgggcttgcactcaggccccccagtggtgaaagcaaacaccagctatggtatgtggaagcagggccatcctcaggccccaggcagagtgctcaggtgaggacagtagccgccaccgtgaggccctgccactggagaaggtgaggccaggttcagtggccacagccttggatggcagatggggaatatgcatccctctcagcctcagtcctaggagggcttcccccaagccagcactagctgcaggagcttttgcccagcttgcaaccaagttgcagcagcagctcacagcccactactttacccagtctcagtcacagcagcattcacttcctaggaccagaaactgcagcccacacctctcttgctacttagctctacctgcagagtgctcccaatccatactctagtcttggcagcaacagttttagttttcctaacacctcagacccagcactgttgggccccaggacagcgtgcattctgccaaaggctcagtttgaaaatggtcccttactataactgcagaggtctcagaaagagtatggaacccagcaggagctccctccctggagcagttccgccccacagtctcccagcagctccctatggtagtttcagggattgggagggtcaaaggggtctcatgtggccaggactgcatgattctgcagtgggatgtgggccactggaggtctctcgctcacctctattgggaaatcactcccagctcccagcagatctcagccagggaggctgtctctgttccttctccttccctgcttttagtgtttcctgtcacatctctgttgaattccagcattctcccttggaaaatgtatttgaaatatgactgtttgtatactacttttgttcttctaagtagaggaggtaggcattaaatgcttctagtcagccatttcgaagccccttctcttgatcttttatttttaaaaacagacattctttttctccaggaatttctctctctaggataaatatgactactatattgatcgtttttcacctaattccatatacacagatgtcaaaattagaagacacacccgtaaattccttacatgttatataatcgccataattcatgtaacgggtctcctacttgtagaaatattgtttctgcttatagaaatattgtttccaatatttcctcttataaacaatgctgcaatgaatattcttgtgcacctatcttttcacgcttatgtgactaggttatattctgatggataaatctagaatatatatatggggtcaaattactgaatctaatggtatatgcattctttttttttttgagacatcatcccactacatcacctaggcttgcctccaattcctgggctcaagtgatcctcctgcctctatcttccaagtagctgggactacaggtacttgccaccatgcccagcttttaaatcctgaatttattattattattattattattattattactactactattaccagtatttcatagagacatagtctcattttgttgtccaggctagtcgcaaactcctggactcaagctgtccccttccctcaacctcccaagtagctgggactacaggcatgtgccaccatgcctggctttaaaatcctcaatttttatttattattattttattttgtagagactggttctcactatgttgcccaggctgattccaaactcctggcctcaaacaatccttccacctcagcctccaaagaagctggtattacaggcaccactgcacctagcttagtatatacatttttaatgttgctagatattgctgaatttccctccgtgttatcaagtaatcctcccaccagcaatgtttgagagacaccatttccttatattctcaataacaaagtattgtcaaacatttctttgttgataaattgagtagttacaatagtatttcatggcttaaatttatatttttcttatgaatgagatgagcatctcttcatgttttatgttttatgtttgttttgatagacagtcttgctctgttgcccaggctggagtgcagtggtgcaatctc

SEQ ID NO: 3073 - DNA, 2300 bp, Homo sapien
tctatcagataatttgaccgttttcattgatttgtagggtattctgtatctattaaggaaacggaattctgtgcagttaatagaattagaatgaatcaactccacatgtgttgacaaatgacgtacaataatttccaagatatattgttaattttttaaggttcaaaacagtgtgtaaagtatgcatatatctgtctatatctagaatacctctggaaagatcaacaagaaacccataacagtaattgcctccaggaatagtaattcttggggagatgaaataaatggctggaggctagaaagcttacttttttcattatgtagctttggtattttctcaattttttttaatgtattacctattcaaaagaagaaatattgggccaggtgcagtggctcatgcctgtaatcccagcactttgggaggccaaggcagacagatcacctgaggtcaggagttcgagaccagcctggccaactggtgaaacttcatctctactaaaaatacaaaaattagccgggtgtggtgctgtgtgcctgtaatcccagctactcaggaggctgaggcaggagaatcgcttgaacccaggaggcagaggttgcagtgagcagtgatcacgccactgcactctagcctgggtaacagagtgagactctgtctcaaaaaagaaatataacttaatgaaacattcacacatgtgcacatacatggtgagcagtggagatggaacaaaaggaaaggagaagacaaggaagaagatctagaagcacaatgcatcctaaattcagaccaaagacacgggcaactcaaattctagaagcagaggtccccactccatagcgtttggggctgggccattcacctatttattcattgaacattcatgagtgtttttcataaggcaggctgggtgttagatgttcagacacaggaatcagccctgtcatcaaggagttcttacactggtcggggagagagagaagtaatcagactattagtcatgctgagtcatggtgataacacctgtagcggatgttatgggagtacagaggagaggctgtcaacccagcctgcagagaagatgtccctgcgacaggtaacgctggcctctctctgctgcccccaactcccctattgtcactcccttcttctctcagcgctttcctgctggcaaaaggatctgagcatcttcccatgctgttgtccctgcagagcagctgcaggagccccaagtcaccatgaagtctgtgaaggtgtctgagaacttctcctgtaacatcactctaatgtgctccgtgaagggggcagagaaaagtgttctgtacagctggaccccaagggaaccccatgcttctgagtccaatggaggctccattcttaccgtctcccgaacaccatgtgacccagacctgccatacatctgcacagcccagaaccccgtcagccagagaagctccctccctgtccatgttgggcagttctgtacaggtaactggctccaacttggcccttgagggaattccagaaacaatatgagcagctgtggagtctaaaccctaggatcctggtcagacacacagggggtggggaagcaagaggacaggccccaaaaccccttattctctactctcagggacatgacagaggctggcaggacttgggaaagcccagaacactgtgatactctaaggttagagcaagggaggagaagacaatatggatacaggagtccagattggtctttgcttgggtggaggtgtttccgggtaccctcagaagggcagagaggggacatgagagtccaagtattcagtgggcacagcccagtggaacaggtggtcatggagaagtagcaggcatgcccctcagaggaggaggccaggagaaagaggaagaggaggagggacttcagtcccctcagtcccctttaggatgcctgggggccaagggagtagggacagtgactgaagctgcaatgtctcatctgtgaccccagatccaggagcctccagaggaggaacaacgggggagactgtggtaggggtcctgggagagccagtcaccctgccacttgcactcccagcctgccgggacacagagaaggttgtctggttgtttaacacatccatcattagcaaagagagggaagaagcagcaacggcagatccactcattaaatccagggatccttacaagaacagggtgtgggtctccagccaggactgctccctgaagatcagccagctgaagatagaggacgccggcccctaccatgcctacgtgtgctcagaggcctcca

SEQ ID NO: 3074 - DNA, 2300 bp, Homo sapien
ctttttttttttttttttttttgtgacagagtcttgctctgtctcccaggctggagtgcagaggcacaatctcagctcactgcaacctctgcctcccaggttcaaaggagtctcctgcctcagcctcccgagtagctgggattacaggcacacaccaccacacccggctaatttttgtatttttagtagagatgaggtttcaccgtgttggccaggctgatatcgaacccctgacctcaagtgatccacctgccttggcctcccaaagtgctgggattataggcatgagccactgcgatcagcctacaaatagcagatattgtgtgatagagtttgtcagggaccacaagacagacacacactcagtggtacagctgctccgagttctgtttccaggggatgataggtcatccacatgcctggtgggaaggatggagctggtgttggggtcaggattggagaggctgattcctaattcacattcattagtgggttccaacagctggatcttgttttccacctgtcgtgtgaggaagtttacccttctttgttatatcatgtcttgtgcaccacttctcaaggttaaggacatggccagatcaactctgaagaaattccccagggttgagggctgccccttgggagcagacaaaggagagaagagatgataaccattagacccgctggaaaaagctattcagagcttaaaaaaatgaaaacaaaaccacaaaaacctcatctatgtccagtgttttttgtgtgcatattctggagtatcatttttaatttgatcctgaaaactgccttgtgaaggtggggaggatgtattgttgaccctacaggctcagacagcaacaaggccagaatcacataggttgtaagttgctgaatgggagctgcaagtccaagtctttgactctaaatccagcgctctgtccagagccccgctgctgcctctgttggcagctgaagctgtcagtctgctgccccctgcccagttcagacagggtggctggaaatggaccaaaggatggaaaaagagaataagagcggacttgaagggaactgaaagtatttgttaaggggaaagcagaaggaagaaagaaagaggcatgaaccctggggcctggccttgaagcacagtgttccaggggaggggggatgccgctgtccccacccctccatgggggcctaagcagatccagagctgcctggccttcctggagggtggcgtccaagcatggatgggaaggcagcaaaaataggcccatgtcacttctgggagaagacaaaagagggaagagaggactactatagaaaagtagaaaaagaggaagggagggaatctaggcatacagatcggaaatgtggagcaaaacaaaatttttttttttttttttgagacacagtgtcgctctgtcacctaggctggagtgcagtggcgtgatcttggcttaccgcaacctccacctcctttgctcaagtgattcccctgcctcagcctcccaagtagcttggattacaggtgcacgccacccagcctggctaatttctctatttttagtagaggtggggattcaccatattggccaggctagtctcgatctcctgatctcaagtgatctgcctgcttcagtctcccaaagtgttgggattacaggcgtgagccactgtgccccgtgtgaaacaaattcttatgaaacaaatttaatttacatgtgcttaaactttggtgtcaacttgcatggaatccccaggcttgctagatttttctagtgcctccagcccttaggtctcttcctatgttctctcagctactcctcctttccttcaacactgttagccgcttatccagggccctacgtttcagcccactcctcctccagcccctctccactccacctccacaatgtctgttggaatggaacagttggggatactggctgtttggcccccatgggggtctctccatataggattcagagaattggaagacttcttgggctgaagcagagaacgggatgcaattttgaaactggctttgtgagtcactgtgaacttcaagcaccctcccacttgaggtaagcttcaccagtttggcttgtgggaactgtcagaccagctccaggcgctggggctttctcagtggccttgtcagctcacagcaggcgttaacagcctctaattgaggaaactgtggctggacaggttgcaaggcagttctgctccccatcgtcctcttgctgactggggactgctgagcccgtgcacggcagagagtctggtggggtggaggggct

SEQ ID NO: 3075 - DNA, 2300 bp, Homo sapien
aaagccactttgagatggggtttctattagttacagctacaaggaaccagactgaactaaataaatgtccagggcagtggggtttggaggaagttgtgtggggaacagattcaagaggaagtaggggtagaatcaatgggacgcaatcactgattggatgatgatggttagaaggggtaatgtccttaaaatggatgtactgttttcccagtctattagatggcatcatgtaccattaaggatgagatgcataatgatattaaagatgtcaaaatacaaaaaaagtgtcttagaatcaactaaagaaagtagtataagtgtatattttctttttttatttttgcaaatatgttactgttttattaagccataaagttttcaggtggttagttacacacagtaatgaacaactgaggggatgtttaatttttttctctagatcttgggcccttggtgttaactttatatacatgtatttactattgtgaactgtaaacttagagacctctattttttttttttttttttgagatggaatttcactcttgttgcccaggctggagtgcaatggtgcgatctcagctcactgcaacctctgcctcccgggttcaagcaattctcctgcctcagcctcccgagtagcttggattacaggcgcctgacaccgtgcccagctaattttatatttttagtagagacacggtttcaccgtgttgatcaggctggtcttgaactcctgacctcaagtgattggccaccctcgtcccctcaaagtgctgggattacaggtgtaagccgcagcgcctggctgagacctctatttctaagaggttgttgtttgtaaatatgaaagctgggtatgttcattttgttacctatactgatgagttaatttagtttctaatacatttaattttatttaattaattattttccagatacacagagcaaatagcttctaatagattttaaatttacaaaagtataacttttttttgcagtttttcttcttgggtgctattttattttcttctatcaatatgtgagtattttttgcaaatcagtactttgaaccaacaaataggaaatattagcttaacaaaaaagatattcacaatctttgtaagaaaaggttgcagtattattaatgctataatgacattatgtattaaatgtatgatatcactggggaagaactgagtaattctattacagctgcagggtagcatttgagaacttcatgacataggagcaggaataagacaggaggttcgaagcagcagagaggtttcgtattgattcagtttcaaatgaatcctgtagtaaattttccctcgtttgtggcaaaatgacaaaattaaagacaaagtagtgagtctttgtgtgaaactaaattattcaaactaaagatttatatattttttaaaacttttctattcgtatttttttgtgtgttttgtatctctttcccctccattcctttttaccaatttattcagaaatgatcactttcccattttgttaaaatttcctttttctatttctatgaattgataattatggccaatgattaatttcatttatttatttattttgagatacctaagctgaagtacagtggcacggtcatatttcactgaatcctctatctctgggacttaagttacccttttgccttgcctcagccccacctgaaactataggcaagtaccaccatgccatgctaatttttttacttttatttttagtagagaagaggttgccctatgttgcccaggctggtctcaaactcctgagttcaagtgatccttctgccttggcctcccaaagtattgggatttgagccaatgtgccaagccaacagatgcttaatttagagaaagtttttattttgcaagaaagaaaggcacaaaaacccaaaaccaacaccaactcttgttaatctcttcgtctacttcctacttgacacaggtccatgaaacccccagatccaggaacaacgctagcaggtgattcttaggattggttttttctttagaacctgttaattccactgtataaataacctccccgagataaccagaagcctcccctgcactgggcattgtgccaggggagggtgaggctggaaaccttggttggccccactgggcttcctccataaagctttctgcacctcattccacatcaggagcgtttttggagaaagctgcactctgttgagctccagggcgcagtggagggagggagtgaaggagctctctgtacccaaggaaagtgcagctgagactcagacaagg

SEQ ID NO: 3076 - DNA, 2300 bp, Homo sapien
ttgacattctattatttatttttatagcatattgtatatttcctggtactagggtacaatctccagaaaggcagaaatgtgtacctgacttgttgctatatccccagcatctagaatatgttctggcacataataggctcgcaattaatgcttttaaaagaaataaacacacaaatttgtgattagaaaacattcatgaagcctgctgttagttctagagcagccactaaaaggatagaaaaaaagcttacaattttaaaactagtagagagaaaaaaacaatgacacaattgtgtcagtttcctagggttgccataacaaattgtcacaacctaggtggctttttaagaaattactctatttcagaggtgagaagtccaaaattaaggcatcagcaggactgtgctctgtccaaagactctgcaggaggatcttctcttgcctcatccagcttcaggtagaaagcaatccttgggttttttgtttgtttgcttttggttttgatagaaatggagtttcactgtattttttgcccaggctggtctcaaactcctgggctcaagcaatcatcccacctcagcctcccaaagtactgggattacaggtatgaggcaccatgcctggccaatccttggtatttattgatttgtggccacataactcccttctctgcctccgtcttcatacagctgccttccatctgtgtgtgtttctgcatctgtgtctcttctcttcttataaggatattagttatattggaattagggcccaccctaatccactataactgcattttaaatagttgcatctgcaaaaatctcatttccaaataaggtcacattcacaggtaccttggattaggactttaacataccactttagggaacacagttcaactcacaatagcaatcatcagtcttggtcttgaattatgtctatattcatacagaatgctcagcaatgctatgatctgaacatttatgtcctctcaaattcatatgtaggtttgttaatatcctgtttagaattgttgcatatacagtcatgagggtggttggcttataattatcttttcttgtgatactcttgtgagattttcatatcaaggttatgctggatacattgttagaggagcagcccacaagaccaccctcacttctgacaccgattgcaaggttggggtcccccaatatcctcctcctctctgacattaattgtcagcttggggggaccccaagaccacccgtgagtttaataattcacaagacaaactcacagtgctcatggaaagttacggtttattgcagctaagaatacaggttaaaatcagccaagggaaggggtacatagggcagagttcaggaaagctctaaacacagaactcccagttgtcctttccatgagttgtggacagtgttaatttcctgacatccagtgtgtgataatactcgcagaatattgtcaaccagggaagcttactcaggccagtttattaggctcaatcacataaatctggtcagctgccctcagtctcctagcccttgcaaagtttgagctgataccactgttctggtgtggggttttcatgaggttgcagtcacatggtggctggggttgggataatctttaagactctttctctaacatgtccgatccctgggtgggcagactgaaacagctacagaaagaagcatatatggcttcttgggcatctttctacttctatatgatcttttcacatggtctctccagcatagcagcttcaggatagtggacttctcacttaataaatcaggatccgaaggcacaagtcctaagaaagagaaagccaggaagaagctgtatcattttttaggatgcagtctcagaggtcacacttctgccatattcttttcatgaaaacttagtcactaagcccgcccaaatttggtggggtggggggaattaccaaagaattggcaggctatatgcagaatatgccatatcagtgaattttctatgtcagaatgatctttccaaggtgaaaaacaatactgggtcagggttggtctctggattttgaaagcaacacatataacatgtgagcctgctgctttcatctaggccaattttaagtggggcacaaagcaagaaaagcctccacggcaagtctaggctttgatgaaaattttccttccacgtggaccttatggttgagcataccatataagattgctagttggaaaaggtattttagctctccctttcccctccccctcccccctccctctcactctccttctcccgctttctgctcggtc

SEQ ID NO: 3077 - DNA, 2300 bp, Homo sapien
ctgtctcattaatgctaactcaccatgacccctgggctgatgatactctagggaagtatcagttatgttaaaaagagttaacaggctggctcggtggttcacgcccgtaatcctagcacttgggcaagctgaggcaggaggatcaaggtcaggagttctggagtagcctgggtaacatggggagaccccgtttctacagaaaagaaaagagttttttttgttttttgttttttttgagatggagtttcactcttgttgcccaggctggagtgcaatggtgtgatctcggctcactgcaacctccgcctcctggattcaggtgattctcctgcctcagcctcctgagtagctgggattacaggcatgcaccaccacgaccggctaattttgtatttttagtagagaccgggtttctccatgttggtcaggctggtctcgatcttttgacctcagatgatccacccacctcggcctcccaaagtgctgggattacaggcgtgagccaccgcgcccagcccaaaaaaagagtttttaataatatgatgttgataattgtactgtggttatacatgacatattcctattattagaaaacacacagttggccaggcatggtggcttacacctataatcccagcacttgggaggccgaggcaggtggatcacgaggtcacgagttcaagaccagcctggccaagatggcaaaaccccgtatctactaaaaatacaaaaattagctgggcgtggtggtgggtgcctgtaatcccagttactcgggaggctgagacaggagaatcacttgaacctgggaggcgggggttgcagtaagctgagaccatgccattgcactccaacctgggtgacagagtgaggctctgtgtcaaaaaacaaaacaaaataaaaaaaacccatacgcatttatttaaaggtaaaagcccatgatgtatgtaccttaccttcaaatggttcagaaaaaaattttgtgtgtgtgggtgtattttatatacatatatctatatatatatagagagagagagagagaacacgaaagataaagcaaatggggtgaaatattaacaatagttgaatctaggtaaagggcatatatgtggctttatattattgttatttttgcaacatttaataaatttcaaattgtttctaaacagagttaataaaacaataaaattacagcaggatacatgcaataattagtgtttggacagtgtatagtgggacaaaggaaggatccatcagctttgtctggtgatgggggtgtcagggaaggcctcatagagaaattggaggaaagattggaaggatgatgtcttcttttcccatttatttattattattattattattattattttgaggtgaagtcttgctctgttgcccaggctggagtgcagtggagcagtcttggctcactgcaacctccacctcctgggttcaagcagttctcctgtctcagcctccagagtagctgggattacgggtgcacgccactgcacccagctaaatttttgtatttttagtagagacagggttgcaccatgttggctggtcttgaactcctgacctcaggtaatccgcccacctcggcctcccaaagcgctatgattataggtgtgagccactgtgcctggccaattattattcttaattaattaatttatttttcatgaggtgtcacctcagtctaaaaggatgatttcttgacagagttgtgtctagggggccagggcatctgggggaggtgggagagggagaacgcaggggaggattgtgacctatccacgaatctgattagatactgctacattgtatggcctgccttggcaaagcaggatgcccctcctcagatggcgacagtcacctgtgtggccaggaacacagctccctgctcctccagccagtcgcacgtcctttctcatttccacggtcccaggctcaggtaccctcagagggaagggcttcagagggaggggctagcagcctaggctgctcagggttgggctgggcagggctcaggtggtttggctctccacagctctccacataaagggaccagcacttcacccttcatcaggatcctctgcaggggagctccgagtgtccacaggaagggaactatcagctcctggcatctgtaaggatgctgtccatgctggtgagaaaaatgtttttgatccatgtgtgtgggagcaatgatgccagctcaggtctcagttttagagatttagagtttcagggaaatgagcccatggccccttgggtatttgtagtgttggacagcc

SEQ ID NO: 3078 - DNA, 2300 bp, Homo sapien
aggcgggcggatcacaaggtcaggagattgagaccatcctggctaacacggtgaaatcccgtcttactaaaaatacaaaaaaaaattagccaggcatggtggcgggcgcctgtagtcccagctactccggaggctgaggcaggagaatggcgtgaacccgggaggcggagcttgcagtgagcagagatcgcgccactgcactacagcctgggcgacagagcaagactccgtctcaaaaataaataaataaataaaatttcttagacacagagtcttttccctatgttgccctggttggtttcaaactcctggccttaagtgatcctcccctcctgcctcagcctcctgagtagctgggattacaggcacacgtcacagagcccagctgtcagtgtatatacctttctccaagactttaaatttctttcttttcttttcttttttttttgagacggagtttcgctcttgatgcccagcaggctggagtgcaatggcgcgatttcagctcactgcaacctcctcctcccaggtacaagcgattttcctgtctcagcctcccaagtagctcagattacaggcatgtgccaccacgcccggctaattttttttgtatttagtagagacagggtttcaccacgttagtcagactgacctcaggtgatccacccacctcggcctcccaaagtgctgggattataggcgtgtgccacgcacccggccaagactattaagcacccagtaggtggtttaaattgaatggaaccagaagcagaactttggccaaagagatggggacaaaggaatgagagcaaaggtgaaaaaggcaaaatgtcaaacaatatcattcttttggataaaaatgtggtcttttcccttgcaatgaggtaatgctaaggaagttttttccccacagtctgcatatgcttagtacagttaaaattaaatcatcgtaaaatagaaactacaactagcaaaggtgttgagcatgaatttcaattaaaaatgatgtagcaatataaatattaacagaaagtttgagtatcaacattgtctatagaaaaaaggtggcttagtcagcacacaactattagtcacagtgagaaaacaaacaattctgaaatgtagggacctgttcacagatcaaatatgtgtaaaggacatatccagtcacccagagatgtttctagagcatgttcagctcagtttgtatcatctgggtgtgttttgtgtacatctgtttaactttcttcttgagataacgtaattctgctcttcccaagttgtgttgttgtgggtttttaaatttttgttgttgttgtttgttttttgagacagggtctggctctgtcgcccaggctgtagttcagtggcgcgatctaggctcactgcaacctccgcctccgggctcaagccatcctcccacctcagcctcccaagtagctgggactatactgcccaggctcccattttccagttgagtgctccctttcccttttttttcccctttcttcctcccagcgtagctcatctctcaaagccggtggggtggacagaggaacagtttggaggtggtgccaaagtaacattccatttctctccgggtcttctcccctaccctcccatattaatatttgttttttacttgccaagaggcaggaccaaagtttctgcaggaccaaactgcaggtgcagttgcaccaagcaacttacattcaaacaaacacaaaaccccaagccaagccggtctccgtaaatcccacaccacgactgcctttcctacttcctccttagaggtacttctcagccctctagctccaactgagaacccagccagtcaggaagtcgctacttcgggaacaccaaccaatcagggggccgtcacctgctgaaggtgcggaattcgtctcctgacgcgacagtctcctgggccaatctgaggcagctcctgtggggaaaggcgccagtgcgccgaggcggggagtggcggcggggtaacacctggccgaggtgactcgttctgaagagcagcggttccttacaccaatcggaacgtgcaggggtggggagctggccaatcaggcgcggagggcggggccgggcggggttccacctggcggctggctctcagtcccctcgctgtagtcgcggagctgtgtctgttcccaggagtccttcggcggctgttgtgtcgggagcctgatcgcgatggggacaaaggcgcaagtcgagaggaaactgttgtgcctcttcatattggcgatcctgttgtgtaagttcccagagtttcgggaggaatcggt

SEQ ID NO: 3079 - DNA, 2300 bp, Homo sapien
agtgatccgcctgcctcggcctcccaaagtgctgggattacaggtgtgagacaccacacctagctaccataagtggtcctaatacctgctaaatcttgtataattccttaaccccaaacttcaatcatgtattttgtcttcttactctggccaccctgggctctgttgtcaggaagtcagaagctccccggacgactcgggatgagaaacgcagggctcagcataatgaaggtaggtatgatctgggtggagctagaagctgtctggtgtgatctcagcagtgatgtctgaggggaggagggattaggtaattttaccctgggacttgtggcgagttttcactgagtcaccttgtcctccactttgccccacagtggagcgtcgccgccgagacaagatcaacaactggatcgtgcagctctccaagataatcccagactgctctatggagagcaccaagtctggccaggtcatggaaagaccctggtagtgggcaggatgcctgaattctgcctcctggtattgtttccagaaatggtagagagaggggcacacatgacagtagtcttatctctccctgaggttcctgtatccctgggagatattataccaccttccttagatgaaaatgaggtccaaagtgtgaacctacttttggaaagcaagctgggtatctgaaatcctagttctcattttgttgaccttatcttgcagagtaaaggtgggattctatccaaagcttgtgattatatccaggagcttcggcagagtaaccaccgcttgtctgaagaactgcagggacttgaccaactgcagctggacaatgacgtgcttcgacaacaggtcagactcctacccccagtgcagcccttctcagttctgctagccactgacccagtttgacaccctctactttgttctccatggagaaggcttcatcttttccccctcaccagtggatgtctgaatacattcaggggcttggaagtgccagctttactacccattccctttactgcctccttcccatgtcaggtggaagatcttaaaaacaagaatctgctgcttcgagctcagttgcggcaccacggattagaggtcgtcatcaagaatgacagcaactaactatggggattcaggggctttgggcccaagaactgcagatagcccaggagcaacagcctaatcccgtgcccctttccttcactgccccacttctggcatgggacagggggaagttcagaaggtgtgtccttgaactgaggccctgtgatatggcggcctgcagtggtgtgaaacacacaatgtggacgtgcactgacagccttgcccacccccaccatgcagcccctgggcccttgtgctcctctcgcacaatgcatgtgctgtctccatgctggatactggacacactaaactctggggcttgtcctgtgcttgcttagagtgcccagcagaggtttgctgacaggtgatgctctggcttgccccaggactctggcacttccattggttcttcctttccctggagctgaggtttagatgtgcaacctgtggctcaggggagcaagcttacacaagaagtgagggaaggatgtttagcagtggctggtgcccatgaagaggagattggccagtgagaagctgaggcctatgcagacatctctggagccagagagaacaacaggcaggggcccacttggggccttcccccttgtgggggtcgttttttttttttcttttcttttttttttttttttttttttttttttaagataaaattgttcaaagccacagttgtctgtttttcttccttttgtgggccacgggctggaagggaggggcacattgctcttcgaccagtaagggctgtgccaagttcagggtggggtgctgctcctgcatttattacccggagtcctggttcctgggccagaccggtgtgtcgtttttggcccaagctagagaatgttaagggcttctgcggtgggttggtgctagaggcgccgcgaacaggtgctgcgggggcggcgcgggaggcggtgcccttgcttccggatccggtctcagctctgggagggaacgggagatgttgcaggcgccgagagggcgggccagggccgcactccggagactcgcggttgctacgcgcaccatggctggaggtacctgcgggggattcctggggccgcggttctcttggtcctctgggttgaggcgtggcagggagtggggtggcggagcgaaggggcgtggctgaggggtcttcgtgcacaccctaccgggaggggcgctgccag

SEQ ID NO: 3080 - DNA, 2300 bp, Homo sapien
caggccctgggactgcttctccagccaggctggggccacaggtcccactctagtgaaggtcaatgtctcagaataaaagctgtatttttacacatagtgtggagtctcattattcttattaaagtctttggtgataggtattatatcttcacatatttggcaaaacattctttttcttcttcttgtttgggtgctcttcctcagttgttgtcatggagactagtggccagaaactagagctaggttcatggtggtcaggaaataaggaagagaaacttatatttacataatgcgttcattatgtgccaggaactggactaagtatcctgtgctcacaaaatctatgtccttgattttatttaatccacacaattctggaaggttggtgctagtatctccagtttatagatgaggaaactaaggctcaattaagtcaaaatgtttgccaaaggtctcagaggtaagaagtggcagagatgggtttgaaacctggatctgcctggcccccaagcttgaatttttcccattataccacactactccaaatccattcagggtaggtcttgattgagaagaatgggaatcaagattcctgtcacagaaggtgtgagcctttagaacactagaagctttggggtctttggatgagtgactgctgacgcgaataacaaggaacatatccaattctatgcatgccccgataggtcgtaatctctagcaggtaacctttcaaaaagacgccctgcgccaagatggcctcccaaatagcccttgttaaagatggcgcctccgtcggacgtccctcccttgatctcagctggattctcttctttcctggaatgaaaaaatgccctgccaagcactaagatattagtacaagttagtcgtctctttcccgttcttgtcgaaagtggccaggccttcagctacattctccaggacacggcttctttccggcttcacaaataacccacaaacaccaactctcatcaagatggagtgagcggaagtggggcagttctgagtttgagtttatgggcggggcgagagcgacacttccgcccctcaccaacatggccgcgggctggaagtgcgcatgagcagctgtctatggagatacctaggccgggagagggagaacacagttggagaaaatcggcagctgagacggccttggccggtgagtgtaggaccgggcagaagtctggaaactgggtggactggcaaggcagggcagctttgattttgtttccgtttttcaagttagagaacactgctggggaggaagcctttgttttgggggagggggctgtgctggttctttatctcataccctgctttgtgggccaaactctctcccttccccagagcgcgagcgtcccagccctcctgcgctgtccagctgcgcgccgcagccgccggcaccgggcgcttgagctccctagtccccgaggccctttcctgcctcctccgcggagcagctggggcgcggggctaagactgcggggctgcggggtcacggcgcaggctcccgggctcgcgcctggcgggcgctcagctccgtaagcgccttctggttggtgagcctgcagggagacgcctcattctaaggcaaggtctaggtgcctgacttctttcgggagttgattttttttccctttgtgtccagacttagcaagggctcttactgggcccttctggcctgagcgtgcacaccacaacgtcccatccctgtttccgtgtcaccgatccctaatgcctaggaaatgcttccggatgtccaactaagatttgaataagtaccctgaccccgttgctgggtgtcctcagagactgccccggctgacagctgtggccaatagagatgcctcctgtgccgggccctctatttcattgccttcccctgcagtcagcgcggcaagcttcgcagggcatttcctcttcaggtttgaagatggaaatgtaggtggtcccaaaacactagtgctacttccccttatcgactgggatctccttgcagcgttacttcgtctgtacggtttcactttcagttcctttttcaacattttcctcggacgcggtctttccgaggcttatccattgaaaattttccttggataggaaaggtttggaggaccttatgggtagagaatttccaaaaatcttgccccttttgtgttgggattatcttattgctttgtactgtgtagctgtttctttctggaggcatgtctgcccagctctttgtttttcctgccctctggctgggtgtcagggtcctaaggcagagcttgtaggtg

SEQ ID NO: 3081 - DNA, 2300 bp, Homo sapien
tcccgagcttctcgatcctcttggaggaatgggggtagtctttcctttgatgctgctgtggccctagcccgggaccgccaaaggactgaggctcaaggagttcggcgaacccagacctgtactgagggtggggattactgcctcatccccagaacctccccttgtagcatgatctctgcccattctcctcggccccttagctgcctggagctcccatctgaaggtgcagaagggtctggatcccggagtcgtcttagtctgccccccagagaaccccaggttcctgaccccctgttgtcctctcagcgcaggtcatatgcatttgaaacacaggctaaccctgggaaaggtgaaggactgtgattaggaccacagccctgggcaaaggggaccagcaagttgtcttgaatctccagggttcctgactagctgtctcctctgcagcatgagcagctgtagtgcccaactctataggctttggccctccagcttctctctttgactgtgggaggcactgccttggttggtttacctgaacttgtctccgacacaaagcacttatctcttaggagattcccaagaaagtcaacaagatcttgttcccagggagtgggtcattggccaaagggaacataaggtaggcagaaaacttaaaagagtttgttaaagtgaagactggagaaattcctcccttcctctgagctgtgaatctctcttcatgaaagccaaaggtagagacagggaggacagggccaggttagggccttccacacacaaacacttctagagttgcccattcctgttatgttcttggaccctaagatacctcctgtcccttttaaatccagattaagagaaacgtccaggaagagctctttgaagccctcaatatttgttggagggactggactcctctccagctccccaccctctgcctccagtcaccatgtgcaagagaggtcctgtacagatctctctgggctctcctttctcctttggaataacttgttcctatttcaggaaagggaaatggtgtcactcaggccctgggactgcttctccagccaggctggggccacaggtcccactctagtgaaggtcaatgtctcagaataaaagctgtatttttacacatagtgtggagtctcattattcttattaaagtctttggtgataggtattatatcttcacatatttggcaaaacattctttttcttcttcttgtttgggtgctcttcctcagttgttgtcatggagactagtggccagaaactagagctaggttcatggtggtcaggaaataaggaagagaaacttatatttacataatgcgttcattatgtgccaggaactggactaagtatcctgtgctcacaaaatctatgtccttgattttatttaatccacacaattctggaaggttggtgctagtatctccagtttatagatgaggaaactaaggctcaattaagtcaaaatgtttgccaaaggtctcagaggtaagaagtggcagagatgggtttgaaacctggatctgcctggcccccaagcttgaatttttcccattataccacactactccaaatccattcagggtaggtcttgattgagaagaatgggaatcaagattcctgtcacagaaggtgtgagcctttagaacactagaagctttggggtctttggatgagtgactgctgacgcgaataacaaggaacatatccaattctatgcatgccccgataggtcgtaatctctagcaggtaacctttcaaaaagacgccctgcgccaagatggcctcccaaatagcccttgttaaagatggcgcctccgtcggacgtccctcccttgatctcagctggattctcttctttcctggaatgaaaaaatgccctgccaagcactaagatattagtacaagttagtcgtctctttcccgttcttgtcgaaagtggccaggccttcagctacattctccaggacacggcttctttccggcttcacaaataacccacaaacaccaactctcatcaagatggagtgagcggaagtggggcagttctgagtttgagtttatgggcggggcgagagcgacacttccgcccctcaccaacatggccgcgggctggaagtgcgcatgagcagctgtctatggagatacctaggccgggagagggagaacacagttggagaaaatcggcagctgagacggccttggccggtgagtgtaggaccgggcagaagtctggaaactgggtggactggcaaggcagggcagctttgattttgtttccgtttttc

SEQ ID NO: 3082 - DNA, 2300 bp, Homo sapien
gtgtgaagcagccagtccctgggtcagccagaggcttgaactgttacagaagccctctgccctctggtggcctctgggcctgctgcatgtacatattttctgtaaatatacatgcgccgggagcttcttgcaggaatactgctccgaatcacttttaatttttttcttttttttttcttgccctttccattagttgtattttttatttatttttatttttatttttttttagagatggagtctcactatgttgctcaggctggccttgaactcctgggctcaagcaatcctcctgcctcagcctccctagtagctgggactttaagtgtacaccactgtgcctgctttgaatcctttacgaagagaaaaaaaaaattaaagaaagcctttagatttatccaatgtttactactgggattgcttaaagtgaggcccctccaacaccagggggttaattcctgtgattgtgaaaggggctacttccaaggcatcttcatgcaggcagccccttgggagggcacctgagagctggtagagtctgaaattagggatgtgagcctcgtggttactgagtaaggtaaaattgcatccaccattgtttgtgataccttagggaattgcttggacctggtgacaagggctcctgttcaatagtggtgttggggagagagagagcagtgattatagaccgagagagtaggagttgaggtgaggtgaaggaggtgctgggggtgagaatgtcgcctttccccctgggttttggatcactaattcaaggctcttctggatgtttctctgggttggggctggagttcaatgaggtttatttttagctggcccacccagatacactcagccagaatacctagatttagtacccaaactcttcttagtctgaaatctgctggatttctggcctaagggagaggctcccatccttcgttccccagccagcctaggacttcgaatgtggagcctgaagatctaagatcctaacatgtacattttatgtaaatatgtgcatatttgtacataaaatgatattctgtttttaaataaacagacaaaacttgttctgtctggctcctgtcttgccccttgaactgtgtaagctctgagtcacatactctctgtctcggtaccatccttcctgtagtcccaagtaggggaagacttaggatgcctgtagctgggagggaagggaaagaattggcctccacaaggcctttggccatctctgagagtcccctggtaggaaagtgaagctaagaaccctttcgaggatggccagtaccttagtttgcaaagtgttttaaattccttttttttttttttttgagatgaagtctcactttgtcacccaggctggagtgcagtggcactatctcagctcactgcaacctccgactcccaggttcaagcgattctctcacctcagcctcccgtatagctgggattacaggcacccgtcaccatgctcagttagtttttgtatttttagtagagacagggtttcaccatgttggccaagctggtctcgaactcctgacctcaggtgattcacccgcctcagcctcccaaagtgctgggattacaggcgtgagccactgcgcccagcctgaattccttattgtactggagactcaacaacagctatgtgaaataggcagcagtgtacccttttttacaggtaaagaaactgaaactcaagttaaatgagttttacagactcttagaggtgggaggatttaaaggtcctctagtctgctcccttcattttcctaggtttggaaactgaggctcagtgaagtaatgcgatttgactgaggtgctagatccatcagaggcagaacccaggcatcctcccttgtgagtgtgctttttacagccctgtgtcaacttgctcccaggcaagccccaggtctctaccttggacccaagaattctggtctctaagggagttggtcacctgctcacaccacagacgccatcaccccaccccagggctctgacatcacctcccctgaccaatgaatgaagtccaagcaaagggtgaggatgtgaatgtcagctacctcccccaccctaggccctgtggttgcaaagatgctctaacaggaagtgggttaaggagctgcactgcttcctgccccctaaagctgagcggggcgaggagggcgagtgccaggctgggccacgagacacaggacacaatttcttgccagggtcctggtagcttcctcttcaacagccacttccgtgtggccggggccccaggggcaggagctgctgcccgttgc

SEQ ID NO: 3083 - DNA, 2300 bp, Homo sapien
tctctgggtacggtctgagccgctgtggatgcagggggaagcagagatggggactgcagagatggatggggcagaggtagaacaggaataaaaagtggggtcatgttcaggtgagggagcttcatccagctagctatcctcgcacccaatccagaaattctctccaagtaaccccaaaagctggggaagaatccatttattaggaagttcttccttccgacgacatgaaactccctctgttacttttgccctgtggcaatatggcactggcttattctcttttctgcacaacaacctttccaaaagcagaggccctttgtcgtgccccacccaaatctactcttctccaagctaaacttactggttcctgacacagttccaccaaagacaatttcaaagcctctctcaccatcctgtgctccatggtattttttacaatgtgggtcctgaatgtgaacacaggcccagcaatggtgtggccatacacgatcagaggagctaataccttccttgatatggaccttcagtgaatgtggtctgagatcacaatcgctttttttattttttgagacagagtctcgctctgtcgcccaggctggagtgcattggcgcgatctcggctcactgcaagctccgcctcccgggttcacgccattctcctgcctcagcctcccgagtagctgggtctacaggcgcccaccaccacgcccagttaatttttgtgtatttttagtagagacaaggtttcaccgtgttagccaggatggtctcgatctcctgacctcgtgatccgctcgtcttggcctcccaaagtgctgggattacaggcgtgagccaccgcgcccagccacaatcactttttaaaccatcactttatattgtgggcacttgtggtgaactctggacttacggtcaagttaagtcttttccattctgtgttaatattttgaaggtaaaaataaaggtttttggctgggtgaggtggctcatgccctgtaatcccagcactttgggaggctgaggtgggcagaccacctgaggtcaggagttcgagaccagcctggccaacatggtgaaaccccatctctactaaaaatacaaaaatcagctgggtgtggtggtgcgcacctgtaatcccagctactcaggaggctgaggcaggagaattgcttgaacccaggaggcggagattgcagtgagccgagatcatgccactgcactccagcctgggcaacagacggagactcagtctcacaagtagataaataaataaataaataaataaatacataaaataaaggtttttatagtttccctttattcacatataagttaataacatcagccttggagtaaaaataaaaacccaagtgtaaatctaggctttgtcacctaatagctgatgacttgggatagtcacttaacttccttgtgctttggtttcctcatctggaaaatagagataataatacctaactcactgtttgttgacagaatttgagataacatttataaggtatttagcataatagttgacacatagtaaatgcttactagatggtggttattattattaggtagatgatatctggttagttttttaattacttcattattttattttttaaaataacctacgttcattgtaaaaaattcgcacagtagagaaggatacaaagtcacctgaatttctaccattcatctgcgtctccatgaaataagagaaggaaagggggcctgaaagtttgtacttgtgcaagactgaaatgcgatgagtgggggcctcctgacagggattgtgtagacctgtgacccctgcctttccccatttgcagtgcctcccctgccctcactgaatcctggtccagcactagaagagggccagggcctgaccctggcagcctcctgcacagctgagggcagcccagcccccagcgtgacctgggacacggaggtcaaaggcacaacgtccagccgttccttcaagcactcccgctctgctgccgtcacctcagagttccacttggtgcctagccgcagcatgaatgggcagccactgacttgtgtggtgtcccatcctggcctgctccaggaccaaaggatcacccacatcctccacgtgtcctgtaagtacttggatgcttgggtagggaggcccaaggggttctcagcagattggtgagatgccacaggtccctgagccatgccaggctggccagcctgggtcctggaggctatatatagtatgtgacagagcactagtccaaatgtggaagacctggagcccgatcccagaggat

SEQ ID NO: 3084 - DNA, 2300 bp, Homo sapien
tctggtagcacctactcatcatttaagactccgcttagacatcatttccagcaggagtcctccctcctcccacccccaccccaggcagcattaggtgcccttcctctgtgctccccagcaccctgctttcattcccatcacagcactttatccctattttctgggcctcacatcaccattggaaccattgtttctgatttagtgctcagtggtatgtgggttccgtcaacatttattgaccaagtgaatgaatgaacaggtgaattaataaatgagagagacagaaggaaagtgtagaatgaggaggaacaggctgggcacagtggctcacaccctaatcccagcactttgggaagctgaggcaggcagatcacctgaggtcaggagtttgagaccagcctggccaaaatggtgaaaccctgtctctactaaaaataaaaaaattagatgggcgtggtggcgggcgcctgtagtcccagctactcgggaggctgaggtaggagaactggtgaacccaggaggtggaggttgcagtgagctaagatcatgccactgacctccagcttgggcaacaaagcaagacaccatccccccgccaccaaaaaaaatgaggaggaacaagcattgggctggccagggaggaacattacatggtaaccttggggtggaggcaggataggctgggctagctaattgggttcactgccaaagggagcacctccagactggacagaggaaaaaaatagggatggaaggaggcaggcatggagggaggaaatgaagccccaccagaatggatcagagagttttagtgaggcagcacatagagcacaggaaggggttcctgtggccctgctaccagaaggagagggaagaaggatgctgagagggcccagatgggacaggatagacctgcagggccagataccagagccctgacctgcctaagctaatgttggtcccacccagcccagcctgggagtccagctaaccacccgcacccctcccaggctttttctcctcctggcactggaaagaacagggctgccaaggaagggctgtgagtgagcttgggtaggggatctccagcacaacatatcctctgcttcaaacgctggtgtctgtgaaggtcacagggatcccaagacctgccccattaggacactcaaacctttctaaagactatttctgagacaatatcagatggcatattttccatccctattcctatactagccaaccacctgctgcctccccaccactaatcacctatatttcccttggaaaataccttcttagggtacagcaggcattagatacccagcgcatgcctgaatgtcaatcctccatgttctcacctgtgagtccacgatccccacccctaggggacacactgaagcttcacagaccgaggaacccagtaaaacaggaaattcccttctggatatctcccacagatcctcattgttctaaatccactacttagtaggaacatctcagcctgaggcaacaccctcctccagctgcatacccccctaccaccctagggtacaagagaagagaaaatagaatttgggccctagaatccctgtccttgtctaaacagacccagaagtccaggtttccaggccagggcaggccaggactgcctcctccttctctcctccacccagtgtcagcctggcgtcagcatgatgatgtcatcagaccaaaggagacacattgcctgcctggtgaggtcaccttgagggcatgtggtggccaggccaggccaagcccagggacccttctgttgcaaattgtttactgaggctggtggactccggctggttagacactcctccctctgaccctcccacccctcctccctggagtaccaggacgctggtcaggagccttggtgactcagaagctgcctcacagcagcaagcctagccacagccaccaccaccttgcgcaagggagagaacaggcccaactggccagacgggatccctgcccttggcctcccccaccctggccaggcccccacgggcctctttggagcccagccctttgtgtaccccgcccgctcccagacaggccctccattccaggtttgggctggctggctcttccccaccctatgcctgggtctcaactttccttcctatgtgagcctggcctctgatctcaggaggggaaactgaggctggcacttgctgacacccagccatcaagagcatctttaaggaagtatcttttctttatgaggggcctttctccatcagtatcccctgctgggacttacagatgtgaat

SEQ ID NO: 3085 - DNA, 2300 bp, Homo sapien
ctgtggcttcctgtacctggaggggtgaatccgtgggaaggaaagcagctcctccgaaagcatgcgataggatccaaggtgtgataattataattataacacaggatgctccccctcccattcccgctggccctactccacccctgccacagaggatctcaaagcagcatctgggtggggctgttcccctggcacaggtggggacctgaaaaagagaaggggttggaggtggagagaaactggggaattctggcaaccggcctggcctttaagggcctctgacctgcaggaaatagcccctgaagaagaggtcactgccgtggtcatttggcatctagagccagagttggggtcatagtccagtgacaggagtaaagtccaggtcacaaccctagttcaggatagtaactcacagccagtcgggatctctgctttactgatccgacttcaccatccttttcatccggacaactcatttattcagaaattcatggcttcaccaaaatgtagtcagttcccatgaaatgctgtggcctgtcctagcatggaagactgagacaagattataaaacaagcccaactttcaaggagttcacaggctacaactcttgtcctgtcccgcaatttaatacatttactgaattcctggcacacagcaggcctcaatcgatgtttttttgacttgaagcttacaatttagttaaggagataagatgtgcacaaattatgagcacataagctataataaaaggactagcaaaggctgaggaagaatagaagaaagattaatttggggtgggaggagcagagaaggcttcacgaagatgtggcatttgaggtcagctttgaaagatgaataagagtttgacaggtagagttggtggggatggtggtggtagaaaatctacacagaacaactcttccttatggcttctttattcctcctttctgccttctccagatggaagggtcctatggcaaaactttaacctatatttttttcttctcccacgtctatctctgtatttacctggtttttgtattagccctagactgcaagtgatgttgtccctcccgttcactaaattttcagtgggctcagaatatgccctcttcctctggctatcccagggaggccaggaaggttttgtgtaatttggcggtcactttttatgcattcagaatggaaacacatggtctgacaaggatgtacttataggaatacagggctagagtacttgaaattaagattctccttgcaaagtccagacatgtggtcttgtccaatgaccttggagtaaactgggtaaaatggccatggagagggtagagaggaacctctctccattcaagttgtgctgctgcgcttttgggactcctggccaggtaacaaggtgttgaagctgagagagggccctgatagggaaaccaggaacccctacggctaattccttggccacttccttggcctcttatatatggaggtggagttagaggagttacgtaagttctttctcaggggtctttgaactacttccctacttcagggatagaggtgtctgagcaaaccatgagactaagttgtgtgtcctctggcaagtccctccccttctctgggccttggttttctcttctgaagaatgaagtatacagcgcagcactgacagactccttcctcctcagttctggccttctccgattctgtggctccaaagctgagaccctccaggagatccgggaacttgtcaaggcccccaggaggtaccaaggctagctggggtgtgggacgcttgggttcctttctacccacaagggccttgcccctttcatcctggcctggcctggtgccctgggcctcccttagtccccacccttgcctctcccttcatagccccttccacatactcgcaggtaaagcctggagctgaggatgggaccccaccgcccccacccaggtccttccctccttccctccctccctggcgcctattagctagcccaggccatgggggcggtggctgctgagtctccgtgccaggcccagcccccagagacgcacctgttctgacctgctgagcaggttcccaggtttctgccgtcgttgttggccacagcgtgggaagcagctctgggggagctcggagctcccgatcacggcttcttgggggtagctacggctgggtgtgtagaacggggccggggctggggctgggtcccctagtggagacccaagtgcgagaggcaagaactctgcagcttcctgccttctgggtcagttccttattcaagtctgcagccgg

SEQ ID NO: 3086 - DNA, 2300 bp, Homo sapien
accactgcagatgctgtcctgcggtgtgaagcatgtgtcatacaagtccaggttggctggtttgctttcttcctctctctgtttctctctttctggcttcttttctccctcctccaaaatatggatttggttcaaactaacctaagaaggtaggagtcctaggcagttcctctcccagggtcttgggatggcaaagcaatggacagatgcttccagctattaggaggaactggaagcatctaggtacagaactggagagggtacagccaaggagtatgtgaggttcaagctctatgtctaactaagatgcctactgctaaggactcagagtcagagaggaagctgggagagaggagctggaaaggcccgtggggtggggagttcccatttctatccaggaaaggcagaaagtaagtctaacagaacagccaagacttaggcaaaagcaagagcctaaaatggacatataggccaataaggtttaagcaaaattgccccacccctgaggcaagcccttgcctaatcctaggagtatgacagatctgaatccagctgttgggaggttagccagtgagaaagaagcctgagggaaaagactgacttttaaatttcagccaaggacagtaaaagttagtgattttttagagattcttaccatgattttggaaaactgagaatactgcctgtcatactcagggaaagctatagttgggagggcagagactttcaaagctattgttgaatcttggctttaaggtacaggtggggaacaggtcctggtaatcttccaatctctgtaactgtgcctttcctgcccatgccatccccatgctgtgttctctgaggaccaagagttgggaagaggaggggaaagccctgctgtgctatcagaccctgcattacatgcccatcctcactgcagccctggccactgtctcctttcttcctttctttatttcttttctttttttctttctttctttcgccagggtctcactatgttacccaggctggtcttgaactcctgaactcctggcctcaagtgattctcctgcctggccactttctatggtctcagtatctcaggtatgatggggagcaaggtgatgtgtagaaaccaaaggccacaagtagcagtcatcattcccacttacagcccagtcccagaggacacagatcctgtttttgccccacaccagctgtgttgggaggaaaattctgtctgtatttcctccttcagctgaaagcagaaagcttgcatctgggcctcttcagttatcacttggtcctgggggacagagttaatatctggaaactggcttaaataaaagatatcagggaagggtaggagtctgtttttctcattttctcactcttcccccacttcacccttctaaggctgcgtgggttctctctctctctctatctctctctctctctctctctctctctctctctctctctctctctctctgtgtgtgtgtgtgtgtgtgtgtgtgtgtgtgtgtgtgtgtcacctgagagactgggttctgctaccctctagtggccagagctgaaaggactctcccacccaatcaatcgggaccttcaagcctttgggaataaacgaacagcctatttgatgaatgacaaaactgagaaggcctagagagaaacaatgcctttgagggtcaggggcatagttgggactagaacccaggtctcctgtctctcgggccagtggtcagtccactttcacttccccaccctctgacttttgcttctccttccttgctcatccctggggtggttagcccgagtaagaaaccctgaagccaaatgatccctcccggccctagtggagcagcacctgcacctcaaatgtcaaaatcgcaaatcagttcacagcggagatcacaggggtttattctaaggacccgactgtcctccgactttctgaggttaacaatcttgcaggatttttattgacctgatacagctcccgtagccttggtggcaccaccatacggttcccgatagccacccaggtgtcctgtctccacggtaactgctgctttgcgaccttcggtttgcagcggtcgcgctgcagccgctgcagtggttgctgggcgaccacggagagaaagccgggacttgaggtgggaaccccggctggcgtccggtagggggaggttcccggggaagcccgcggaaggcgaggtgcctggcctgccatgtaggggctcgttccaagccgcagaccccaccgccctccctctccccggggcccatggcggtggccgtgcccccgggtcggg

SEQ ID NO: 3087 - DNA, 2300 bp, Homo sapien
gcctgccatgtaggggctcgttccaagccgcagaccccaccgccctccctctccccggggcccatggcggtggccgtgcccccgggtcgggccgcaggctcaggctgggcctggaggccagtggcgcgggacgcgcttttggctagagctttccattcatgcaccgaactgcggggacggttctatctcgtaggtggtctcctagcaggaggagcgagagagcccagcagcgatacggtggttttcgacccagctaggggccaggccgtacgattgggagcccggggcagccccccgcgcagtcaccacgacgcggcacccgtggacgggcgttggctctgcgtggtgggcggctgggacgggtctcgccgcttggccacagtgaccgcactggacacagagcgcggtgtgtgggaggcgtggacagggacccctggtgactgcccccccgccggcctcagtagtcacacctgcacccgaatctctgaccgagagctgcaggtggctggccgggagggcggtatccacactcagcgacgctatggaagcatctacacattaaggctggaccccagcgcccgcacctattggtatggcaccctccgcccaaaacctttcactctcatccacactctcgaaaaacaaaagcctaagcagatttctcaggcaatttatccacctcctcactctagcaccctccttccaggggaacctaccatgtttaagctagctgagctctctacagtattaccctccctcttatcccacctaccgcactgccccatgcctcttctccatccatccttggcaagggcggtggcacttacattttccagaaaacccactcagccctgaatttctgcatgtccacagctacaagcaagaaggctgccacacagcctcacgctcaggtcactgtgcggccctgctccaaactcctggaccccatccaggtcatcagctattgctctttggaggttgcaacttagctgaaccagaagtagctgggcattggagtcatgggaaaattaaggtattagctcctcacacatcttgtttaggatgggaagaggctaaaattgtgatgcccaggtctcttcggacagtcctttctttctccccaaggaggaaccacctgttgctcctcatttgatggaacagcttgcaaggcttgtgagcagtgggcaggggtcccagaaggggccccatggactacggcatcactcatgttctgtggtcgggccctttgctgtgctgtttggtggagaaactctgaccagagctagagacaccatctgcaatgatctctacatctatgatactcgtgagagccagactaatggctgaagggggggaaggtgggaagatgggggaacctgaagactacagaaagaggatggagtgatggggtagggaggaggaaaaattagttgacaggagttaaaggagtacacagaatattaagcatttgaagaggcctacaaatcaagtgagcagaaaaacaatgggcaagcccttggtcatgttgaattctgtgaatgacaaagtgctactgcctcaataaccaccctctgcccgtatccaacaggcacatctcctcctttgtggttccacttcccctgtgcagatcgtgggatgaaacgcatgggccatcgcacctgcctttggaatgatcagctttacctggttgggggttttggtgaggatggcaggacagccagtccacaggtttgcatcctggactttatctaaatagtgccaagacacatcactaagcctcgttttgttttgctttgttgcaaacctataaagcgttatcaccagagctatctgcttcacttcaaatgcttattaaatttcaatctgagactcaagatttgtctctgaaatttttggggggagggggaagggcagtaaataagtggacatacctttatttgcaaggaaaggataaaataaatatgggtcctactctcatattatgagtcattaacctgatggaaacaaaaaccacacatcatatgctgttccgtgtctcaaaacaatttccacccccaagtgggagaaaacttcaggctacagctaagattctgaccaaaacatttaattaacaaaaaaatattacaatagcagagaaaataataataataacaataaagagaaattagaagtgggagtcagggtagaaaaaaatgcaaaggccttggtccctaggagaccaacactccagctgagctggccttagccccagccccttctgagttttccttggctgctggcttctcatcttctcccatgag

SEQ ID NO: 3088 - DNA, 2300 bp, Homo sapien
ggagaccaaggcaggtggatcacctgaggccaggagttcaagaccagccagagcaagaaagtgagactcccatctctaccaaaaaaacaatttttaattagccattcaaatggcttatgcctatagtcccagctactcaggaggctgagtcaggaggatggcttgatcacccagggatttcaaggctgcagcgggctatcatcacgccattgcactcagcctgagcaacgaagtgaaactctgtctctaaaaaaaaaagtactgtggctcatgcctgtaatcccaccactctgggaggccaaggcaggcggatcacttgaggtcaggagttcgagaccagcttggccaacatggtgaaaccccgtctctaccaaaaagacaacaattagccaggtatggtggtgcacctgtaatcccagctactcgggaggctgaggcaccagaatctcttgaacctgggaggcagaggttgcagtcagccgagatcacgccactgcactccagcctcggcaacagagactccgtctcaacaacaaaaaagtattaaaaagcattaggttccttttcccttcccccaccccaagtcagaaaccatattccatagcactttatacttctcttaggacacttatcttctgcctcatatgagcattttgcttctcttatttaccccactagactatgctcttcgagaccagcatgggcaacatggtgaaatcctgcctctacaaaaattaactgggcgtggtggtgcgggcatgtaatcccagctactcgggaggctaaggcagaaatgcttgaacccgggaggtggaggctgtggtgagccgacatcccgcaactgtactccagcctggatgacagagcgaaactctgtctcaaaaaacaataaaaataaaaatctttatgctgatacatctgcttgtattaattgttcaacaaaaactgaacctataattaagacagctgtaggccgggagcggtggctcacgcctgtaatcccagtactttgggaggccgaggcgtgcggatcattaggtcaggagttggagaccagcctggccaatatggtgaaaccccgtctctactaaaaatacaaaaattagccaggtgtggcggcgcgcgcctgtagtcccagctactcgggaggctgaggcagaagaatagcttgaatgaaccacgaggcggattgcagtaaggcgagatcgcgccactgcatgcactccagcctgggcgacagagcgagactccgtctcaaaaaaaaacgataataataaagtagctgttaactgttttcatttctattgtgtagctttcctcccactcctatttttccacttagcaaaacacggttcccaagccacaaagggttttctaattaacttatcaaacgcttcccgatgctaggcactggggaaaatgcaaactcggattagaaaggggtttctggtctctaaagaaattcgatctagtaatgaactcccgaattaaaatagtatatagaacactaggctgttcgagtatgagagtcacgtggctctgcagcgtgacggcgattgtcaacgtgggttcaggatcacgtaacagactacacagccagcccgttaactaattctctagggttagtttcgagctgtcttgcccagccataacctgtttggagaggctgaggagagatagagaaagcagcaaaccatctcccctcagacctgtgcatcttcccagaccctacatgtcagggctttccccttgctcaggctcacccaccacctcacggaggcgtggctctcacctacccacccgtctacctctccgaaggggttcggctagcttttccggggacccttccctctctaggtgccacgcacatgtggtgctggagtaaaggcctgcacaagccacaggctcccccttctcgctagtattccagacccaggtgggtaccctgcttcgcgttagccactcctcacctgctctgcggacaccgcccccttccccgcgccgctcccgctgctcttgccggcgcgaccgctgttctccgccatcttcgccgcctgctgggtttccggccggcgcagctcagcccccgccttgcgtcacgtccggcctgcgagttaccgcccactcgctgcggcgcttctggctccagaccgccctccggatcggaccctgcgaatggttttggctatatcttcatgtaggacctactccctatcccgtcggccgcggtgaatcccacctgcggtgctttaacttgtgtaacagagatgctgcctctgggagaggcggggagggacggg

SEQ ID NO: 3089 - DNA, 2300 bp, Homo sapien
ttcagggaaccgcatgtcatagcagacagctagaccaatctggaatgaaaaacagcctacttagtagtcttcctgctctgtttgtcacagcatctagtcatatttccattaccccctctcttagggctttctatcctctactgccagttcaaagtattcctgttcccctccctcatcctttcacaactcctaccttgcctgctggtgtgctgacaggtgactcaagactgggcccaggcatggtagagttgctttcacacataggcccctgccctggaatctctacgtcacacagatgtgtcttcctgtaagtggccactactgcccctacagtaagaaagaaggaatatcagtgctggtgttctagaagccttgcttactcctcccaaggaggagatagtttataggctaggaactgaagtaggaccacccctaaatccttgggtcaaggaaataagagttgagaaacaattctggagaatctaggtagaagagcatgggaagaggcaggctaaagggttataaagtctcacctttgctgttcagcagcacgtgacaattgtagattttctgagtctgctcccagtcttggccacgctcatggaaaccacccaaggacagccagagtccacattccctggggggaagggacactgacaactcttcactgacttctcaaggctctaccctcatatctggcaacccagggacactgtccaacaaagattctacctctccctcgctatttccctgatacctggcaagctgggtgtattcttccaaaagtttcccacccagtggttcagacaggtgtagcgtctctgcagggtcccgtgcaatgaagtcaaatgcctcaggcaggaaagccaggcaggcacccagtctggcagcctctcgaaccagctcagcacatgttttaaagttctgttgcttgtctggcgtcgatgttacctggcacacagccaccaggggcagttcgcaggaggaagaggagatagccatggctctgggcctgtgaacagcataggcaggattctcagatttcatagcacagggaagcaaatttaatgctaaggggtgcaagtggagaggcaggaaagctggacttccttttgatcatgctcttacagggcacgttgacccagggctagtagggctcaccaatcaaatgtgtggatagttgacactcctgtgtctcccactatccatttaacaaactgagcatctaagtgccaggcactgaggacacaacaaaacgtgttacctgggctgagcacaaagtactgagagttgaggtatccggagtccaggacacagaagggacaggaatctgtgaggaggcctggtgatgaagcccagcctgaggaaggtgagatatgaggacaccaaccccttcttcaagcaataaatttctaggattctctgacttctctctttatactgtgagcctgaatcagggccctgccagtaaaaacctagtcttcaaaacgctctttataagaaattataggctaagggacaagaccatacagtgggaagatggagaaaggggctctgctcgccgcctgaatagttcaacttccaatgatctcacattaaactgaagcctctttcctctgacaaacgtttccgcagtccaaaagtcatctccgggaactatccttggttttcccaagactctctccttgactgtgcacttgcgcagctttactgactcgaagcatatttcccctttcaccagaatctcgcaggggaaagttcaccctctctcgtctcccacccctccctggtgggcaaggggcaaaggaacccaggccccaagccgcgccccgccctccaccctcccgccgcccgctccagttggcccgtccctccccgcctctcccagaggcagcatctctgttacacaagttaaagcaccgcaggtgggattcaccgcggccgacgggatagggagtaggtcctacatgaagatatagccaaaaccattcgcagggtccgatccggagggcggtctggagccagaagcgccgcagcgagtgggcggtaactcgcaggccggacgtgacgcaaggcgggggctgagctgcgccggccggaaacccagcaggcggcgaagatggcggagaacagcggtcgcgccggcaagagcagcgggagcggcgcggggaagggggcggtgtccgcagagcaggtgaggagtggctaacgcgaagcagggtacccacctgggtctggaatactagcgagaagggggagcctgtggcttgtgcaggcctttactccagcaccacatgtgc

SEQ ID NO: 3090 - DNA, 2300 bp, Homo sapien
gtctccagctcctgacatcaggtgatctgcccgccatggcctcccaaagtgctgggattacaggagtgagccacagcacccggcctatttatttcattttttttgagacagggtcttgctctggtgcccaggctgaaatgcagtggcgcgatctcggctcactgcaacctctgcctcctgggttcaagcaattctcatgcttcagcctcccaagtagctgggattaccggcatgtgcaaccacacccatctaattttttttgtatttttagaagagacagggtttcaccatgttggtcaggctggtctcgaactcctggcctcaagtgatccacccgcctcggcctcccaaagctaggattacaggtgtgagtcaccatgcccggccctgatgtatatattttagttagcattttactatatctctgttacactaaacgctttcaccagtttccttgatagttctctatggttttcttctttcctttcggtttgccccttctcagtgttcttttcggcttccctcatcctatcccgcaaatgcaggtatcctctccagcccacttcatggcttcaacagctatctatatgcacacgcacacacacctcaaacctttcttttgagttcccaacccacattagctaatatcccaggggcacctaaaactcattatctcccccctaaacgagaaagaaactggtatcattattccccagttgtccaagtcacaacattcgtacctcttaaaccaatctgtatctccccatccgcactctcccttccacaggcagaccatcatcatccttgcctggaaaagagcctcacaactgctctccttgattctcctcaattcattcatccttcacactgcacgcagcgatctaaaatgcaaatgaaattgttcacacctctgctgagattcttcaaagacttttcattgccttaaggataaaaatcaattaatttacaaggcttcgcataatctggtcttcccctatctattaccactttcttaagccacaccagaacgtacccgcaccatcctccccacccccaattcccaacagccctacacggatcagctaggcgacacttcctacaggaaaccggcgttcaaaaggtaaatgctgaacaaatgaattccgagacgggatctgggcaccactttcggctccggatccgggtttacggaacgtccgggttatcaggaagctcagaggaaaggtgaaatccagatcttgacccttcactcaagttcgccagacaaaccgatccccgtggtattccgcccttatgagtcatggctgccaatcccagccttccagtgggtcttgaagtcgccaccagccagctgtggcgccaccaatgtttcccattcaagaatgctatcctcttcgatcccttattaccgccctaagcagccgtcaagacaaaccggcgttgccagcttgccccaaagcaagatggctgccaatctctatctctcctcccgaagtgaagctatccactccccgattaatgccgctgccaggctgccctcacttactatggctactccggctcatgtctcactatggcctcgaagccgccactaaccggccgggttccgggaggcgccgttcaggatgcagccacccccgcccgcctgtcccctcccccacggccgcggcggcggcggcggcggcggctgctggagcccggatgcggcgccgtgaggcaggcccgggagagcggcgcggatggatccaacatggcggcgccgagcctgagccgagagtgaggcggaggggcggccggagtggggagagggagtcgagcgggacggggcggggccgggcggggccgcaaagggcttggggaaggaaagtggagggggaggcggtggcgacgtccagcctgagaacctcaagagagggaggtgacgggacgctgagaggtgggggaggggagctgccgaggggggcgtgcaggggagatggcaactgcgggagagggcaggggtcgagacggaggagtgagggcatggggaggggcgtaaacaagggctgagactgggcccagccaggggtattagagaggccgaggtggggagtggggctgcgatccgctcgtattgaagggggtaggagcaggagggagaggctgagggtgtgaaggggaagggggctgtggcatgtggttggagggaggactggactctgatgaggggtgttgcgaggaggtgggtaaaggtcagaattggagttaagacgtttctggggggcttcgaaagtgttaaattggaggtgggagggggaagg

SEQ ID NO: 3091 - DNA, 2300 bp, Homo sapien
ccttgttgcaatatctgatagatacattttatttactttattttatttttttggagacagagtctcactctgtcacccaggctggagtgcagtggcacgacctcagctcactgcaacctctgcctcctgggttcaagcgattcttgtgcctcagcctccccagtagctgggactacaggcgcgcactgccatgcctggctgatttttgtatttttagtagagacggggtttcaccatgttgaccaggctggtctccagctcctgacatcaggtgatctgcccgccatggcctcccaaagtgctgggattacaggagtgagccacagcacccggcctatttatttcattttttttgagacagggtcttgctctggtgcccaggctgaaatgcagtggcgcgatctcggctcactgcaacctctgcctcctgggttcaagcaattctcatgcttcagcctcccaagtagctgggattaccggcatgtgcaaccacacccatctaattttttttgtatttttagaagagacagggtttcaccatgttggtcaggctggtctcgaactcctggcctcaagtgatccacccgcctcggcctcccaaagctaggattacaggtgtgagtcaccatgcccggccctgatgtatatattttagttagcattttactatatctctgttacactaaacgctttcaccagtttccttgatagttctctatggttttcttctttcctttcggtttgccccttctcagtgttcttttcggcttccctcatcctatcccgcaaatgcaggtatcctctccagcccacttcatggcttcaacagctatctatatgcacacgcacacacacctcaaacctttcttttgagttcccaacccacattagctaatatcccaggggcacctaaaactcattatctcccccctaaacgagaaagaaactggtatcattattccccagttgtccaagtcacaacattcgtacctcttaaaccaatctgtatctccccatccgcactctcccttccacaggcagaccatcatcatccttgcctggaaaagagcctcacaactgctctccttgattctcctcaattcattcatccttcacactgcacgcagcgatctaaaatgcaaatgaaattgttcacacctctgctgagattcttcaaagacttttcattgccttaaggataaaaatcaattaatttacaaggcttcgcataatctggtcttcccctatctattaccactttcttaagccacaccagaacgtacccgcaccatcctccccacccccaattcccaacagccctacacggatcagctaggcgacacttcctacaggaaaccggcgttcaaaaggtaaatgctgaacaaatgaattccgagacgggatctgggcaccactttcggctccggatccgggtttacggaacgtccgggttatcaggaagctcagaggaaaggtgaaatccagatcttgacccttcactcaagttcgccagacaaaccgatccccgtggtattccgcccttatgagtcatggctgccaatcccagccttccagtgggtcttgaagtcgccaccagccagctgtggcgccaccaatgtttcccattcaagaatgctatcctcttcgatcccttattaccgccctaagcagccgtcaagacaaaccggcgttgccagcttgccccaaagcaagatggctgccaatctctatctctcctcccgaagtgaagctatccactccccgattaatgccgctgccaggctgccctcacttactatggctactccggctcatgtctcactatggcctcgaagccgccactaaccggccgggttccgggaggcgccgttcaggatgcagccacccccgcccgcctgtcccctcccccacggccgcggcggcggcggcggcggcggctgctggagcccggatgcggcgccgtgaggcaggcccgggagagcggcgcggatggatccaacatggcggcgccgagcctgagccgagagtgaggcggaggggcggccggagtggggagagggagtcgagcgggacggggcggggccgggcggggccgcaaagggcttggggaaggaaagtggagggggaggcggtggcgacgtccagcctgagaacctcaagagagggaggtgacgggacgctgagaggtgggggaggggagctgccgaggggggcgtgcaggggagatggcaactgcgggagagggcaggggtcgagacggaggagtgagggcatggggaggggcgtaaacaagggctgag

SEQ ID NO: 3092 - DNA, 2300 bp, Homo sapien
atcatgtttcagcctctggagtacctgcgatcacaggtgcgcaccaccatgcccagctaatttttgtattttttgtaaagatggggtcttgccatgttgaccacactggtctccagctcctggtcttaagtgattcacctgcctaggcttcccaaagtgctgggattacaggtgtgagccactgtgcctggcccttgttgcaatatctgatagatacattttatttactttattttatttttttggagacagagtctcactctgtcacccaggctggagtgcagtggcacgacctcagctcactgcaacctctgcctcctgggttcaagcgattcttgtgcctcagcctccccagtagctgggactacaggcgcgcactgccatgcctggctgatttttgtatttttagtagagacggggtttcaccatgttgaccaggctggtctccagctcctgacatcaggtgatctgcccgccatggcctcccaaagtgctgggattacaggagtgagccacagcacccggcctatttatttcattttttttgagacagggtcttgctctggtgcccaggctgaaatgcagtggcgcgatctcggctcactgcaacctctgcctcctgggttcaagcaattctcatgcttcagcctcccaagtagctgggattaccggcatgtgcaaccacacccatctaattttttttgtatttttagaagagacagggtttcaccatgttggtcaggctggtctcgaactcctggcctcaagtgatccacccgcctcggcctcccaaagctaggattacaggtgtgagtcaccatgcccggccctgatgtatatattttagttagcattttactatatctctgttacactaaacgctttcaccagtttccttgatagttctctatggttttcttctttcctttcggtttgccccttctcagtgttcttttcggcttccctcatcctatcccgcaaatgcaggtatcctctccagcccacttcatggcttcaacagctatctatatgcacacgcacacacacctcaaacctttcttttgagttcccaacccacattagctaatatcccaggggcacctaaaactcattatctcccccctaaacgagaaagaaactggtatcattattccccagttgtccaagtcacaacattcgtacctcttaaaccaatctgtatctccccatccgcactctcccttccacaggcagaccatcatcatccttgcctggaaaagagcctcacaactgctctccttgattctcctcaattcattcatccttcacactgcacgcagcgatctaaaatgcaaatgaaattgttcacacctctgctgagattcttcaaagacttttcattgccttaaggataaaaatcaattaatttacaaggcttcgcataatctggtcttcccctatctattaccactttcttaagccacaccagaacgtacccgcaccatcctccccacccccaattcccaacagccctacacggatcagctaggcgacacttcctacaggaaaccggcgttcaaaaggtaaatgctgaacaaatgaattccgagacgggatctgggcaccactttcggctccggatccgggtttacggaacgtccgggttatcaggaagctcagaggaaaggtgaaatccagatcttgacccttcactcaagttcgccagacaaaccgatccccgtggtattccgcccttatgagtcatggctgccaatcccagccttccagtgggtcttgaagtcgccaccagccagctgtggcgccaccaatgtttcccattcaagaatgctatcctcttcgatcccttattaccgccctaagcagccgtcaagacaaaccggcgttgccagcttgccccaaagcaagatggctgccaatctctatctctcctcccgaagtgaagctatccactccccgattaatgccgctgccaggctgccctcacttactatggctactccggctcatgtctcactatggcctcgaagccgccactaaccggccgggttccgggaggcgccgttcaggatgcagccacccccgcccgcctgtcccctcccccacggccgcggcggcggcggcggcggcggctgctggagcccggatgcggcgccgtgaggcaggcccgggagagcggcgcggatggatccaacatggcggcgccgagcctgagccgagagtgaggcggaggggcggccggagtggggagagggagtcgagcgggacggggcggggccgggcggggccgcaaagggcttggg

SEQ ID NO: 3093 - DNA, 2300 bp, Homo sapien
tgatccgcccgcctcggcctcccaaagtgctaggattacagccgtgagccaccgcgccccgccaacactcttactcaatattgtactggaggctgagcacggtggctcacgcctgtaatcttagcactttgggaggccgagcgggctggatcacctgaggtcaggagctcgaagccagcctggccaacatggtgaaactccatctctactaaaagtacaaaattagccgagcgtggtgctgcatgcctgtaatcccagctacccggatggctgaggtaggagaatcgcttgaacccaggaggtggaggttgcagtaagccaaaatcatgtcactgcactctagcctgggtgacagagtgagactctgtctcaaaaacaaaacaaaacaaacaaacaaaaaaacttactgccacaggctggaatgattcactgaataaacagtgaaataaacataaataaaataaataaatatatttttaaaaattttggtcttactttgaccccccaggctggagtgaagtggtataatcttggctcatttgcaatctcgacctccggggttcaagagatcctcctgcttcagcccccaaaatagttgggactacaggtgcccgccaccactccggctaatttttgtattttttgtacagctggggtttcaccacgttgcctaagctattttcgaactcctgggctcaagccatctgcccaccccggcctctgaaagtgctggggttatctgcgtgaatcaccgcacccggccaaacaagatatttaaatctataattaacgtttttaggttttatttattttttgagacggaatcttgttcttgttgcccaggctggagtgcaatggcaggatctcggctcattgtaacctccgcctcccgggttcaagcgattctcccgcctcagcctccaagtagccgggactacaagcgtgcgccaccatgcctagctaattttgtattgttagtagagacgggtttcaccagtcaggctggtctggagctcctgacctcaagtgatccacctgccttggcctcccaagttgctgggattacaggcttgagccaccacgccagccaaacaggatatttaaattaaagccaaaatggccggcgcggtggctcacgcctgtaatcccagcaccttgggaggctgaggcaggtggatcacctgaggtcaggagttcaagaccaacctggccaacatggcgaaacccggtctctactaaaaatacaaaatcagccgggcgtggtagcacatgcctgtaatcccagctactcaggacgctgaggcaggagaatcaattgaacccgggaggcggaggttgcggtgagccgagatcatgccattgcactccagcctgggcaacaagagtgaaactcggtctccaaaaaaaaaaaaaaaaaaagcaaaaattaatgtgtttagattttaagtccaactggagtttgtttattgtttccccacaagtaatcccagcactttggggaggctggggcaggaggatcgcttgagcccgggagatggaagatgcagtaagctatgatcgtaccactgtactccagcctgggcaacagattgagacactgtctaaaaaaaaaaaagtctaggactcagtgaatggctagactaaggcagaaatcttgcagggatttgtcttttgattctgcatggtttctaatctttatcaggagttaaacatccttctacaggataactgcatctagaggcaggactatatataagcaaaggaaaagttcttcgaagaggaaacacgaatcgctcgttttaggaagtcagtgccttgaaaagcgccttggggttgggggctcggggctgggggagggatagcattaggagaaatacctaatgtaaatgacgagttgatgggtgcagcaaaccaacatggcacaagtatacctatgtatcaaacttgcacgttgtgcacatgtactctagaacttaaggtataataaaaataaataaataagtaaaaatgccttcagcagcctgaagttctaagagctttccaagtttgggaaggtgtccgggttttctgcgattacttctctgagcatgaacggaagtcaccctttgtgccttatgcggtgattttaatgataggtgtcatatataggacggagtaatctgtttacattctgttcttctcgatgcactcacaagcgggtaactaggtgacaagaaaacaaagatcttattcaaaagaggtcttacagcaacccaacgtctcatcttcccatagtaaagatgacggcgccttgaggtaag

SEQ ID NO: 3094 - DNA, 2300 bp, Homo sapien
gctatcctttcttgaagggaccaaagaaaactttaaaaatgggagagaaaagctgaggtttgaggcaagcataagttatatttactcatctccacatccagaatcctggtatggatgtgctccttggggagttttacttaacatttcagtttaaccaagaaatatgtatgtctgattatattagttcctttctatcctgattctgttttattaaggttttataatttctccagattcctatcacatatcctactactgccccagaaattgcagttcctgagctggatggaaagacagcaaagatgtacaggtaggactgaataggagatggcaaagagtcaaagaaagccttaaggaagaacttcgtggcgggagggagagcatcaggaagaatagctaatggatgcttggcttgatgtctgggtgatgggatgatctatgtgtaaatcaccatggcacgtttacctatgtaacaaacctatacatcctgcatgtgtacctctgaacttaaaagatgtaaggaaaaaaaaaaaaaggaagaactttggaggcagagattttcccagggtctgctggcctagtggggtgccaggccctcctttgctgagcctaagcaaagtacttagctgaacttgttctcaattctgatcactagtagtcttcctatgcccccaagaggctgctgtgctttatggtaaactttgcatgtcaacaccttcttcatgtccctctcataggggtggcaaaatatgcctgacggatcatttcaaacctttgtgggccaggaatgtgcccaaatttggactagctcatctcatggctctgggggtaagttttgtgtatttggcataaaaggagaaagagggacttaggccctgagcagtacaagaaaagcagctaagaataaaaggaataacagtgatgtcccttaagcatgttcccccagaatctgtctccaggaaggagcttctaatggaacaagaagcattgactggtagtaatctcacaggattttccttgtattgcagctgggtccatggctggcagtggaaatccctgatctgattcagaagggcgtcatccaacacaaagagaaatgcaaccaatgaagaatcaagccactgaggcagggcagagggacctttgataggctacgatactattttcctgtgcatcacacttaactcatctaactgcttccccggacaccctccacctctagttgttactaagtagctgcagtaggcattgctggggaagaaacaaacacacaccaaacagtactgctacttagtttctaaggctgcacagggaagggaaagactgggctttggacaatctagaggtaatttatatccgcccccaggtggagcaacatgcgattctggaggcacgggggtaactgaaagtgagtacatatagtctttctggtttctggagataacccatcaataaaagctgcttcctctggtagcctgtggttctcattgggagctgttaacagagggcaagtgggctgaaacctgaggcacatgaacagctacgccgggttgggttgggaaagagtcggaaataggggatgctctggtcaggagtgggaatgaaatgttgactgttccccctgctgctcagatctacctttgtcctttagtggtgagccatgctttgccctaccgtgttagcctgcaagaagtggttttgccggaccagcacttcccgccctccagggatcttcccagccctctgtgaagtgctagatgcttctccactggtctgcgggctggacccaggcctgcagtttgccatacttgcgcccctgctgtttgggaaggatctgtgctgtaagcctcgcggccatactacgactgtcagatctccatccctatgggctataggatggggcgacggcaccctatacctcagggacttgctttggagtcatggattaaagacctctctgggcagcgttgagaaccagcgaccctaaacttggctgcgtttccatggtgtcgatcgcggagccgtgggggcgggctcacgcaagcgccaagggaccggtgggaggagttcgggtgtggatgcgcaggcgctttgagagacggtgaagccggtggccggtggccgggcgggaccaacaaagatggcggcggcccctgcggcgggagcgatctgggcaacggctgcggctaaagctgcagccgggcccacgggggggctgcacgggggtagtagggggtggccctgaactggggcctggccctggctggcctctcccgccgcctcactgggggacaggtacg

SEQ ID NO: 3095 - DNA, 2300 bp, Homo sapien
gtctttctggtttctggagataacccatcaataaaagctgcttcctctggtagcctgtggttctcattgggagctgttaacagagggcaagtgggctgaaacctgaggcacatgaacagctacgccgggttgggttgggaaagagtcggaaataggggatgctctggtcaggagtgggaatgaaatgttgactgttccccctgctgctcagatctacctttgtcctttagtggtgagccatgctttgccctaccgtgttagcctgcaagaagtggttttgccggaccagcacttcccgccctccagggatcttcccagccctctgtgaagtgctagatgcttctccactggtctgcgggctggacccaggcctgcagtttgccatacttgcgcccctgctgtttgggaaggatctgtgctgtaagcctcgcggccatactacgactgtcagatctccatccctatgggctataggatggggcgacggcaccctatacctcagggacttgctttggagtcatggattaaagacctctctgggcagcgttgagaaccagcgaccctaaacttggctgcgtttccatggtgtcgatcgcggagccgtgggggcgggctcacgcaagcgccaagggaccggtgggaggagttcgggtgtggatgcgcaggcgctttgagagacggtgaagccggtggccggtggccgggcgggaccaacaaagatggcggcggcccctgcggcgggagcgatctgggcaacggctgcggctaaagctgcagccgggcccacgggggggctgcacgggggtagtagggggtggccctgaactggggcctggccctggctggcctctcccgccgcctcactgggggacaggtacgggccggggcgttatggcatggcggggtgtgggggggcgcagagggaagactgctccagacccgagaggacactctccacaaaggcgcgtggggcccggcggggcctgggagaactgggctggagggacagcatccctggaccgcggggaatacgccgccggattccgtagccaatcagcggtctcggcctttctgccctcgaggggggcggacccggctaaagccctgctgtggtgggagaagtgcagagattaagggtcaaggagttgttcgtcctccatccccgactactgctttctgaacctcgacaccatgtcggaggtcggaggtgggggagggaatggatcgtaagtcacccatatagtctgcttcatttgcagcccagagaggcagggattcgaggatggagggctgtcttttgggctgttattcttgcatctacactaccatttggctagggtcttaagtgacccgaggcacatcctactttactagccgggtatggggtcccatgttacgttagagccgagataggagttatcactggcttttcagtaaagatgtgttctgcagggaggggtcgggagtatagaaagggtcaaagccatgggctgcttatctttcattcatttgtttacccaatagatactaagtatttactttgtaccaaacacgatgccaggtactggggatacgatggctgattcgatagatctggttcctgccctcagtgcgtatactgctccccactttcgttgatgtggtagtggtgatgactgagccaaccacctaatgtggaaatgagaggacagcaagattgtgggtatggaatggggcaaagcaataagggaaaattagtgtggcagggttcagtacagcagcctgggttcccatttccccccatattcaaatgctgacactctcttctcctcccaggtccagcctgtggtgtccacaatgccccaggcctctgagcaccgcctgggccgtacccgagagccacctgttaatatccagccccgagtgggatccaagctaccatttgcccccagggcccgcagcaaggagcgcagaaacccagcctctgggccaaaccccatgttacgacctctgcctccccggccaggtctgcctgatgaacggctcaagaaactggagctgggacggggacggacctcaggccctcgtcccagaggcccccttcgagcagatcatggggttcccctgcctggctcaccacccccaacagtggctttgcctctcccatctcggaccaacttagcccgttccaagtctgtgagcagtggggacttgcgtccaatggggattgccttgggagggcaccgtggcaccggagagcttggggctgcactgagccgcttggccctccggcctgagccacccactttgagacgtagcac

SEQ ID NO: 3096 - DNA, 2300 bp, Homo sapien
cctggggggactccatgtggataaaagggattgcatgatgtcttcatatggggaataatatttatgtatctgggtttgtgttggagtctcagatctgttctagtactcctagagcaaaggggagaagccaagaggatccagctgtaatgaagagcatactaaatttgtatgtggatcggggtgtcagaaaagccaattgaggttaggagcatattaacctaacactgtttgccatttattcaggtgtgtgaccgatgtcggcagaaaactcgaagtaccaaaaagttgacagtacaaagattccctcgaatcctcgtgctccatatcctaatcttcagattcttacttctcttaggatacctcccatacattctctttcctccatgtttccagagaattgaattttccttaggaaaagtctgccacccacttttccacaagatgctcccagtgtgtcgggagtggggagaggacagctttcaggatagaagaagttcccctcagaggcccactgcctcccaaatgctccttaaccagggcttagatctgaatcgattttctgcctcccgaggctccatcaaaaaaagttcagtaggtgtagactttccactgcagcgactgagcctaggggactttgccagtgacaaagccggtgagtctggtggggaaagtcctaaggagccaaaggagtgggggcacagctctgattatagaacttgatcatctccaaccccgcaggaagtcctgtataccagctgtatgccctttgcaaccactcaggcagcgtccactatggccactacacagccctgtgccggtgccagactggttggcatgtctacaatgactctcggtgagaatagcctcctatttacatcctgccccattcccactcagccctgacaccctccccttctatgaagctccaggagagcagagtgccaggtgaaaggagaggtggaggtcttgcctgatcatttcctggatgctctgaggttcggtcttgtagggagaagggagtaaacaggaatgaccacaaccctttcccgatctccttttttcctagtgtctcccctgtcagtgaaaaccaggtggcatccagcgagggctacgtgctgttctaccaactgatgcaggagccaccccggtgcctgtgacacctctaagctctggcacctgtgaagccctttaaacacccttaagccccaggctccccgtttacctcagagacgtctatttttgtgtctttttaatcggggaggggggagggggtggttgtagctccattattttttttattaaaaaatacccttccacctggaggctcccttgtctcccagccccatgtacaaagctcaccaagcccctgcccatgtacagcccccagaccctctgcaatatcactttttgtgaataaatttattaagaaaaaatgatgtgcttatttgtatttttgcttagggggtgatagagaactgagccaaattggagtcttcttgggacccaagttccctctctaacaggtgggggcgctctcagagccgagggggaaggtttcggggatggtgctggacccggacctgtgtcccccagcagtgaaggttatgtactgggaggaaaagaggaaaggcatacttgagtgaggctgcgtgcaggctctggggcgactggtttggtcggcgatgggggagtgccactgttgacaaacactgggtacgttgccgggcggccctagctcccgtaggcccggtctgttgctaacatcaaggagctgtttatggagccgcctccccgtggactggccttaagtgtccctatctattctccctacgaccaaagctcctgcggccttccctctagggttgtcaccctagctggacctggtaagcttgtgctggggaacgctaactccagcattaagcgctcgccgcctcggtcctgaggagggcagtgacgggtacggccgctcactcccagctcggcgctaacacggttaacctccagctcttacagctgccgtcgctccgcctctgccagttcaatgttttattggtgaacgtgatccggggccttccaagtcccgccaatccagatgtaggagaggtagggttaggcgcgtgccgcgagaacagagtggacggagcgtaggagagaccgaaaaggctgggggtgggagtagcggatttgaagcacttgttggcctacagaggtgtggcaagcagagcacctcagaactcaggcgtactgcccgccgcccgagccctgcgagggccgatagcgagggtgtggcccttatctgc

SEQ ID NO: 3097 - DNA, 2300 bp, Homo sapien
ggaggttgcagtgagctcagatcgcaccactgcactctagcttgggtgacaaagcaagactccgactcaaaaaaaaaaaaattctccttgaagactgggtatttgggaaaaaaaaaaaggaaaggaaaggaaaaaaaagaaggaagggaagggaagggacgaagggagggagggaggaagaagggaaggaaggaaggaaggaaggaaggaaggaaggaaggaaggaaggaaggaaggaaaaagagaaataaaattaagaggcctgatgctgtggctgacgcctgtaatcccagcgctttgggaagccaaggtgggcagatagtttgagcccaggagttggagaccaacctggacaacatggtaaaactctgtgtcttcaaaaaatacaattagctggatgtgctgttgtcccagctactcagctactcacgggtctgaggtgggaggatcccttgagcctaggaggttgaggctgcagtgagctgtgatcttgccactgcactccagcctgggtgacagagtgagaccctgtcacaaatttttaaattaaaaaaaaaaaagtaaacaaaaaggccgggcgtggtggctcacacctgtaatcccagcactttgggaggccgaggcgggtggatcacctgaggtcgggagttccagaccagcctgaccaacacagagaaaccctgtctctactaaacatacaaaattagccgggtgtggtggcgcatgcctgtaatcccagctactgaggaaggctgaggcagaggtcgcggtgagccgagatagcgccattgcactccagcctgggcaacaggagggagactccctctcaaaaaaaaaaaaaaaaagtaaagaaaaaagaaattaagaaaagaatgaacacgtgtttattttacctaactcatgaagaaactagcagatgttataattaatacaagagaaaatctagagaacggacatatttatggatcaggaaaacagaaatgaatatgaaaatggacgccaaaactgctttttttccccacagtgtggggaacagcaggttaattgaacctctaccagacaggatagaatttgcatacagatcagttacctacatgaattgtaaaataactcccatgaaaacagaatctttaaagcagaaggatatgctatagacaagtccttcaggtttcccattagccatcacttctgggaagcctttctagaatctccacgtatgaatgagttgccacttctaggccagcatatttatcacgttatattgtttacatccctccctccatacaagatacacaagaccatgggctttttggggcagattctgtgagttattcaagtctctgattgcttcttcagcgtgaatatctgcttctaaggaacacaatatgctaggcggtagtgtttgtcgtaaggtaaacatattgcatgttaacggagcatccattttactctaatatctggggaaacatcatttgactttaaagaagacgctgtctttccctccaccttcaatgtttcattgttttattaactaatcgctttttatttccaggcctgcgggatacaacgggaatacaaaaatgcgctagagcggtccgcaacgctgtagcctgcgtaaggaacaattgatactaagtggcactaggctgcagggggtgccactgacacactgggagagggctcagccaaccacaaggtgataacgaggtcagcggagcaccagaaaccggctcactagcctcctgatcagtctcggcccagaggaaaatgaagggcttgagcttctgcttttacaaatctgaggggcaggaaatgaaatcccactagcagtctgcgtagtggagttgaaccctagcacccgctccccagggggtcgcctacaacgcgttccaggtgggcaggctcaggcgctgctccctcacaagcccccggccacgcggtgtctgggaccgggtgcctagtcagcccgggtggctccgccccgaggccccgccccatgacgcgagaccccgcccccgcagcgcccgcttccaagatggcggcagcgatgcctgcccggctgttggggtggcggtgacgacaggcagcaaaagaccaggtatgtgcgctgggaatgcgtcgacacggaggcctgggataaaggtttgggcattcgagagagtgagaagttttgggtaacgcctggagacgagcctgagcagggacggggtcctaggtggaagtatggacgggggccgggcgggctcacgttgctagtaggtagggcaaaagcaagagactgggataggatgggcgtgctc

SEQ ID NO: 3098 - DNA, 2300 bp, Homo sapien
ccgtctccactaaaatacaaaaattagccgggtttggtggcgggagcctgtaatcccaactactcggtaggctgaggcaggagaatcgcttgaatccgggaggcggaggttgcagtgagctcagatcgcaccactgcactctagcttgggtgacaaagcaagactccgactcaaaaaaaaaaaaattctccttgaagactgggtatttgggaaaaaaaaaaaggaaaggaaaggaaaaaaaagaaggaagggaagggaagggacgaagggagggagggaggaagaagggaaggaaggaaggaaggaaggaaggaaggaaggaaggaaggaaggaaggaaggaaaaagagaaataaaattaagaggcctgatgctgtggctgacgcctgtaatcccagcgctttgggaagccaaggtgggcagatagtttgagcccaggagttggagaccaacctggacaacatggtaaaactctgtgtcttcaaaaaatacaattagctggatgtgctgttgtcccagctactcagctactcacgggtctgaggtgggaggatcccttgagcctaggaggttgaggctgcagtgagctgtgatcttgccactgcactccagcctgggtgacagagtgagaccctgtcacaaatttttaaattaaaaaaaaaaaagtaaacaaaaaggccgggcgtggtggctcacacctgtaatcccagcactttgggaggccgaggcgggtggatcacctgaggtcgggagttccagaccagcctgaccaacacagagaaaccctgtctctactaaacatacaaaattagccgggtgtggtggcgcatgcctgtaatcccagctactgaggaaggctgaggcagaggtcgcggtgagccgagatagcgccattgcactccagcctgggcaacaggagggagactccctctcaaaaaaaaaaaaaaaaagtaaagaaaaaagaaattaagaaaagaatgaacacgtgtttattttacctaactcatgaagaaactagcagatgttataattaatacaagagaaaatctagagaacggacatatttatggatcaggaaaacagaaatgaatatgaaaatggacgccaaaactgctttttttccccacagtgtggggaacagcaggttaattgaacctctaccagacaggatagaatttgcatacagatcagttacctacatgaattgtaaaataactcccatgaaaacagaatctttaaagcagaaggatatgctatagacaagtccttcaggtttcccattagccatcacttctgggaagcctttctagaatctccacgtatgaatgagttgccacttctaggccagcatatttatcacgttatattgtttacatccctccctccatacaagatacacaagaccatgggctttttggggcagattctgtgagttattcaagtctctgattgcttcttcagcgtgaatatctgcttctaaggaacacaatatgctaggcggtagtgtttgtcgtaaggtaaacatattgcatgttaacggagcatccattttactctaatatctggggaaacatcatttgactttaaagaagacgctgtctttccctccaccttcaatgtttcattgttttattaactaatcgctttttatttccaggcctgcgggatacaacgggaatacaaaaatgcgctagagcggtccgcaacgctgtagcctgcgtaaggaacaattgatactaagtggcactaggctgcagggggtgccactgacacactgggagagggctcagccaaccacaaggtgataacgaggtcagcggagcaccagaaaccggctcactagcctcctgatcagtctcggcccagaggaaaatgaagggcttgagcttctgcttttacaaatctgaggggcaggaaatgaaatcccactagcagtctgcgtagtggagttgaaccctagcacccgctccccagggggtcgcctacaacgcgttccaggtgggcaggctcaggcgctgctccctcacaagcccccggccacgcggtgtctgggaccgggtgcctagtcagcccgggtggctccgccccgaggccccgccccatgacgcgagaccccgcccccgcagcgcccgcttccaagatggcggcagcgatgcctgcccggctgttggggtggcggtgacgacaggcagcaaaagaccaggtatgtgcgctgggaatgcgtcgacacggaggcctgggataaaggtttgggcattcgagagagtgagaagttttgggtaacgcctggagacgagcctg

SEQ ID NO: 3099 - DNA, 2300 bp, Homo sapien
ggctggggcctatgggaccagggctagagggctgggctgcaacgtgtctgccctgtgtggttggaggaacgattcagtcagcagctagggccagggccagagctcagcgtggcggttgtggagggagcgtctggtctggattaaagctagagagggaggagggaggagggaagggaagaagggggagaccaggagtgggagggaggaaaggatggagcctcaggcagcctcgcagtccggccacagtgtgtgaaggggattgaccagaaggaggtatgggataccctccctctcttgccactcctgccctagtttgcagtttgccacagtgattttaaaggcagcatcagaagccagacaccaagccctagggcctcaaacctgactcctatagctgggagtgggggatgaaaatcaaatttggagcagagaaaagagccaaggccaaggggctgttaggagacctttactgctggggactgtgtcagtaggagatgccatggccaggaaggggtggggtggggagagggagcagttattcccagcccagagtctgtgacccacctctgagaaccctcggtgggtctggctaggagaagggtgaaggggagaggcctgagccttaccaagaaaggaggctcatggagaaaggaaaggcaggcagaagggagggaagcagaacggccagaagtgtaagtgggtggagagagggtgaataggggtcagtaggacagacatggcgggaggacaccgcaggacacagactccagagatgcctaccttggctcttcggggtctggggctggggcttccaagaggagccttgacgttgcacatgggaccttgaccgctggcaggactcttccggcgtaggatgtgagccccaggtcccccagcagagttaggggtgcctccctccaggggctggaggtggagttcagccccccgatattgtaacacgcctaacagggctcccccatcccagtgcagagatgccaccgactccggatctccattgatggtgccagtcaggtaggtgccaggctctgctccacccagcagctcaggcgcctggcccaggtactgcactgtcagcccctcgacctgcacaccggagtcctgctccagctctagtagcagcgtctccccaaaggcctgcaagcggcacaacagcctggcaggggcgcccgagccaggcaggacgctgccgttgagcttctctggaaacacgatctcctcctcccgggggagggggctggccagccgggctgagggcaggagagaggccagcagtagcagaagcagccacaccagccaggagagcggcacaatggggagcaggaggcagggttgggctccccacagccagcgccctgccaagcccctcccgggatgcgagcctgtctgggacatggcactggtactgcagctgggagggactgaggccgtctagggcaccaagtcctccacaccctagctttggaaagctcctctctgtagcctgggggcttggactcctgccaaggtcagaggcaaagttttcagaagggctgaggaccgttaaaggaaatggagaaaacttagtccttgggcttgggagaggtgcccaggggtctggcttctccaaactctcctcctgagccctcctttcctggatctttgtctctccctgcctgtgtcttctgcagcttctctggcctctccctctgtaggactctgtctgggccgcttctgtgcctgccctgtctctgccttcttccgctgtgcctttgtctctgtctctttcctcctctgtctctctcgtgcatatgtgtctgtgggtctccctgtgggttctccccagcctctctccgcgccagctcttttaagcatggtgagcctctgcgattgattggctgatctctaagccactcagctgagctctgtcggtgggactcagatgggtgtatcatcgcttcccaaaaaaatgggacttgcccaggggaggggaatctctagcagccgaatggataataggcactgggccagctgatgacatagccttttcccaaaccccacaatcagccctcagctgtctctttccctttttggtgggacagagccccaggagaggcagagagtgagggaaagggcctggccggcatgcacagataggatcacggtcctgggagaattcctgctcttatagtctaacctaccatggcttctcttttctcaaggctccctcatgctgccctttggccctagtggctggtttccagggctgaggggactgagtgagctgcctgagaaaagagggt

SEQ ID NO: 3100 - DNA, 2300 bp, Homo sapien
cagctgccacagagccagggcagaggtttggtccctctgttgtcctcattccttgctctttccctgggccttctttctattgttgaaacacagcaaatgtggccatggtggtgggggatgggaaggactgcatttatttgccttgatccagcctgggagaagtcaggatagactttgggctgcttggccctggaggcagcttgagctgggactggggtggggggctcctgaggggctgcctaggacactgcagcttttgtgccttctccctgctgccaacacccccacacacactgctgcagccactctaaagccctttgtctttcattgcttagtcaccccctttgtcctcatctcaaataggggagtggaaaggggcagtagagttctctggtgatagctcctcttgcccctgccccttctggtctcccaccctttgtccgactcctctagtcccagccccgttggcttagaaccagggtcaggcaagtggtgggtcaagaggtgggtctggcagtcacaagggggtgggtgatccaggaagtgataggcaccagggcaggtattaccgacctgagcaggaagggagggggaaaggaagtattctgacggatatgatatgcgggggacaggaggtgacaaagcagagtgaataggggaatagaggcaagaggaggtggtccacttctgggaaaggaaagagactgctgactgcactctccttcctggggatttcctggggaaacaagcagccagaggatggggtgagcagaaattgcccctacttctgaacccttccttgccttgagagttcatacccaagacctcttttccgagttccctcctatccaaagccaaaggaataatttgcttcctttccctaacaccacctcttcctccccagccactttccccaccccaggcaatggatttctcccagtaccctaatttccctatatgcacaatgctgtctccaccctctccctgccccagggagaattaaaaagaaaagatgactagatattccaggaaccactgggttctcagagcaaggtggggtggatggtgggagccaggtggggattctcccagattgatactgggtgaatctgggttcctgagagcaagtcttgcctatgctgggggctggctgacttgaggctgggggagggtttagggcagttgggagtgggtaggagcagggccaaaagcctgggggaagctactgggagctgggccagggaaatggggagtcaggaagtggggagggggaaccctggggggaaatggaggcggaatggctgttctgggctttggagggggtgggtagtggtaactcaggaagggggatcctgagggagagaagggacgttagaaaagaggaggtgccaccctggatccgccttctataaaaggaaaagtcgttaacccctcctgccttgtcatctgccgcctctgttatgttcattccaagcaggatcatcctacctttgggcagtcaactccctgatcactgtctccttgcctcccccaatgttctgccttttttactcttcccagctgctcagttctatcctgagccatgtcaagctacctcttttatttgttcttccctcttgatgcctccttacctgttccctaccctcttttctcaggcagctcactcagtcccctcagccctggaaaccagccactagggccaaagggcagcatgagggagccttgagaaaagagaagccatggtaggttagactataagagcaggaattctcccaggaccgtgatcctatctgtgcatgccggccaggccctttccctcactctctgcctctcctggggctctgtcccaccaaaaagggaaagagacagctgagggctgattgtggggtttgggaaaaggctatgtcatcagctggcccagtgcctattatccattcggctgctagagattcccctcccctgggcaagtcccatttttttgggaagcgatgatacacccatctgagtcccaccgacagagctcagctgagtggcttagagatcagccaatcaatcgcagaggctcaccatgcttaaaagagctggcgcggagagaggctggggagaacccacagggagacccacagacacatatgcacgagagagacagaggaggaaagagacagagacaaaggcacagcggaagaaggcagagacagggcaggcacagaagcggcccagacagagtcctacagagggagaggccagagaagctgcagaagacacaggcagggagagacaaagatccaggaaaggagggc

SEQ ID NO: 3101 - DNA, 2300 bp, Homo sapien
aggaagcaaattattcctttggctttggataggagggaactcggaaaagaggtcttgggtatgaactctcaaggcaaggaagggttcagaagtaggggcaatttctgctcaccccatcctctggctgcttgtttccccaggaaatccccaggaaggagagtgcagtcagcagtctctttcctttcccagaagtggaccacctcctcttgcctctattcccctattcactctgctttgtcacctcctgtcccccgcatatcatatccgtcagaatacttcctttccccctcccttcctgctcaggtcggtaatacctgccctggtgcctatcacttcctggatcacccacccccttgtgactgccagacccacctcttgacccaccacttgcctgaccctggttctaagccaacggggctgggactagaggagtcggacaaagggtgggagaccagaaggggcaggggcaagaggagctatcaccagagaactctactgcccctttccactcccctatttgagatgaggacaaagggggtgactaagcaatgaaagacaaagggctttagagtggctgcagcagtgtgtgtgggggtgttggcagcagggagaaggcacaaaagctgcagtgtcctaggcagcccctcaggagccccccaccccagtcccagctcaagctgcctccagggccaagcagcccaaagtctatcctgacttctcccaggctggatcaaggcaaataaatgcagtccttcccatcccccaccaccatggccacatttgctgtgtttcaacaatagaaagaaggcccagggaaagagcaaggaatgaggacaacagagggaccaaacctctgccctggctctgtggcagctgccttgtctagcccaggtcctggtcagttcccacagctaaggatctggccccaccctttggtacagttcccattaggtcaattcccaggccagaagtctggctttcccctctttctctgcagtgaagaattccaccatctctgcttcctggtctgtctgcctcaccctgctgcgctgctggtgggctgtgtccctgggatcctgtctaggggatatctggggaaggcctctttccaggctcagagttggagagttgtacaaactctacgggtgggtggcccagctggagttgggcttagaggcagagggagaaaacaggaactagcctctaaggctggaagaatctttgtccatacagaattgtgatcagactcctggtgctactacatttccgtgctgttggccattacccaggagggctatagcagggtcagaaagacgttagggaaaagaggctgacgcaagacggaagtggggtgtgaggcatctctaagggcgcttcctgggtctgtgattctgtaggttcgggaagcctggaggatgtcagggtcacccacagaggacctccactcccccatctgggatgaggtggctcctacacaccccgacactcccctccgcaccaccaatgccggcggccttggcatcctattcttttttgttttggtttggcgggagctctcagacccgcccagccccacttaggctcctttctccaatctcaatttatgacatctggaaattagctggctttcccaactcctgtcttttggattcagtgatgggaaagtaattggcaaagcctggggctaccctataagggcagggctcagatacaatccgagagcaggactaaagcatgagggcggccaaggcggaagggagtagggaaggaagcgccgcgcgtttccaagatacgcaggcgggctcggcgagagagcacgaagtatctgccccacgcaggaacggcaattttcccttgctcgctcctagaaaagccagccaggagctgtgggaggaaacgccctcagtaaagatgaccgcggtcactgttatctaaacgcaagtgaagccgagtcacaggacccggatgttgtcagttcgacggtaaacgaccctgccagcttccaagagggcggcttcactgtgcgaataggtgagaagccaagaaggaggcgcgctggagttacttccgcccggttctccttcccgcagtctgcagccggagtaagatggcggcgctgagggctttgtgcggcttccggggcgtcgcggcccaggtgctgcggcctggggctggagtccgattgccgattcagcccagcaggtgagatcgagggcagctctcgacacactttctccaaggctagggtttctcaggttggggacgctttactcccccagaaaataataacccaagcctgt

SEQ ID NO: 3102 - DNA, 2300 bp, Homo sapien
ccggccatataagagattcttaatctcccatagctctcctgttttattctgtatcctctctgcttactgactgacatgtggctttagtctccctgagggtagagattattttctgtgctgggggaggcctaggagacagagtttggatatggtttattgatgctccctgtttcctctcttcagacttccatggagtcactgattcatcactttaagttgtatactgagggctaccaagttcctccaggagccacatatactgccattgaggctcccaaggtaaggagaggaggggaaggaaaagaccatatgtagagtaggtagctaaagatagatgtttaacaaatagctcattcatcaatgagagagaaaacagaatgaatagaggttttgttggcagagaaaaatactcttcatgttaatacagacacccaaccttcttccttgaacagggagagtttggggtgtacctggtgtctgatggcagcagccgcccttatcgatgcaagatcaaggctcctggttttgcccatctggtaagaatcaatcccagtaactataactccaatgaattaaacctgaccttggttgaggtttttatgaactcttctttctcctcccaccttgcaagtcttaactaacattgttgccatctcaatctccctaggctggtttggacaagatgtctaagggacacatgttggcagatgtcgttgccatcataggtacgaggcctattgtgtagtagaggtatcctagacaaaggagttcgggacgcccactggggacagaaggagaacacttcctgttcaccataggccatggcatggactcgggtcctcaatcttttgagcacagtaatgggttctggatcttgggtaacaccactttttttgtttgttttgcctcacaacaggaagataagtaacatcacttttttcctccatcctctcacctaggtacccaagatattgtatttggagaagtagatcggtgagcaggggagcagcgtttgatcccccctgcctatcagcttcttctgtggagcctgttcctcactggaaattggcctctgtgtgtgtgtgtgtgtgtgtgtgtgtgtgtatgttcatgtacacttggctgtcaggctttctgtgcatgtactaaaaaaggagaaattataataaattagccgtcttgcggcccctaggcctaaacttctggtatcttagtgtctcagtatcttagtgtccttcactcggactgtaaacctaagaatgttcattaaccctccattcctgttagattcagtcaggtcttagcaatttttcctgctcgtctccacccccttctctgactcttgtcctttccacttctctattccccatttcctctttcgcctcagttccctccttgcccaaaccttctcagtgcccacataacttggtaaaccactcaaatcaagacctggggtaaagttgggagggaaagggctatagtggggtctgagggaatgttgacgggcagtttcacacagataaatctctgaaccagccgggcgcagtgcctcacgcctgtaatcccagcactttgggaggccgaggcggatggatcacctgagatcaggagttcaagaccagcctgatcaacatggagaaaccccatctctactaaaaatacaaaattagccgggcgtggtggtgcatgcctgtaatgccagctactcgggaggctgagagaatcgcttgaacctgggaggcggaggttgcggtgagccgagatggcgccattgcactccagcctgggcaacaaagcaagagtccgtctcaaaaaaaaaaaaaaaaaaaaaaatctgaaccaggtggagtggaaaatggcagatgtagacagcctttcctgagcgtgaaagtctcctcattctgtgggttaggagttggtcattgaagggctgacgcttaagagcccagatctcccaactcccttagttggcccttccgggagccgcccggtctcttgtgcaggaaggggaaggggccaaagcatgggggaaggcgtggcaggaagagggggactctgtggtcagggaactgctcgctgagcacagctgcacagtgctgtcagaacggccgatctccagcccaagatgattccagcagtggtcttgctcttactccttttggttgaacaagcaggtaagagggtttggtgagggatagcgtgagctggctccagggtggaagtccagagcttgggtctgagggccaagtcaaacacaggtgaaggaaggctgacagtgggtaggtgggcatagggagacc

SEQ ID NO: 3103 - DNA, 2300 bp, Homo sapien
actagagggagcatcttgtagcttgggccactgaagctccttccacccatgtagtttcatccatgagaaaagtggaactacagcttgtagactggcatagtgtgaagggtggcagaaagaacgattatgaagacttctttggaaccctggttcatttctatcgctcccttctctccaaagaacccatgggaaatcctcctcacagccctccacagcacacctccaaatgagtactactcattaagcgcagcactccctagaacagggacccacccttctcttctggaggtctacatctctcgaagtccccgctcttgaccacttggtggaatggaaacgggtgtgagagtttggcgcagaggagtaagttctagcagaactattcgctgaaacagctgctttctgtatttaacccttccttccctgagtcccaaggcagagttggcaaataaaatctaggaatatggagcctggcccccaaaggcactccatcccaggaccagggacaagccaaagggctgacctcaagcactaagcgctccacaggggaataattgaaaatggagtaagagttcttggtcttggagggtgaagggtgggaggagggagaagatcaggaaaaataactaatggatattaggcttaatacctgggtgatgaaataatctgtacaacaaatccccatgacacaagtttacgtgtgtaacaaacttgcatatataggccaggggcggtggctgatgcctgtaatcctagcactttgggaggccgaggcgggcagatcacctgaggtcgggagttcaagaccagcctgaccaacatggggaaaccccgtctctactaaaagtacaaaattacccgggcgtggtggcgcatgtctgtaatcccagctacttgggatgctgaggcaggagaatccttgaacccgggaggtggaggttgcagtgagccgagatcatgccattacgctccagcctgagcaacaagagcaaaactccgtctcaggaaaacaaacaaaaaaacctgcacatatacttctgaatttaaaacaaaagttaaaaaacaaagatttcttggtctctggtcactacctccctcatcagctttgcgcctccactgtcaccctcaggaatgttccacatactcagcgagtatgcttggggggcaaaagggtgaaagatacaaaagcttctgatatctatttaactgatttcacccaaatgctttgaacctgggaatgtacctctccccctcccccacccccaacaggagtgagacaagggccagggctattgcccctgctgactcaatattggctaatcactgcctagaactgataaggtgatcaaatgaccaggtgccttcaacctttaccctggtagaagcctcttattcacctcttttcctgccagagccctccattgggaggggacgggcggaagctgttttctgaatttgttttactgggggtagggtatgttcagtgatcagcatccaggtcattctgggctctcctgttttctccccgtctcattacacattaactcaaaaacggacaagatcatttacacttgccctcttacccgaccctcattcccctaacccccatagccctcaaccctgtccctgatttcaattcctttctcctttcttctgctccccaatatctctctgccaagttgcagtaaagtgggataaggttgagagatgagatctacccataatggaataaagacaccatgagctttccatggtatgatgggttgatggtattccatgggttgatatgtcagagctttccagagaaataacttggaatcctgcttcctgttgcactcaagtccaaggacctcagatctcaaaagaatgaacctcaaatatacctgaagtgtacccccttagcctccactaagagctgtaccccctgcctctcaccccatcaccatgagtcttccatgtgcttgtcctctcctcccccatttctccaacttgtttatcctcacataatccctgccccactgggcccatccatagtccctgtcacctgacagggggtgggtaaacagacaggtatatagccccttcctctccagccagggcaggcacagacaccaaggacagagacgctggctaggtaagataaggaggcaagatgtgtgagcagcatccaaagaggcctgggcttcagttgtggagagggagagagccaggttggaatgggcagcaggtagggagatccctggggaggagctgaagcccatttggcttcagtgtcccccaaacccccaccaccctcttcc

SEQ ID NO: 3104 - DNA, 2300 bp, Homo sapien
catcaacccatcataccatggaaagctcatggtgtctttattccattatgggtagatctcatctctcaaccttatcccactttactgcaacttggcagagagatattggggagcagaagaaaggagaaaggaattgaaatcagggacagggttgagggctatgggggttaggggaatgagggtcgggtaagagggcaagtgtaaatgatcttgtccgtttttgagttaatgtgtaatgagacggggagaaaacaggagagcccagaatgacctggatgctgatcactgaacataccctacccccagtaaaacaaattcagaaaacagcttccgcccgtcccctcccaatggagggctctggcaggaaaagaggtgaataagaggcttctaccagggtaaaggttgaaggcacctggtcatttgatcaccttatcagttctaggcagtgattagccaatattgagtcagcaggggcaatagccctggcccttgtctcactcctgttgggggtgggggagggggagaggtacattcccaggttcaaagcatttgggtgaaatcagttaaatagatatcagaagcttttgtatctttcacccttttgccccccaagcatactcgctgagtatgtggaacattcctgagggtgacagtggaggcgcaaagctgatgagggaggtagtgaccagagaccaagaaatctttgttttttaacttttgttttaaattcagaagtatatgtgcaggtttttttgtttgttttcctgagacggagttttgctcttgttgctcaggctggagcgtaatggcatgatctcggctcactgcaacctccacctcccgggttcaaggattctcctgcctcagcatcccaagtagctgggattacagacatgcgccaccacgcccgggtaattttgtacttttagtagagacggggtttccccatgttggtcaggctggtcttgaactcccgacctcaggtgatctgcccgcctcggcctcccaaagtgctaggattacaggcatcagccaccgcccctggcctatatatgcaagtttgttacacacgtaaacttgtgtcatggggatttgttgtacagattatttcatcacccaggtattaagcctaatatccattagttatttttcctgatcttctccctcctcccacccttcaccctccaagaccaagaactcttactccattttcaattattcccctgtggagcgcttagtgcttgaggtcagccctttggcttgtccctggtcctgggatggagtgcctttgggggccaggctccatattcctagattttatttgccaactctgccttgggactcagggaaggaagggttaaatacagaaagcagctgtttcagcgaatagttctgctagaacttactcctctgcgccaaactctcacacccgtttccattccaccaagtggtcaagagcggggacttcgagagatgtagacctccagaagagaagggtgggtccctgttctagggagtgctgcgcttaatgagtagtactcatttggaggtgtgctgtggagggctgtgaggaggatttcccatgggttctttggagagaagggagcgatagaaatgaaccagggttccaaagaagtcttcataatcgttctttctgccacccttcacactatgccagtctacaagctgtagttccacttttctcatggatgaaactacatgggtggaaggagcttcagtggcccaagctacaagatgctccctctagtgtcttgtacgctcacaagtttttttccgaccttggagaggcctagtgatctaaagccttccacttaagtctaaggggccaccaatcaagtcctgcccgcctctgcagctccagggttgaagctcttgggccgtcagacctgccactcattttcttcctcccttcccattggcccatggtaaatagcgaggcttttttttttttttttttttttcattgattgggcggggcccaatcagggttgggttgggtctttgacagctttctttgccagattcaaagatggcgcttacggccacgctaagaatgcagcgtgaagctgcagttctgccatcactcaagatggctgcccccatcaagatgaccggggtgtgccggggggaaaggggcagcatgatggtctgagatggtaagggatactgcaccattgcgggcctggtcttggggcctgggaatgaagaatagagaggctagggagctaggtgaagtctgtggtgggggctaggatcagagaaagggagagaggacaagg

SEQ ID NO: 3105 - DNA, 2300 bp, Homo sapien
tctcaggttgcaccctctgcctgaactgccttttatattccccctagctaactcatcattaccctgtaaaagtcaactcagttgccacacctccagaaagcctctcctgcctcttcctcgacaccccttttccaaagcagaattaggtgccccgctatttcagtgccataatgctctgtgcatggcaccatcactgatctgaccatatttctttatatctgtgtaaaggtctgtctcccccattagcgattaaaattcatgagggtaggagagcatcttactcatcttttaactctagtatctaagacataggtggattcttggtcaatatttgttgattgaataaattagtatgaattgtcagagtcacaaagacaccaacagatacatacacataaatattcttaccatctcccaaggaacagatccaagcatctgtgctctctggaactcagtttatttcaaaatacaaagttatgcatagttagatgctataccacttgagattaggggttctaccaactcattctggtaacctaaacaaggatctttttaactcagtctctctctctgtgtgtgtgtgtgtgtgtgtgtgtgtgtgtatgactccagcctgcacttggggttttaactcatctttagagaaacattaattataatttaatgcaaatgaagaagcagaagacataatagcaaaacaaagaaaaataggccgggcacagtagctattattacaggtgcacgcctgtaatcccagcactttgggaggccgaggcgggcggatcacgaggtcaggagtccgagaccagcctggtcaacataaaccccagctctactaaaagtacaaaaattagctgggtgtggtcgctctgtcacccaggctggagtgcagtgctgcgatctcggctcactgcaacctctgcctcccgggttcaagtaattctcctgcctcagccttccacgtagctaggaatactagcgtgcgccaccatgcctggctaatttttgtatttttagtaaagacagggtttcaccacgttggccagatctcttgatctcatgatctgcccaactcggcctcccaaagtgctgggattacaggcatgagccaccccgcccagccaaaaaaaaaatattttttaaaaatagcactttattattattattattagagatagggtcttgctatgttgcccaggttggattcaaactcctgggctcaaaccattctctccctgtctccagagtagggggatgtacagggcatgtcactgtgccctgtggtcactctgatttgattctcagccctccctagttaggaagtgagagggctctttccgtaagctcttacttagatcgtagtctctctctctctctcttttttttttttttttagacggagtctcacttgttctgtgcccaggctggagttcagtggcatgatctcagttcactgcaacctccgcctcccgagttcaagcagtcctcccacctcagcctcccaattagctgggattacaagtatgtgccatcatgcccagctaatttttgtatttttagtaaagacagggtttcaccatgttatccaagctggtctcgaactactgacctcaagtaacctgcctgcctcagcctcccaaagttctgggattacaggtgtgagccaccgtgcccagcccctagtctcttaaaaactttttttgggggagccttgtggaactgtcacacctcttcttttagtactgacatactgcgtgtgaaaaagcttgctctgtctgtctgcctgtctctctctctctctctctcttcccagcttgttcaggatctctgtacacagaaggctgcagatgtagccttaaactcatcaacagggaaaatctcgatgagtctaataagcagcagcttccaatgagtcacaaggttcccacccactggagtccctccccgtgtgccaccaaccagcacttttgtcatgctgggaaaacctcccacccaggcctttgccctgagtccagggtctgtgccctaaccccacagtcactgagagcaactggaggccacataaaacagacatctcttgttttccagatactacgggtcataatccctaactccaatcactggcaactcctgagatcagaggaaaaccagcaacagcgtgggagtttggggagaggcattccataccagattctgtggcctgcaggtgacatgctgcctaagagaagcaggtaggaaatctgttggggaccaaagactaaatgtaataaaatacagataatgctgggggctaggcatag

SEQ ID NO: 3106 - DNA, 2300 bp, Homo sapien
agtgccccacaaagctcctgtcagcacagggccatacaactaatacccctacttatagggttaggaatggccactgctacaggaaccagaatagcaggtttatctacttcattatcctgctaccacacacacttgaaggatttctcagacagtttacaagaagtaacaaaatctatccttactctacaatcccaaatagactctttggcagcagtgactctccaaaaccgctgaggcctagacctcctcactgctgagaaaggaggactttcaccttcttaggggaagaatgttgcttttacactaaccagtcagggatagtacgagactccgcccggtgtttatgggaagaggcttctgaaatcagacaaagcctttcaaacccttagaccaaccttcagagttaggcgacatggcttctcccctttctaggtcctgtgacagccatcttgctattactcgcctttgggccttgtatttttaacctctttgtcaaatttgtttcctccaggatcaatgccatcaagctacagatggtcttacaaatggaaccccaaacgagctcaactaacaacttctaccgaggacccctggaccaacccactgaccctttggctggcctagagagtttccctctggaggatactaccactgcagggccccttcgcccccatccagcaggaagtagctagagtggtcatcgcccaatttccaacagcagctggggtgtcctgtttagaggggagattgagaggtgaagccagctggacttctgggtcaggtggggacttggagaacttttctgtcttacaagaggattgtaaaatgtgccaattagcactctgtagctaggattgtaaaacgcaccaatcagcactctgtagctagctagaggtttgtaaaatgaaccaatcagcactctgtaaaatggaccaaacagcaggacatgggcggtgaccccaggaaataaaagctggccaccccagccagcagcagcaacgtgctcgggtccccttccatgctgtggaagctttgttctttcgctcttcacaatacatcttgctgctgctcactcgctcactgactcactctttgtgtccgtgccacctttaagagctgtaacactcactgcaaaaattcccagcttcattctggaagtcagcgagaccaagaacccaccagaaggaaccaactccagacacagtaggatttgatgaatcctaaaatgtcttccaactcctgagatctatgatcttccacatcaaacaggcacttcacaatttccctgttctttgccaaagaaagctgtccatttgctccagtctctctctcattctgtctctctctctcttcccccagccttcctccctctcttgtgctattctctggtccagggttctgttcttttttttttttttttttttgagacggagtctttctctgtcacccaggctggagtgcagtggcgcgatctcggctcactgcaagctccacctcccgggttcacgccattctcctgcctcaatctcccgagtagctgggattacagtcgcctgccaccacgcttggctaattttttgtatttttagtagagactgggtttcaccgtgttagccaggatggtctcgatctcctgaccttgtgatctgcccgcctcggcctcccaaagtgctggaattacaggcttgagccaccgcgcccgacctccagggtgctattctactaggaaatcttaatctgcaacatctcttggctttacccctttcattcactgtttcctgttttccgtgtaccctcttgatttctttccaggccttctctttctcagactcacacactccttccattccactccccaccttgccttcttcgtgtacatctcctttctccctctctttctttgctccccctacttcattttccgtccccgcatcccccgatggtctccccctccttcccgctctctgtcttaccctagtttggaaatgcagcagacctctaaacctgccagcattggatgcaagaggctgtcattctacggtaggaggagcttctattggtcgggctggaggcgggtaccgagctgagtataaaaggtggggccggaggcggcgagctgagcggctctgacaggacgggtcgcagggggtcgcctggccggagctgggctccgagaatcccgggtgccagcaccagagcagcggctctccgcactaactctcctctcctggtcagctgtaacccctgccgcagagcccggcaactttcagctgtcgcccgcggagccccgagggccactc

SEQ ID NO: 3107 - DNA, 2300 bp, Homo sapien
aaaaattgaaaaattagctgggtatggtggtggctgcctgtggctcagctaatctggaggctgaagtgggaggatcgcttgagcctgggaggttgaggctgcagtgagctatcattgcaccactgcactacagcctgggccacagagcaagaccttatctctgaaaaaaaaaaaaaaaaaattttaaactagcccagcatgctggcatgcgcctgtagttcccagctacttggaaagctgaggtaggacaattgcttgagcctcagaggtcaaggctgcagtgagccatgatcatgccactgcattccagcctgggcaacagagcgagactgcctcaacaaacaaaaaaacctcagctctggttatgtagacatccccatggctaactccaccccaacaccttcaggttctcatgatgtaccaaattgaattcaccttctttcacctgtcatttaaggcctttcacaaactggtttcgactttcctgtccagtctcatttctgactatgccacttcaagtttccccaaatcaagtcaaagtggatggcacaagatcggccctgaatatatccaacacttcagaaacctacatctcatatacatacacacacacacacacacacacacacacacacacacacacacacacacacacattctgtctctccgtctcacctctttgtccttgcttttgctgttctatcttctggtaaccctccctatctccctttccaaaatgacagtcatccttcaaggctgattcatatctaacattgcctcctagacacaactattcttccctctgaactatttatttgtttgattatttatttatttatttatttttgagacagagtttcattctgtagcccagggtggaaagcagtggcacaatcatagctcgctgcagccttgatttcccaggttcaagcgatcttcctgcctcagcctcccaagtagctgggactacaagcatgtgataacatgcccagctgattttttaaaaaattttggtagaggcgaggtcttgctatgttgcccagacaggtctcaaactcctaaactcaagcaatcctcctgcataagcctaccaaagtgctgagattacaggtgtcagccactatgcctggcataaacttcatttattaaagtttattttgtctttaatctctcatataacttagtcttcctgatattgcagctgtgtgtgcccctcttttgtactcccagcattttgttcattactaaaggaagtgtcatggcttattatacttgattgttgatgggtttgtcctctgatcttcccatctccacctccccaaaccaaattttcaactccttgctggaaggacttaatttttattcctctctctattacctgcattctcatactttacatattgctggcacttaatacaattttgtagccttgaaataaattgaaatggacttaaacagcagcatgaagcactgaaggacttcttgacaaacggaaaggtcaggggcttcttgcctggaaatagtccagtggagaaaaacttctgtctgggaagaatcgcacaggatgaagggaggtgcggggaaaaaaactcccataggacttggtcatctcaagaagtctgtaatgcagcccacattagaggagataacaggggatatcctattttcagagttctctgggggaaacctccctctagttcctagggctgtgaggcagcctctctcaggcaaggaggctgaggagaaatccctttttatggcctttaaattgaggttccatatctatccctcagagaagtgtgtctgtgtccctgtttttgtccctctccctcaccaccccccacaacattccagcctggggcagggggaggccagtggacacaaagccctctgtgtatggggtggtatgtgtccccccacccctccacccagactatacaatgccccttctgctccctgcactctgcccccctccccaccacctctcaactgcacatgccaggctgcaattggttactggctgaggacagccccctcatgctggggccctaggggattttaagcaggttccaggaaccccccgttcagttcctggtcccccactttctcaaccccacagatgctccgggcccctgcccctgccccagctatggctcctggggctccctcatccagccccagccctatcctggctgtgctgctcttctcttctttgggtaagtggagccactctactctgggagtcttgggactcaggtgtctctcagcaatccccacagcctttgctgcactccccactg

SEQ ID NO: 3108 - DNA, 2300 bp, Homo sapien
attagaccacagccctggtgggtatggtcattagtattagatttgggttgtggaattctaaatatgggattgcttatgaagtccataggcaaaaccatcatcattgacaaatgtttacaggatgttgtagtcaacatttctataaaacagcaattcaaagtacaaaaaaaaaaaaacccccaaaactctcccctccaaaatttccacctaactccacctcccaactgtaagcaatcatttcctctttatctaaccaccccttttatcaacaccctcttcaatgggttgttgctactttctttgttgcatgtctttattgatcctgctaaggctataaccttcttggggacagtacaaacatctgtatctttgaatcccctacagaacttttcacggactgacaaaaagtccataactacatgctaaatgaaattattaatatttaaagagctgagtgggctgggagtggtagctcgcacctataatcccaggactttgggaggccgaggccggtggatcacttgaggtcaggagttctagaccagcctagccaacatggtgaaattccatctctactaaaaatacagaaaattagccgggcatggtggtgcaggcctgtaatcccagctacttggggggaggctgaggcaggagaatcgcttgaacctgggaggcagaggctgcagtgagctgagatagcgccactgcactccaacctgggcgacagagtgagactacgtctcaaaataaaagaaaaagaaaaagaaaaagaaaaaccaaaaaagatctgagtgaaaaaggcattccttgggtttgttaacgtgaagctccagagagccaagtcaatgactggaatttcgatagcacaaaactgtatttaaatataataactaacgaataagttgttcattaaataaaacttgttgtttgaggtacccatcattgaatatgggggggtagagtcttgaagatcagctgttatgggtgttgcagaggagatccctgcatagatagtagattggattagagagcctctttcaatcctaaagtgtacgaatgtgctttgtcaagcattatagaaatgcaaagtagtattattcatctgatgcagaaataagtgaatttgtgctatttaaatcctgaagtgcagggatgctaaatatacataagatctgaatattaatataattgagtattttttttgtagaaataggagttgctctagcctgtcccttttactcctctccaccctactccccacaagagtcaagaacttttgtgctctgttcccttcctttatcatttgctcttcttctttcttcagtcttgagtgctcggcagttgattcctgtgcttgggttccctaaaactgtatatatatatatacacatatataaatcaaagcgtgttcttcccctcactccgggttcttctagctgtgggtgtcacccacatagcgctgaaacaacgaacaagggagcattgtcctcggctagtgggcgcctggtccatgtggcagctcaaacccaggaattgtggggtctaatcgaggtggttagatgaggctcctcgttttcgggaatggtggtccgcaaggtcttctcgaggcccctctacacactccccaacttaggtcacaatttatgtatctgtctggttaaagcttcgtattagaaagggagggaacccaaagtatcttttctcttcggggtctcaaccggccaaccaccacgtttttaggccgacctgggaggcagggggaacgcaacagactgcgaagtccttaaggaagaatctaaacaagtccgccgtttgctgtttgggagtgcgatacaaaatgaatatgtacgcaggtggaacgtagactgcagattttgagccagcggcgtttctgccgaaatcctggcaaattccggtagaagtcggctgcaggaggcggaggaggagactaaaaaaccagaaaacaaccagcaaaccagctaggcagagctgagcggagaagctccagagccttttaaagagactctcgtcacatgacacccccaaccccgacccccagccggcgcgcctccgccctcgggtggcggggccgcctggcgtcacttccgtccagaccggaacccaagatggctgcgctgttgctgaggtgacttcagtgggactgggagttggtgcctgcggccctccggagatctgaactggcccctcacgttttgctgataactgtttatcctgtgcctgggcagggaaaggacccatgggtgtggaggccaagcgctcggggatcctagagacccctt

SEQ ID NO: 3109 - DNA, 2300 bp, Homo sapien
ggccgagtgtggcaaaggagtacccactgcacaaatgtcatcacctgaaggctttcatttatacagatcattgatcaatttaagaacttctgaagggtgctaaacacaactctatcctgctgggtaagctggccggaagttcaggggctctcacattacaacatgaattagattaaactttaattttcccgataatggctgtgagagactgcacatctcccagttctgtgccttaattatttgactttcttgataggagtgaagatagtatctcaccttggaacggggcacagaaggcagtagatgaccacgatcgttggcaataatttgagtgtagccttcatgagaagagatgctctggggtacaagtgggagagataaaggtttgtgaggggaaaaagggaagtatttggggagcttggtcagagaaggatatgggagtttagagaatgctaaaaggagttaattgacagggagagcatgaggctatcttgtaggtgcactgaacatggaatacctcttttgttggcttagtgggagaccagttctgcagatacttggatgagaaagccttttcatactgtggagagaaagataagtagccctatgagacttcaaggccccaaacccaggaaatgaagactaggcacaattctttagatttgaagaccaaaggcctgaccaaccatgtaggctttaagtcactatgacaagggtgtaatttgtttggtctagatgtgtgctgtccagcatggagccgggagccacatggagctgttgagcacctgaaatatgactagttcaaattgaggtgctttgtaaatatgaaatatgctgaatttttaagtttttttcttttctttttttttttgagataggatcttggtctgccacctgggttggagtcagtggcatgatcctagctcactgcagccttggacacctgggttcaagcgatcctcctccctcagactcacaggtagctgggactacaggtgcatgccaccatgtccagctaatttttaaatttacttgtagagacgaggtctcaccatattgcccagggtggtctcaaacccctggcctcaagcgatccttgtgcctcagcctcccaaagtgttgggattacagacgtgagctacaacacccagcaggttttggagatttagtacaaaaaaagaacgtaaaatgtctgattataattttttaaatactgattaaatgttgaaataatatttggatttattgggttaaattcaatatatttaaattttatgttttaattttttcatgtagctactagaaaatttaaaattacatttgtgggtcgcactctttttgttgggcagcactggtctagatcaggagttggtaaactatggcctatgggccatatccatattgctgcctgtttggggatggcctgagagtaagggtgatttttatagatgaacatttacaattgattcagtcaaatggaacactaactttgaatcccagttaagtgaaatgttttctcaacccccaaaattccattattttcattagtagtacaaaaaattgtactcagttatattttgaatttgtcaaaaatgttatggaaaaatgtttttctttaattatgcaagtagctacagaatatttttgactttgccacttggcctgcaaagcctaaaatttttacactccgcccttttacagaaaaaaaattgccaacttctggtttacaccctacaaatttaaccaagagatacctttggatcgcccctgggctctctctatccctgaggaggtaaaatattatctcactccactctcagctatctgttcaaagatcagaatcctatgagaggggacagtccaaagatagaatctgaaaaacaaaagtaaacgttaaagaaatggagaatgggaacttacctggttggcactgtagttagtggccatgatcttgtgctgtttacactcgttgcttggcaactgcagaaggccgacctcctgggactaccaatgagcagaggctgcctttctcttctgcttattattattcacttccttggctcacactgcccccatttgttttctctggaacttagattcatttttattttacagacgggaaagactgagtaaatgtgagaaaattagctgaatagccactactttttttctggcataacctacccctgcttaagaacttccacgggcctttgattggggtttttaaccactttaacaaaccatgtaaccctgagagctatgcttgttggacaacatggtgtaatgtaccacaggctgta

SEQ ID NO: 3110 - DNA, 2300 bp, Homo sapien
tgtccttattagcaaaagactataaataaactaaatggtcatccatatgggtctgaacaaactatggtgcatcccaaaatggaatattatgataaaaacataatccccaagatagtcaaaaagcaaatcaaaaagcaatgtggacagctctctcattagtgtttgtatgcagagaagatttctggaaggagacacaagaaatgagtaacagcagttgccctgaggagcaagactgagagttgaaatcaaatggagatttgcttttcactgaacatcctgtaaacatgaaattttttccatgtacattactttttcaattgaacaaaaactggttaacttttaaaaatgagtgcagtcatcatttatcattacattcctatcagaaaggcagagggaggcataccaactgaagacaaattctaagagaaataatgctagcctatcattgcagattaaagggccaaaatggatatcctagagcaaagatagtccttggtccttaaagaactcttctctagagagtgataagaaccacagggactaagctcatgagttatctttccagatctcacattatccaggtattaactccagagcctataaaacaagagctgttcttccctccatctgcagaagcataggagtgctcttatacttggtgtgttggttaagatgaggattttgggggaagaaggaaaagagaagggactgatggatatactttatttattttttattttttgagacggagtctcacgctgtcgcccaggctgaagtgcagtagtagcatgatctctgctcattgcaacctccgcctcccgggttcaagcaattctcctgcctcagcctcccgagtagctgggattagaggcatgcaccaccatgcctggctaattttttgtatttttagtagagacagggtttctccatgttggccaggctggtctcgaactcctgaccttgtgatccgtctgcttcggccacccaaagtgctgggattacaggcatgagccaccgtgcccggcctggatatactttataatggtctcctggtcctaatgatatctttgggcaacttatttcttagtttttccctttcatcttgacaccttatatataaattcactttacaattcacaaagcacagttctacttacttattaattctcctaaccacctcatagatgggtattacaataccattttatgagtttcagaggggtttccttgtcccacacatattaggcttatgtcctggcagccccccattgaactctccaaacctgatcctttccactctgtgattttctctcttcatccctgctcaatctccctgcaccagcacccgattccattttattccagtcaacactaaacgcctgtgttcttaggtgctgattctagacagtgacagaggaaattttttaaggaccaaggacaagatatgtttttccttctggggacagatttgagctagttgctttttaaatattgttcctttgttattctgcctgataagacaaagtagtgggccttataaacaggatctcaccaggattgaatacctactatgctatgatattgtctagacactttattcattttatctcacttaccctgtaaaagcaggctctattatccccacaatacaaatgagttgatagaaatttagtgaagacaagacagttgtttaatgtcatatagctcctatgttcccatgttgaataaggattcaaaccccagtatctggctctacagcctgtggtacattacaccatgttgtccaacaagcatagctctcagggttacatggtttgttaaagtggttaaaaaccccaatcaaaggcccgtggaagttcttaagcaggggtaggttatgccagaaaaaaagtagtggctattcagctaattttctcacatttactcagtctttcccgtctgtaaaataaaaatgaatctaagttccagagaaaacaaatgggggcagtgtgagccaaggaagtgaataataataagcagaagagaaaggcagcctctgctcattggtagtcccaggaggtcggccttctgcagttgccaagcaacgagtgtaaacagcacaagatcatggccactaactacagtgccaaccaggtaagttcccattctccatttctttaacgtttacttttgtttttcagattctatctttggactgtcccctctcataggattctgatctttgaacagatagctgagagtggagtgagataatattttacctcctcagggatagagagagcccaggggcgatccaaagg

SEQ ID NO: 3111 - DNA, 2300 bp, Homo sapien
cgttggcagaaaagtaaataagtacactcaccataaaaaaaacagcatagaaatttctcaagaaaagcaggctgggcatggtggctcacccctgtaatcccaacactttgggaggccaagataggtggatcacctgaggtcaggaatttgagaccagcctggccaacatggtgaaactgcgtctctactagaaagacaaaaaaattagccaggtgtggtggtgcatgcctgtaagctcagctacttgggaggctgaggcaggaggatcgcttgaacctgggaggcagaagttgcagtgagccaggatcatgccattgcactccagtctgggctggagcaagactccgtcaaaaaaaagaaagaaagagagagagaaaagaaagaaagaaaaagaaagaaagaaagagaaagagaaagaaagaaaggaagaaagaaagatagaaagaaagaaagaaagaaagaaagaaagaaagaaagaaagaaagaaagaaagaaaagcaaacaaaggtacaacttctgtagaatccaggaaactcacagctgagtatttatccaacgcaaaggaaatccggatatcagacagatacctgcgcccccatgtttaatgccgtactattcacaatgacagaaatatcgaatcaacctaaatgtccatcagccgcgaaaaagataaagaaaatgtggcatatatacaccatggaatactatttggctattgtattagtcagagttccctagagggacagaactaatagaagagagcgagacagagagagagaattaattatatattatatatatcatattacataatttatatgatatatatttattatatgttatatattatatataaaatatattatatataaatatattatatattatttagaaaatatattatatattatttataaaatatattataaatatatattttataatatataattatataataaactccatatatatatacatatatagctcatattagttctctccctctaggggacaatggctaatatatatggagtttattatataattatataataaattatatatacatagagagagagagtttattaagtattaacttacacgatcacaaattcccaaaataggctgtctgcaaccttgaagagaaaggagagtcagtctgagtctcaaaactgaagaacttggagtcagatatttgagggcaggaagcatccagcacgggagaaagatctaggctgagaggctaggcccgtctcacgttttcacatttttctgcctgctttatattcactggcagctgattagattgtgctgaccagattaagggtgggtctgccttccctaacccactggctcaaatgttaatctcctttggcaacaccctcacagacacacccaggatcaatactttgcatccttcaatccaatcaagttgacactcagtattaaccatcacaagtacaccccttgtaaactcaaacccatacacgtcttctgagatcatacatagtcttcaaataaagacaataataaggtcataattatgcctaacataatacaactatcctttgtacaaccagaaatgcaccaatccccaacccaaatactattacacaaagttaacatacttaaattctgatatgaagtcaataaatcttatgtcacatgataaagaaaaaggaaataaaatgatgatattttcttagtacaagtgtatacatgcacaaacatgtttttaacaaaagaaggaggaaatacacatgacaattacagtcctcgtttctgcagctggtcacatggtgatagctggtattgatgactaccctcttctactactcattctgtattctctttgccttcagcaagcacctcagcagttcatagtttttttttcctggtggaatgacccaaactttcattcttgagggatctggaccatttgtagtcttgcctggattgggcggttgtagtttcccattgactataatcatagggcagggtaatactaagagatgccctaatggatctcctgtattccatgcatactcttccttacctccattatagagtagtatactgatttcatcttgatagtctggatcaatcaccccagccaacactgtaactcccttcttagcctgttgacttaaaggtaggaggagcccaaagtgtctaggtggcaatctcagcttccggtttaatggaatcattcttgtgtctcctggtggcagtgttcctccccctggaactaagacctccaagccagcagaatgtaatgtcatgggaacaggaagaaa

SEQ ID NO: 3112 - DNA, 2300 bp, Homo sapien
agttcgagacctgcctgggcaatatagtgagcactcattctcaaagaaaaaaaaacattttaagaaaagtttaaacatatttgtgttttttaaaggctaccttagatacaaaatcattgtcctgaaattttacagttggactgaggtggggtatagtatatctcttgggtaagcagagtatagatggcctgagaacaatttgttgctccttcctttgccacctgcatatgtgaggataacattcttttgcctgtatagaaatgaagtgtgcatttaattttcagtgtatgggtattcccctaggaatctctctagtcctagccatgatcacaatgtctgaatctaccataaccagccccctctcagacccatataccctgtcacattctctgtaagatactctccacagaatatgtctctagctctgctggcacctccctgggggtctttactagcttactcccaacttgccactccatggagcatacgttgctatacttcccaccctggactgcatcctgtatgccttgactctcaggaggtccagactatgggcatgataactagcaaccactatggcgagcaagattcccactgcaccaacagtggctctccacctgctctgggaaacattcttccttaggcactgggaatgagcacccttttcaggtaaaataccacccactaaatacaggggtgtcactatcttctcacaggcccatccataaaagagtagcataaagatagtaattaaattatttaacattttctgatatttttgttattattctaagtactttatacaattaatttatctgacattatttaaccttcaaaacaactctataaggcagttactattttattttattaaatttacaaaaataataatttttttatttaataaaatcccccattttatttactttttaattaattttatagagatgagatttcactctgttgcccaggatggtcttgaactgtctctattatcttctaatcttgacttttttccttatacgctacaatactccaatgaatattcttgttgattttttttttcacacctaagtgtttctattggatgtattttttgaaatggaatttttaggtgataaggcttacaaatttcaaatgtttaatagatagtgcctaaatccccttcaaaaatgtttgccaatttataaccccattatttgtgttccatttttgaaagatataaatatgtgtgcaaatcaactgctccgcatgggtagttccttacaatttctgtaatggaaaacatagagggaaaactacttgcagtttcagtgggagaaaaggttcccgtttcaagaaaagaaaatttcagtaggagaaaatattgtgaaaaacaaggtaattttctactttaagtttctgtcctatgggtataaaaaatagctggacattatcttcttcccaggctcttctcccctcttctccgtcaggctgcattgctggtcatttttggctcctgttggaagcaaactgctctaatgcctttggataagattttaaccaggaattatctttttttttttttttttttttttttttttgagacggagtctcgctctttcgcccaagctggagtacagtggcgctatctgggctcactgcaagctctgcctcccgggttcacgccattctcctgcctcagcctcccgagtagctgggactatctgccaccgcgcccggctaaattttttttgtattattagtagagacggggtttcaccgtgttagccaggatggtctcgatctcctgacctcgtgatccacccgccttggcctcccaaagtgctgagattacaggcgtgagccaccgcgcccggccgaccaggaattatcttaaacagaaaaagaatactctaaggaggggtataccggccagcagaacagtaacccctccccggggttttcacaaggacacaagctggtgtgtaatagacttatctataaagcagactcaactcctaactggaattgttcctgattggttagcagaaacagaattgaggactgacgacagctgcacaagaagatgaaaccatttccttcctcttttctaagcttgtctcttaaaacccactggacgttggcacagtgctgggatgactatggagacccaaatgtctcagaatgtatgtcccagaaacctgtggctgcttcaaccattgacagttttgctgctgctgggtgagtgagggtcattctgaaatggggcaatttcagacactcctactgcctggactccaggtaccagtgtggtaagg

SEQ ID NO: 3113 - DNA, 2300 bp, Homo sapien
ataaaatcccccattttatttactttttaattaattttatagagatgagatttcactctgttgcccaggatggtcttgaactgtctctattatcttctaatcttgacttttttccttatacgctacaatactccaatgaatattcttgttgattttttttttcacacctaagtgtttctattggatgtattttttgaaatggaatttttaggtgataaggcttacaaatttcaaatgtttaatagatagtgcctaaatccccttcaaaaatgtttgccaatttataaccccattatttgtgttccatttttgaaagatataaatatgtgtgcaaatcaactgctccgcatgggtagttccttacaatttctgtaatggaaaacatagagggaaaactacttgcagtttcagtgggagaaaaggttcccgtttcaagaaaagaaaatttcagtaggagaaaatattgtgaaaaacaaggtaattttctactttaagtttctgtcctatgggtataaaaaatagctggacattatcttcttcccaggctcttctcccctcttctccgtcaggctgcattgctggtcatttttggctcctgttggaagcaaactgctctaatgcctttggataagattttaaccaggaattatctttttttttttttttttttttttttttttgagacggagtctcgctctttcgcccaagctggagtacagtggcgctatctgggctcactgcaagctctgcctcccgggttcacgccattctcctgcctcagcctcccgagtagctgggactatctgccaccgcgcccggctaaattttttttgtattattagtagagacggggtttcaccgtgttagccaggatggtctcgatctcctgacctcgtgatccacccgccttggcctcccaaagtgctgagattacaggcgtgagccaccgcgcccggccgaccaggaattatcttaaacagaaaaagaatactctaaggaggggtataccggccagcagaacagtaacccctccccggggttttcacaaggacacaagctggtgtgtaatagacttatctataaagcagactcaactcctaactggaattgttcctgattggttagcagaaacagaattgaggactgacgacagctgcacaagaagatgaaaccatttccttcctcttttctaagcttgtctcttaaaacccactggacgttggcacagtgctgggatgactatggagacccaaatgtctcagaatgtatgtcccagaaacctgtggctgcttcaaccattgacagttttgctgctgctgggtgagtgagggtcattctgaaatggggcaatttcagacactcctactgcctggactccaggtaccagtgtggtaaggagcaggcctgggccctggaagcaggggatagattgaaagaggagagaggaccctgaattcttaagtgttccaatggttcctaaggtcagaactcagaggtagtttcatagtccctggaaagtccattctgcaccaaacattcatgtgtactttgtagtcatgaggaggaacaggaaatgagataaaggggacatatgaagtgaatacttttataaaagatcaactggaaacaggatcttgagatgggtcctggagaaggaagagcccaagctcacctccccagcatttcacatacgcagctaaatttgaagccgtgttctcctgctcgacgttgatccactctcttctcttttacagcttctgcagacagtcaagctggtgagtatgccctttgcttccttgtattgacagtgttgtatcctcataatatgatgctgtgtttgctggggcggcgggggggtatgtctattccactgaaaatcaagcttgggttcagcatgggcagttcccccattttagtggggtctgggatttgcttcttagatccactgaagacccaagggaatgaggccgctgcaagtacagatcttgaactacatctacaataggactcttgggtgcctgacctcccttgggagctcctttggcatccacagtcccttcagggttatttattccacacccctttccactctgcccctcagcagctcccccaaaggctgtgctgaaacttgagcccccgtggatcaacgtgctccaggaggactctgtgactctgacatgccagggggctcgcagccctgagagcgactccattcagtggttccacaatgggaatctcattcccacccacacgcagcccagctacaggttcaaggccaacaacaatgacagcggggagta

SEQ ID NO: 3114 - DNA, 2300 bp, Homo sapien
cttggtcatggccctctcaccctcatacacctggatgaagaccccaggctggttgtccgagtaggtggtgaaagtctgggtctgcttggtggggatagtggcgttcctctggatcagcgtggtcatcaccccacctgctgtctccagccccagagacaggggagccacatccagcagcaggagatcctgcactttctcacatttgtcccccatcaacacggccgcctgcacagcagccccataggccacagcctcatcagggttgatgctcttgttcagctccttgccgttgaagaagtcctgcagcaacttctgcaccttggggatgcgtgtggagccccccaccaggacgacgtcatgaatctgggccttgtccagcttggcatcccgcagggccttctccaccggctccagggtgctgcggaagaggtctgagcacagttcctcaaagcgggcacgagtgatggacgtgtagaagtccacgccctcgaacagggagtctatctccagggtggcctgggtgctggaggacagggtgcgcttggcgcgctcacaggctgtgcgcagcctgcgcagggcacgcttgttcccgctcaggtccttcccatgcttccgccggaattcttccatgaagtggttcacgagccggttgtcgaagtcctctcctcccaggtgggtatctccagcagtggctttcacctcaaagacaccagcgtcaatggagagaaccgacacatcgaaggtgcccccacccaggtcaaaaatgagcacgttgcgctctcccgcgccccgccggtccagcccataggcgatggcagctgccgtgggctcattgatgatccgcaacacgttgagccccgcgatggcccccgcgtccttggtggcctggcgctgcgagtcattgaaataggcgggcacggtgatcactgcgtgcttcacgggctggcccaggtacgcctcggccgtctccttcatcttgctcagcaccatggacgagatctcctcggggtagaacgtcttgtcctccccgcggtagcatacgcgcaccttgggcttgccgccctcgctcaccacccggaagggccagtgcttcatgtccgactgcaccgtggtgtccgcgaacttgcgcccgatcagccgcttggcatcgaacacggtgttgtgggggttcagggccgcctggctcttggccgcgtccccgaccagccgctcggtgtcggtgaaggccacgtagctgggcgtggtgcggttgccctggtcgttggccaggatctccacgcggccctgctgaaacacgcccacgcacgagtaggtggtgcccaggtcgatgcccaccgcgagctcccgtggggcctgcatggctgaagcttcttgtcggatgctggaggccacggaggctgctgccgctccgccgtcgaggggcgctcagcagtgaggctctccctgcggtttctctgcagccagcccggctcggatctgctcagctccgcttccaccggctttttatccttttgcgcctcacccgacccccgccgccgcgaactttcgcgaacctttccgcaccttcccgcaccttcccgcccagttgagagcctctcgcccgcccgggctgactcagccgggtggcgcggcgcggcgctgaccccgggagaaggttcgggcagatcggggcatgagccgcgaggctgggcggctacgccaggccagcccgcctctgactcaggctgctgaaagaaatgcggggaaggttctagctcctccgggctggctctgaggacgcgcggttgtggcagaggctgcaaaagcagcaactttagaggcaaggtctccccggggctgtgggaggtcggatccctgaggcacacaggggcctgcgggctgccttggagggccgctgagagcccagcggctcaggaaggccgaagatatgttaccatgcgaatacagatatataagatatatacacgtatatcttaaaacagttttatcttgaacaaaatattttccaaaccgcgatttaagacggtgcctggttccttagtgaatggccagagatagtgagctttaagagacaatactgcaggtctttagctgacagtagcattggtggttcagtggtagaattctcgcctgccacgcgggaggcccgggttcgattcccggccaatgcactttcatttttttccgatccatttcaattctttttctcatctaggattaatcactcttgaataaattaaaccaggtggctgaagactttacattcctccagttttgttctctctcctttaccagtcact

SEQ ID NO: 3115 - DNA, 2300 bp, Homo sapien
gaattccatagtcagaaacttctgctgtgcctggccttccaatgagaaaaggagagaagaggaggggaaggaagaaaaagggaaggagaagaaagaaaagcaaacatgaagataaacacttcaatatatgatatcccaagaccatctacccttttgtaaaaattttgctttttttttttcccccccaagagtcagggtctcactctgtcgcccaggctagagtgcagtgccatgaacataactcactgtagcctctaactccggggctcaagcaatcctcctgcctcagcctcctgggtagctgggactacaggcatgcaccaccacatctggctattattattattactatattagtagagatggggtctttctatgttgcctaggctggtctcaaattcctggcctcaagcaattcttccacctcacattggccttccaaagtgctgggattacaataagccaccataggccaaaattttgcattttatccattactgtaaaattaacccttagaaatccaacaacactcaatttgagaattgttcaacaaccacttaatgaaaaccccctgaaagcttcccatcctgttgcagtccctttctctcctcctgtgctctctcctcttcttcctatctagcccacccttttggcagctaagaattcctccctccattggagagccacagaccaaagaggagtcaaataagaaaataagacctcaaagaaggaaaacaaagtgaaggccttgcatcagaagtcacgtggcagaaagccacctggatatctgaaaagaagaaagaattgagggatatccgctttttgcctcagagaccatccttagccctgaaggctttgtttctgctttaggtttcccagataagcatccgaagtgctacagcaaggaactttaagtttccagatacttgtctggattttgcaaggcgtagatgagtcacttgagaaggagaactggaatggctgcctgggttcatttccattgtccaatccaagggcctgtggagaaggggctgctgcaagactctgtgtgtggcggggggaggggtgggtacgtggatggcaatgggaggatcaattaactccacccaggagccaaatgaaacacacaaataaaaaacaaaacctgagtagtggtttttaggtcattctggagtagaaagagcattcatttatagcaaaggttggcgggcacctgtgtcagcccctgcctccactccacccctaacaagtatcaggtgcccacacgggcctgctgctcgcctcctgggcttttctaagccaggtgagacctgtcccagatgtccacgaatccactgggggagtggcactatcaagcagagtcatctgattttctgcctgggacctggaccattgtgagagtaaccaacgtggggttacgggggagaatctggagagaagagaagaggttaacaaccctcccacttcctggccacccccctccaccttttctggtaaggagccctggagccccggctcctaggctgacagaccagcccagatccagtggcccggaggggcctgagctaaatccgcaggacctgggtaacacgaggaaggtaaagagttcctgtcctcgcccctccccacccccaccttttctgtgatcttttcagcctttcgctggtgacttgttcttccagggcccatttctctaccctacctgggtttcttctaacctggaaatctaatgatcaaatcacactaaaaagtcagtagctcctgtggattacatatcccaggagcatatagattttgaattttgaattttgaaagaaattctgcgtggagataatattgaggcagagacactgctagtggtctgaagatttgaaaggaccactttctgtgtgcaggcagggcctcagctggagatagatgggtctgggcgaggcaggagagtgacaagttctgaggtgaaatgaaggaagccctcagagaatgctcctcccaccttgaatctcatccccagggtctcactgtcccattcttggtgctgggtggatccaaatccaggagatggggcaagcatcctgggatggctgagggcacactctggcagattctgtgtgtgtcctcagatgctcagccacagacctttgagggagtaaagggggcagacccacccaccttgcctccaggctctttccttcctggtcctgttctatggtggggctcccttgccagacttcagactgagaagtcagatgaagtttcaagaaaaggaaattggtgggtgacagagatgggtggaggggctg

SEQ ID NO: 3116 - DNA, 2300 bp, Homo sapien
ttgcatttacaatagtaatcagcaggtgtggtaccaaatatggaaccaacaattttatctgcattatctcatttaagccatgagtgccattattgttagcctcactttacagataaggaaactgagggctagaaggttaaataagtggcagagttgggatttcctccagattcctgtgagacccagacatcttaatccttttggaacctgtgcttctcctttgtagtactcactacacttgtggaactacatccaactacacttgtggaactacagccagctctgcaaacatgacagtctacttcactccaagtctttgctcatgctgctcctcttgcctggaatgcctatttctctcaaaaatcttcctgctgaatattttgcgatctaattaaagtgttctctcttccatgtacactcctccctcagatagaattagccactgtcttctttgtgcatacacagcatttcataaatactgtcacagtccctctagcacttcaaatacttatctgatgttctccccctaagaaactgtaagtcctagaggatgacaatcaactgaattccatagtcagaaacttctgctgtgcctggccttccaatgagaaaaggagagaagaggaggggaaggaagaaaaagggaaggagaagaaagaaaagcaaacatgaagataaacacttcaatatatgatatcccaagaccatctacccttttgtaaaaattttgctttttttttttcccccccaagagtcagggtctcactctgtcgcccaggctagagtgcagtgccatgaacataactcactgtagcctctaactccggggctcaagcaatcctcctgcctcagcctcctgggtagctgggactacaggcatgcaccaccacatctggctattattattattactatattagtagagatggggtctttctatgttgcctaggctggtctcaaattcctggcctcaagcaattcttccacctcacattggccttccaaagtgctgggattacaataagccaccataggccaaaattttgcattttatccattactgtaaaattaacccttagaaatccaacaacactcaatttgagaattgttcaacaaccacttaatgaaaaccccctgaaagcttcccatcctgttgcagtccctttctctcctcctgtgctctctcctcttcttcctatctagcccacccttttggcagctaagaattcctccctccattggagagccacagaccaaagaggagtcaaataagaaaataagacctcaaagaaggaaaacaaagtgaaggccttgcatcagaagtcacgtggcagaaagccacctggatatctgaaaagaagaaagaattgagggatatccgctttttgcctcagagaccatccttagccctgaaggctttgtttctgctttaggtttcccagataagcatccgaagtgctacagcaaggaactttaagtttccagatacttgtctggattttgcaaggcgtagatgagtcacttgagaaggagaactggaatggctgcctgggttcatttccattgtccaatccaagggcctgtggagaaggggctgctgcaagactctgtgtgtggcggggggaggggtgggtacgtggatggcaatgggaggatcaattaactccacccaggagccaaatgaaacacacaaataaaaaacaaaacctgagtagtggtttttaggtcattctggagtagaaagagcattcatttatagcaaaggttggcgggcacctgtgtcagcccctgcctccactccacccctaacaagtatcaggtgcccacacgggcctgctgctcgcctcctgggcttttctaagccaggtgagacctgtcccagatgtccacgaatccactgggggagtggcactatcaagcagagtcatctgattttctgcctgggacctggaccattgtgagagtaaccaacgtggggttacgggggagaatctggagagaagagaagaggttaacaaccctcccacttcctggccacccccctccaccttttctggtaaggagccctggagccccggctcctaggctgacagaccagcccagatccagtggcccggaggggcctgagctaaatccgcaggacctgggtaacacgaggaaggtaaagagttcctgtcctcgcccctccccacccccaccttttctgtgatcttttcagcctttcgctggtgacttgttcttccagggcccatttctctaccctacctgggtttcttctaacctggaaatctaatgatcaa

SEQ ID NO: 3117 - DNA, 2300 bp, Homo sapien
cgcctgggcgacagagtgagactctggcaagaaagaaagtaaagtaaagtaaagtaaaaagaaagagagactctggcaagtaagaaagaaagaaaaagaaagagaaagaaagaaaggaagaaagaaagaaagaaggaaggaaggaagaaaggaaagaaagaaagaaagaaagaaagaaagaaagaaagaaagaaagaaagaaagaaagaaagaaaggaaggaagcaagaaaggaagaaagagagagaaagaaagaaaggaaaaactccacaggttactcgtttctaccttatcttacatgaagtgccaatttaccgagagcaagacagtacataatcgactattcccctacctgctacttttcccttacaacacgtggattaccatactcttcctctttcccctccagcctgcttttcctctaaatattgaaaccctcaaattcatctttggagaaagtcacagaccacatactgtttctgtgattctgtgttgttttcttccaggcatgtccttaaccttggcaaaataaacttctaaattaattgccacctgtctcagatacccttggttttacagtaagaattcacatgcttacatagtaactattaattttggtttcttagtgtgttacctatatattgtatgcctttgtttctaatgatatttataaagtattgatgccagctcattgttatcacattgccagttaaaaaaaaaactaatttttaacctaaaaattagataagagctggagatggatctgggggtagaacgggggcagtagtaaaagcacgcgtcagagtgggtggggctgtcgaaggtttctgaagaccacagagtgtgataacaaggttttacagtgtcatttccttaagtattaaagtattacagcctgcttcctgagaaggcatttgggaaagagtccccagaaaggggccccaggagagattccagagaaactcgtgttttgcagatgttgagggtgaacaaatggtaatgaggatgatgacagaacgcaagaaaagagaactagcattcaccggacacccacgatgtaccaagcactttgctaaccctcatattctcttttactttccaaaaacctgtagtactgtggttctcagccaggggcaattcatcccctggggaacacttgctaatatctgggggcatatttgttttcacaactgggagtgccactggcatctaacaggtagagcccaggagtgctgcggaacatcctacaatgctcagggaaggtcctcacaagaataatttggcccacaatgtccatagtgctcaggctgagaaaccgtgcttaaatggtaggcacaataatcttcacttttacagattggaacctgacactctgagaagccacctggcattcaacccgaaacctaacacagctccaaagcccatgctctttcaccatgccgttgcagtgagaacagggatggaaatgagggtggcaaaaatgaccaagatacaaaaccagggcacagattggtgctcaatagatacttattgggatattcattaaatagaagaatgaataagaaaaagaatgaatgagggcaggggaataatgaggatgagtgtggtcattctattgccatcctgacatacctccttgtccttgttccacaactcagcagtgagtctgggattatgacaatagagaaaattaaatgatggtaggtggcctggagtccccatgctcaatttcaagaagcatccagattccagggcctgggtctccaaatggaagtagaagtactagaagattgctggtgcacgctgtcctgcatcaccctttctcaggaggatagagactgaaacaggaggttctgagctgagttttggtgaccatttccctctttctcccagaggcccaggccagctgtggcctcagaggaagaagaagggagttgtttccctagtttctaaaatttctgtgaatttgaacatgggctacaccagatttattctgggaagctctgaatcttctaggagggaaagactgagaggaaagagggtggaaagggaggagcctgtgataaaacagaacatttctttttcacttcccctttcagactccagaatttgtttgccctctagggtagaatccgccaagctttgagagaaggctgtgactgctgtgctctgggcgccagctcgctccagggagtgatgggaatcctgtcattcttacctgtccttgccactgagagtgactgggctgactgcaagtccccccagccttggggtcatatgcttctgtggacagctgtgcta

SEQ ID NO: 3118 - DNA, 2300 bp, Homo sapien
aacttactcaataaaccgaatctcagtctccatgaacaaacagcagacccaatgttgctttttcctcgcagtgaatcacatctattctaaatagttcattgattaagcttcaagcgagtaaattttcccagcagcttaatggaaatttcagtgtaaagaacttgatagcttcaccccaaatcttcagaaggccccttgccttccatattgacagtggggtcctgcaaggattgctgcagatggtataggggagggtctctatccaggtaagatgctatggtaaggacagtaaaggagaaagggtgacataagaagagaaagatatcatgatttgtttagaagccccttagcctctgcctaaccctgagggtctatgttttatgtagttttaggagtggcgatgcatctaaacacattttatttgtttaattcgtacacctgtaatccagcactttgggaggccgaggtgggcagatcacgaggtcagaagatcaagaccatcctggctaacagggtgaaaccccatctctactaaaaattcaaaaaattagccgggcgtgatggcacgctcctgtagtctcagctactcgggaggctgaggcaggagaatggcttgaaccctggaggcagaggttgcagtgagccgagatcgcgctactgcactcaagcctgggcaacagagactccatctcaaaaaaaaaaaaaaattattaaggctagctaggcttttcttcctcttctgaggcttcacatcacatcagctgcaaggcttactgcctcactgccttccccagcacccatattcaaccacccctggactccctggggccacctgcacagaagcgtatgcctctcgataatggaaattttattctaaatgcttattttagactcagaaagatccactctcttatgcccgtgtggttgatatgtctgctctgacctgtggtttttgcacagttgaagggtcatactgtccctctctctgccttcaaggaggaccaaactaccttcccccatttctctctctctctttttttttttttttgtgagatggagtctcgctctgtcacccacactagagtgcagtggtgcaatcttggctcactgcaacttctgcctcctgggttcaaatgatactcatgcctcagcctctgaagtaactgggactacagccatgcaccaccatgcccatctaatttttttttttttttttcagtagagatggggtttcaccatactggccaggctggtcttgaactcctgacctccagtccagtgatccgcccaccctggcctcccaaagtgctgggattacagaggcatgagccacagtgcctggcctaccttaccccatttctgatggctcatttcatctccaaataacctactggaggcctggtgggtgttatgatgacagaaaggggaggaatgtggccactgtgaaaagacacatgggccctaccattaagtaggcctcaaacaaatagcaaacattcagaggcagggacaatggttcccaggaggccatctggaacggaagggagaggctgtagcctctatattgctcctattcctgagtctcctcaggtttctcaagatatcggatgcctcctatctctaatttcctcaggatcagtggcctgagctttggctatgagcctaagccctgagctgactgctggatcctctgggaatagattttctttttcctctactctttcccagtggattctccctgccttgtactcatatttccactgagactgagcagacttagtcatgctccagaaatagagagctgacacgagtctagagaaatttgcatgcaaatttgtgtgggctttggatagtcagagcctactagagactaatctgatatctaacttggtgccgtgactaatcttccttctctgtctcgctaccttctagtcactagaaacatataagtgttggaatgggcaggacatttgaattctcatcattgattctccagtgattttctattggccttcaaacaacatcccaccttctgtccccagttgcatcaccagtgaaaagggtggttgttgcactgacctttcccagagtgtacatgaaggccagctggctatcagacaatgacatgctttgacaggcccctgagctctgtgagtaaattcttgaacagctgagagtgctaccattttgtcatagccctaagggtgcagatgatgctgaaagcgtgttggccaaatctgaatgatgaaagccaattacaaactagaaaatgaaaacagaccccagatgcaaggagatga

SEQ ID NO: 3119 - DNA, 2300 bp, Homo sapien
gtgtgtatcccataaaggcgcttcagggctctgtagggaagcatcatgtccttaccagtactaacttacatgaaacttcctatgtgccaacccctgttctaagccctttacatatgttaattcatccagccctcacaatatgtaccaagaagtccattgtggaattgtctgtggtagctgagggtgggcagcaactaggatgttaggggaatggacaagtgcagtgtagcagaagcatagaatattagggcagtcatggctgggcgcagtggctcatgcctgtaatcccagcactttgggaggctgaggtgggtggatcacctgaggtcaggagtccaagaccagcctggccaacatggtgaaaccccatctctgctaaaaacacaaaattagccaggcgtggtgatgcacgcctgtaatcccagctactcaggaggctgaggcaggagaactgcttgaacccaggaggtggaggttgcagtgagctgatatcatgccattgcatgccagactgggtaataagagcaaaactgcgtctcaaaaaaaaagaatattagggcagtcaaaagcaataaacatgatgcatgtagagcaatctgaacaaatttgaaacatctgggattaatttttaaaagtagaagtgaatataatatctagaacacaatgccacttatgtaaattaacaacactaaatatttctcaaagctaaaaactgcatgttatacctaatgtaaatgacgagttaatgggtgcagcacaccaacatggcacatgtatacatatgtaacaaacctgcacgttgtgcacatgtaccctagaacttaaagcacaaaaaaaaatagcatgtatatgggaacacacagtaaacattttacagtgggtgcttatgtggaggggaggaggacaataatgtgggtgaaagtcaacaaggtaagacaataagagggggaacttgcaaagaccaataatgacagccggccatgagcagcatcttgaatccctgacaatcagagagataagagaacagattttggagacagacttctattcaaatcccagtttcatcatctcagtttcctcatatgcaaaattgggatattaataattcttcctcaaagggccttacaagaattaagtgcagtaatatctgtgaagcacttagcatagtgcctgccacatgccgagacactaaagtgagctgtcatcagcaacaacagcattagttcattactgtaattatcactgagaacactttatcaccagaatgcttatcaaatggtgacatatattgtccagatgttatgttgtgataggcctcaaataattgctcaagttacaaatgataatttctaaatttttctgcattgtaaaggagtgaagaattagaaattctggggaaaagtcctagatggagtaaaaagactcactttgggaaaaacttagaggagagcctagaataaataaatatttcgtgggaaatttttcaagtcaaattctgagcactgtataatatgaacagtatggatggttccagaggtttctagggacgactatacagttcacaaagttttggtgtactaaggtttcttctgaatcgagtaaaggggctgagatctgtgctctgggggatgagaagccaaaatagagccagcttgtgttgcctaagaggacagctgacaactgcattgcattcttaccattgaggtggtggcttggtgcagaagtcagacctctgtggcaggctgtggatcatgtgggaagccacacactggccctgagacgaggaattattaggatggaggggaagcacaagagtgctggtcagcccaggcactcctaaagcaggcaggtgatcatccctgttcccagtaattagttcttctctgcctcccctactcttgggcacattgtcaaatatgtccctactttgtttgaaatctacaggactctatctcttttatcaaaacctgcactcaaaacatgatctgaagtgaccagcataatttaaatgaccagtcacattttcctaagaggcatttgcatttttaaaaggggctagtccattaagcaaaatatgaggggactctcagagtggaacttcaggcatcagcaagaggggaagatactatcttcctgggagttgacagtacctgataattgatctccttcccatcagatttccaagggatcaaggtgccccggttctaaacaaccacaggtaaggacaggatagagtccaaggagacacactatcaggctggaaaattcattaagtatttacatgaaaattcaggttctcc

SEQ ID NO: 3120 - DNA, 2300 bp, Homo sapien
aagggccttacaagaattaagtgcagtaatatctgtgaagcacttagcatagtgcctgccacatgccgagacactaaagtgagctgtcatcagcaacaacagcattagttcattactgtaattatcactgagaacactttatcaccagaatgcttatcaaatggtgacatatattgtccagatgttatgttgtgataggcctcaaataattgctcaagttacaaatgataatttctaaatttttctgcattgtaaaggagtgaagaattagaaattctggggaaaagtcctagatggagtaaaaagactcactttgggaaaaacttagaggagagcctagaataaataaatatttcgtgggaaatttttcaagtcaaattctgagcactgtataatatgaacagtatggatggttccagaggtttctagggacgactatacagttcacaaagttttggtgtactaaggtttcttctgaatcgagtaaaggggctgagatctgtgctctgggggatgagaagccaaaatagagccagcttgtgttgcctaagaggacagctgacaactgcattgcattcttaccattgaggtggtggcttggtgcagaagtcagacctctgtggcaggctgtggatcatgtgggaagccacacactggccctgagacgaggaattattaggatggaggggaagcacaagagtgctggtcagcccaggcactcctaaagcaggcaggtgatcatccctgttcccagtaattagttcttctctgcctcccctactcttgggcacattgtcaaatatgtccctactttgtttgaaatctacaggactctatctcttttatcaaaacctgcactcaaaacatgatctgaagtgaccagcataatttaaatgaccagtcacattttcctaagaggcatttgcatttttaaaaggggctagtccattaagcaaaatatgaggggactctcagagtggaacttcaggcatcagcaagaggggaagatactatcttcctgggagttgacagtacctgataattgatctccttcccatcagatttccaagggatcaaggtgccccggttctaaacaaccacaggtaaggacaggatagagtccaaggagacacactatcaggctggaaaattcattaagtatttacatgaaaattcaggttctcctcattgctcaggtacggtcacatggctcagaaagcacaagaagtagagccccgaggtcagatctgagaggcttctgaggggccgatgcagtgacttctctgctgcaggtcaggagttctggaactggggcgtggctggggaggggttgcagggaagggtgggaggaaggaagaaaagaacaagtgattggaagtgccacaggatgagctcattgggatgggtaggaaagaagagttttctaacttcttaagaatttaagaatttatgagaactcaagatttcaggaagggaggaagaagaaacacattgcatttctatccttgactggggaactagatgatagggatgtgaagggtggttggtgagtcatgccttttcgtctactcattgtggcaggatgtgagctctgggggcaggcaaccgaacactgacctctctaggtctcatgccaatgtctgtcatcaggagtgagcaggaaaaaggtccttaaggacatgaggccgtgtcttcctcagctgagccttgcagggctggctggaaggtggagaagggatgggatgggagtgggatgtcaatgggagcctgaagatggcggggtcatctgctggagcctggggttctatggggctctcttgtgctgtggagggcacaagttctgcaggccttcctttcagtagtcagggctggcctgagctgtgaggtggctgtagatgcggtagatgagacagtgcctggcacttgggatacctgatattcagcctgtctcccactggttctggtctgctatcttcaggaactaggagtgggtgggagaagcagcaatgtctcctagtactcagtggcatccactggccacattctttctctctgttccccatctcatgccagtgcatctccatccttctgcagctgctgcagtcagatccatcatgtggccactgacagcccttctgctcctgggtgagtccacagtgaggcagcagaagagctttgggtggtggagaatagggtggaccaaggtatggggagaggagggtgggtatccaatcctcagtttccaagtggttcattatctttttttggaggggtgaagaagaaggggctttctcagagct

SEQ ID NO: 3121 - DNA, 2300 bp, Homo sapien
aggcatgcctagcccccaaggtccccttaccctcctgccatagtgtgaggcacagtgtgaacatttctgtttgtttctgagaccagctcagaagagcaaaggctccaaggacctggagtgctggacagagaactttagggggttggggagggagcagtaaaggaaattcaccaaacaggaaaggtgagtttccctggcagtctgagcatagatcaaggatctactctcagttgaacagtgtgatgcttctctgtgcctcagtgtccacatctgtaaagaagggacaataatagtatgtatctcttcggctgctctgaggattaaaagtgaattatgatttgctaaagaaaaaaagcagcaattgaactgagcacttactcaaagttttattgcagacgtgtatatgtgtacacaggagtcagctgagaaactgattctcgagatgcttgaagggttttaaaacaggataagaaaaataacaataatttgttcaataaagtacaggattgctgggcacggtggctcaagcctgtgatcccagcactttgggaggccaaggcgggcagatcacctgaggtcaggagttcaagaccagcctggccaacatggtgaaacactctctactaaaaaaaaaaaaaaaaaaaaaaatagctgggcatgatagcgggtgcctgtagtcccagctactcaggaggctgaggcatgagaattgtttgaacctgggaggcggaagttgcagtgagctgagatcgtgcactcctagccacaatttgtattcagaatttaaagcacatcactcaatgttcagattagcacttacacacacttcatattcatactctgtggtttcttgttcggaaatcattggtgatagcaataattatactgagtactataggagtaattactgcttacagattgggagtgcatgtggattgtggctattacttgcaggattctttctcaatgtacaacacctaaaatggcatctgctctgtgctagggctatgtaagcgtgctataatgatcacagggtaattatgaggtgctgtaggagatacctaaggctctcctggggtgtcagggatgttttctggaggagataaggtctaagcctagacatgcaggacaagcaggtgaacttaaacaggtgaaagagagtcttcttggctgaggaaatagcaggtacaaaagcctcgggctcagagcagggccagttctctcaacagttcagtatggctggaacttatcctgttaggagtggaagatgaggaaagtagagaggaaatggggcaggaatgaatactgccatggtgagggagaggtaagcaggacccagtcaggaggactctgacaccatcctaaggaggttatagttgattctcatggtcaaaaccctttgagggtggagccaagtctctggcatctttgctccctggctaagtgaaagaccagccatcccccttccttcccactcacctacaaatatatcttgcactatgaggctgctgggtgccaaccaccagggaaggcctgtccgctcaagaaagcagtgggaggccaggcccggtggctcacgcctgtaatcccaccactttgggaggccgaggtgggcgtatcacctgaggtcaggagttcaagaccagcctggccaagatggtgaaaccctgtctctactaaaaaatgcaaaaattagctgggtgtgatggcgcccaccggtaatcccagctactcgggaggctgaggcagaagaatcgcttgaacccaagaggtggaggttgcagtgaaccgagtttgtgccactgcactgcagcttgggcgacaagagcaagaccatgtctcaaaaaaagaaaaagaacaagaaaaaaagaaagaaaaagaaaagaaaagaaagcggtgggagatggcggggaagggagggagaggagttaagaggagaaagctggaaggctgtgagagtgggagatctccagggctggactttctgtggagtcaagcgtgtctgtggtgtctgtcgcagattggctgattctgcaagtgccctatgcgccagtgttcgagggtgagccgctagtcctgcgctgccgcggctggtacgacaaggtggtctacaagcttcactactaccacgacggccaggccgtgcgctacttccactccagcgccaactacactgtgttacaggcgcgtgccagcgacagcgggcgctaccagtgctcgggcaccatgcgcatcccggtggagagcgcgcccatgttctccgctaaggtggctgtgacagtgcaaggtgggagagacca

SEQ ID NO: 3122 - DNA, 2300 bp, Homo sapien
gtctgcctgaaaaatcacagctacaaacaaaatagagcagcttaggcaaaactcaggctgcacctgcacagataagcaggtagggtccagcacagacgcttttcattcttcgtgtaattggcgagctcccaggaaaaactttcctccccttttcaggtatatacacagtggactccgtgggaacttgcacaggaaggaggggggcttacctaaaacaaacctacagtgatacaaacaagagaacccacgctttgtgcttgcctagagacatacccacatcggcagaagataagggaagttgcacagacagatttattcataagagaagttactcaaacaactatagagatgagaggagtttcttataataggttttgaattcagctgtaaaaatggcaccccacttgggctcccctctctgctgtggagagctttcttcttttgcttattaaacttttgcttcaacctcactctttgtgcccatgctccttagttttctcggtcgttagacaagttcggataacaccttagacaatgagaccattaacccttacctgtttcaacatttttatcaaatccaaggccatgaagctttccccctatgttttctactaagaatgttatatttttaggtctttaatctatttggagttattttttgtgtatggtccaaggtaaaggtccatcttcattcttttgcatgtggatatctagtttttcccaacactgttgaggagattgtcctttttccattgtgtggtcttggcactctttttgaagattattctaacatatatgcagtgttgcaggtgattagcagctttctgggctggtgacatgggtggtaggaagaatttaccaacacagttgtaggtaaagaaaggcaggtttattagataaagtatgaaaatacattgcaagggtgcaacaggcaggtcagcaagagagaagctgactgctaggaaacaaaggcttgctggggattttgtagaatggtgcttatgttgtgggtggaagagggctttgtgcagtactaataatgccagggttgcagtgaactaacttccatttttctatcagctgagggtctggtgatggctgggcacaggcagattgtgagttatttgcacagcagggctatgtgtcctggaccacgaagaaaggcagacttatggcttgtctgctttctccttttgcttcccttcgtccagccagcctgactccttttccctaattaggactccacacgcaagggtttgttctgttccagaatagagacacgtcgatgtatctatctttataccagtactatagctgctacttcttgaccaattacagctttagtatctctctcacctgtcctccctatacaaaagatatataaaatatactcactgtactgagtatcttcctgcagcattcagtctggagcaaagcctgcttccttcaaccctttccaaaatccccaaataaaagcccaaaatctgtagaggatcttcctaacatcctcgtgctgagatgccctgaaattctccataactcatgactgagtaataaaaccaacttgcttaattaaagttggtttcttgtagtcctggccggaggacattgacttacaaaaatataggattagtatcttcaaaataaatagacagtaaacatcaacaaggattcacaccccaataatgaaattgggcagaaaaaggaaaaataatcatgaaatgcacagtaaagatggctccataatattgaaaaaaattttacttcaaatgcataaaatgatgcttctgattcagctggtgcgacatttatttcacatttgagttcagctgctcctgatgtctctttcctgaaaatttcaatactaagagctcgagaaaccctgtatttggggaagcttatccttcaccatcaactttgggggtaggggtcagagggaacaagggtggaaaggccgcgctgaatggggccgaagctccgcccctcagcgataagtccagattcctgcggccgacgtggtcctccgagggagcagcagagccgccgaggctggcgagtcccaggggaaggatgttctagccggagtctactcgatggtagggcaggaagccgccttgtctctgggcgcggccatgttggaggctccgggcccgagtgatggctgcgagctcagcaaccccagcgccagcagagtcagctgtgccgggcagatgctggaagtgcagccaggattgtatttcggtggggccgcggccgtcgcggagccagatcacctgagggaagcgggcatcacggccgtg

SEQ ID NO: 3123 - DNA, 2300 bp, Homo sapien
gagtcagctgtgccgggcagatgctggaagtgcagccaggattgtatttcggtggggccgcggccgtcgcggagccagatcacctgagggaagcgggcatcacggccgtgctaacagtggactcggaggagcccagcttcaaggcggggcctggggtcgaggatctatggcgcctcttcgtgccagcgctggacaaacccgagacggacctactcagccatctggaccggtgcgtggccttcatcggtcaggcccgcgctgagggccgtgcggtgttggtgcactggtgagtggccgggtcagtgggtgacgtgccccgccaagcttccagccggcccccgtcgccccttaccttccgaggccgtcgggaggacaagagcgcggtcatgccgcgtgaacctcctcccgctgcctcccgcaggaggcgtgtttccaagagaggaggagggttgaggcgggcccctggtgtgtgcaggctttcattcattcatgctttagttggttcttcctgcagcagcagagggcgggggaggtgtcatctgataaatgacaaattacctacaccctaaggagtttacagctctgttggagaagctagacacccaccccgattattgtaatgcagattaggttgcttggtgtcttgtaaacgggatttacaaagatttagggttaaatgtttttgtttgggatgggtggcgggtggttgatgaagagatgaattggtttggatctaaaggatccctgggctttgcctagggaggagatggttgcagcaaagacaaaaagaaaatgggaatcccgcagggcgcggtggctcacgcctgtaatcccagcactttgggaggcaggaggatcacaaggtgaggagttcgagatcaggctggctaatatggtgaaaccaaaaatacaaaaattagccgggcgtggtggctctcgcctgtagtcccagctactcgggaggctgaggcaggagaatcacttgaacctgggaggcggaggttgcagtgagccgaggtcatgccacagcactccagcctgggcaacagagcgagactccatccctccccccaaaaaaagaaaatgggaatccctaagcagttcttggttggattggagtataataatcgtttaaatttattgagcacataaaagaagatagtgatgaaatcaaaagaagtctgggaccagattttgaggtccctgaatgctaagatgaaaggagattggatttgtttttgttttgttttatttatttttattttgatatagggtcttgctctgtcacccaggctacagtgtagtagcgtaattacggctcactgcagtctcaacctcccaggctcaagtgaacctcctgcctcggcctccagagtagctgggactacagaccccaccacatccggctaattttttgtagaggtggggtctcactttgttgcccaggctggtctccaactcttggactcaaccaatcctctcacctcgcctcccaaagtgctgggatttcaggcgtaggtaagccactgtgtctagccaggagtttggatttgttctgagccattataaaaattttaaaaattactgttattatttttgaataggtaatagattcacgtggttcagaattcaaaaggaaaaaggaataattattttgtaccttgataatatttcagaggcaatgggcttatttgagaagcaaaaatgaagtgggcctaaactttactattaatagggggctgggctttgtgtgtttttttttttaattgttgctatttgctgttttattttaaaggtctctttttcagtcatgcaggagtcagtcgaagtgtggccataataactgcttttctcatgaagactgaccaacttccctttgaaaaagcctatgaaaagctccagattctcaaaccagaggctaagtgggttctttttttatagtaataattatgcttttgtgatataattttaagaaaatgaaactttatatttctttatcattacaggatgaatgaggggtttgagtggcaactgaaattataccaggcaatgggatacgaagtggatacctctagtgcaatttataagcaatatcgtttacaaaaggttacagagaagtatccaggtaagtaataattgctagtgtgtaatgggctttctagatgacatttactttagcattgtatgctttaccttacttccagcaatccctgagaaactattgtttctttttgaaactgatttagccagaaataacctattcaaaatcacatggtttataaatggcagggtcaggattt

SEQ ID NO: 3124 - DNA, 2300 bp, Homo sapien
gggttcccgtagtctcagctattgtggggagaggcatgaggatcgcttaaacctgggaggtcaagctgcagtgagctgagatggctccactgcaatccagcctaggggacaaagtgagcccctgtctcaaaaaaaaaaaaaaaaaaaaaaagagggagagagagagagaaattgagattcattcaaggaaataccatgggtagatccttaatatccaataagaaaaatgatttggagaacattaaagtttacatacattaaaaaaacccaaatgacactaaatgcatgtgtctataaacatgtttaagcaccgtaaaactaaaaataaaagtggactagaattacacttttatttttataaaataaaattttatacccataaaattcatggtagaagtggcctacgccaagggaggaaaatgaagcagggaggaaagaggaattcaattctgtagtatttaatttcttatgaaaaatctgggacaaaaatgaaaaatgttaaatttttaaattcttggtgataggtcacaaatgtttgtttcataattacttgcactttttgaataaaaataaaatcttttggaaattaaaaaaattggcgatttgtcatggtgattttcttaaaagactaaggtgtctagtgggatacagaagactcgatgattttattttattttaggttttttttttttttttttttttgagacgcagtctcgcaatgtcgaccaggctggtgtgcagtggtgcgatctccgctcgctgcaacctctgcctcccgcgttcatgcgattctcctgcctcagcctcccgagtagctgggattacagctacttgcccgccaccacgcctggctaactttttgtatttttagtggagacagggtttcactatgttggccaggctggtctcgaactcctgacctcgtgatccgcccgcctcggcctcccaaagtgctgggattacaggcgtgagccaccgcgcccggccttattttagttttttatgtcaatttttgaatttgtaattgggtgagaattaaagtgttataaatttcaccttaagtgaaaatttattagttttctaatgacaaaagtagttacatctgacgtaaggggatttaattatctttttctgggcttgcgtcccggaacgctgctgcattatgtaatctgtagtaatatacccacgagcagtttggagggttctgggaagcacatttgttttgcttacctaccatgggaaagattccacgtggtcctagaagcatacgtattcgtcggttacagtattttaaatattcactggccgctgaaatttaaaatggatgaaaaagaaattctcttaagtagcgttcttgaaactgctttatcaaactcagttcatattttcagttggagttcgtgatgtatgtgattttcctttaaataaaacccgaatctttagtaatacaaatattgggaacttcgattactgtaggtcttagggtagactcgcttggactttgactaaatactatgctttagaaatttatctttaggagataaatttggggggtttatctttttatatttgctttgtttcaatttatttaaataaaagtagtctttctagaagtatgttttatagtaccacttacctcggttactgtcccagttaagcagttttcacgaatgtggaaaaatagtagtgtttttctttcatacacgcgtatatgaaaaatttttacattgatagagaattattcgtaaaaattaaagtaaatttactgttagtctctaattttgttctgagatagccacgctgtggcattaagaaggataatcaaggaataagccataatgttcagaaaggggctttactttttatttttaatattattgataaactttgtttagtcgaattgatgtctgcgtgtcttcccccgccttccccataaaacagcgggacagaaagtcctgaaaactccaaaagggaaatatttactcagaggtctattcaaatttgcttagtctctgacgttttcctgtgtcgtacaaatccctcgtgcggcaaaagtagtttgtctttactaggccaccgtctcgtcagcgttacggagtattttgtccgcctgccgccgccgtcccagatattaatcacggagttccagggagaaggaacttgtgaaatgggggagccggctggggttgccggcaccatggagtcaccttttagcccgggactctttcacaggctggatgaagattggggtgagtgggatctgagaatgtaccagggtggctcgggttcgcgtctaaagg

SEQ ID NO: 3125 - DNA, 2300 bp, Homo sapien
tttgcaaagtcccctttgtttccttttgtcccaatcacaggctccagggatttggacctggatatctcaggggtatattactcagtctaccacatcatcttcagaggggactctccatgcactctggtgaaggaggcagggcatgcattacaatcattttacttctgaagagattaaaactttttgacattacagttgcaacagactttggagttggtggctgggccaagagcagagccaggcctctggccccagcctggggcacatctatagcccagcattagggccctgccactgcagagccttggtgtgagacggaaccctgcagggattttcagggctgctggagctgcacagacgagtcctggctttcaagagtccatctgcaatttctgtgtttggtcagagaggtggcatggccatggtaatccccagacagaaaacacctcacctcatggccatctgtggggcttgagggcatgagccagggatgccgctggacagggaattggtgccctttctgagctttgccagggcagaggattgcccggtgatggcaatcctcatggtgagctagggctcacctcagtgcagaaggagcgtggcgtcctcattggcagccagggccctgcttagctccagggaatgagagcttttccatcaaatctctgctgccagggctcagtcagagttttctgttttattgtcttgaacagatgagctcagctctgggggaatgaggcattggcagggaggttcttttgtttgtcttatggagactgaatctctccccgctccgtcagaccaggacctaataaaccccacactgagctgcctaaaccctgccaactgcacccagctatggggcctgcctgcaaaacagtgttcatgcctcttccatccccagctgccccagacccagggccaagggcccagctgcttgctcctgtcctgtcagctgcagggcttggactccttcctcaaaccactgcggggagcagagtagatggaacggattggaacagtttggaaatgagggtgacctagaatttagagaactctggaagccaaactgtagggtcttttgttacttttgtcccaggtgagtgtcaaggaccaattattctcatcacccatcagtgtcgtcatgatggcaggtggggcaggggttctgctggccccagctgccagcagggggtaaggaagctgtgagggcagcattcatgtggctctctcactgcccccttccactgccctcttcccacctcctccataatccacaagtgtgaggacaggaagagcacatgcccttagtcacgtgtgacttcactatcattcaaggctatgctcaataataatactgcatataagcattgcaggctctcaacttcatctagaacccagtatagttccagtggctttttagggcctctcctgggcaccggatccagagccactcagaaggacgttgctgagttcctgtcccatcgtggccgacttgatctctgaaggaggcttctatacccagagtcagctccttattcaagaacttggtatcttgccccccagttacccagcagagggccctggcatcctgctcccagtagtgacaggggcttaggcttggggacagctctctaggacagcaggtgggcctcagggacatgaatagccattgctccactagggctggtcccacagcctggggcagctcagcagctggcagagccgagttcctggttacacccagcagaggcctctcctctggccacacttctcatgctgtgtgttcaccctgggatcagacatttgggtgcctgcagcaagccagacaccgtgttctgagcactgagaatgcaatgaggaaaagccacattccctcatcccttggtgcttacgctccggttgggggcaggcgtggagggaggagagagaagcacaaacattgtggagatgcaggatgacatgctctgtaagagagcagcattcatggtaccctgagagctgaatggaatagaatagaatagttctccagaggagggcatgatgtcataaaaggactctggatcttaggtctttgaaggataggactgagaagtcagaacaggagcaaagcatagtggtgtgaaagttgccaaagatgggcatggtggaggctcaagtgtagggtcaagtgtagggtggatcaggggagtagcaggagatggtgtggaaaaatgtttggggtcaggttatacagggctgttaaagcctgccgaggagtccagactctaaatggatgaacagcaaaggtttaaggg

SEQ ID NO: 3126 - DNA, 2300 bp, Homo sapien
aggattatgtctttgcccagaatgctctctttctctcccctgccatggccccccctcccatcatgttgccttatccactgttttgttgaaacctcccatcatcccagtcatcttcagtatcatgctttcatgaaatccacactgacctttccactagaagtgacctattccttatttaaaccccatgagatatgttcttactctgcctcacaatttcagtgcttgttctgcttacctcctgactcccacgcccactttgtaagatgtggactatctcatcttcccattaaatgtctagcaacctagcttgttgtcttgcacttaatcaacattcaatgcttactgtaattgattttttttttttttttgagaccaagtattgctctgtagcccaggctatagtgcagtggcggatctcggctcactgtaacctctgcctccagggttcaagcgattcttctgcctcagcctctagagtagctgggattacaggtgcatgccaccaggctaggctaatttttgtattttcagtagagattacaggggtgagccaccacactccgccccttaactgaattttaaaactacactttatcggtggggcacagtggctcacccctgtaatcccagtgctttgggagggcaaggcggatggatggcttgaggccaggaggtcgagaccagcctggcaacacggcgaaaccccaactctagtaaaaatacaaaaaattaaacgggcatggtggcgtgcgcctgtaatcccaggtactctgaaggtcgaggcacgagaatcacttgaacccaggaggcggaggttgcagtgagccaagatcatcccgccactgcactccagcctgggtggcagagcaagactctgtctcaaacaaacaatcaaatacaccacattttatcaatgtttacccccatatagtttcagaaaagatttgatagcttacacagaggagggtgtgtgcatgatgtccccacaaacctagacacccagagcattgaatttttgtccataaactgaattttttgaagattaaaatatactaataagggttattattatacttatgtcaactattacttatatgcgctagtttccttagtttattacaacccttattcctcagcataagaagcaaggtgtttgaatttcccaagggtgcataatatcctttgaaggggcctggctctgttcaatattccgagtgacagttgtccaggatggcacagtgcccttccttaaattcacatattggtaatcttcactgtaggtttataaaaggttgtcctcagtaattgagggacatagtaacataattgcacactattgaaagtggactccctcttagagataatctggtaacagagacccggagatttgtcccaaaccaggaagacaggaagagctgttccctttggtaatcatttatcaggcagtagctttccccatggggactcgcggagagtgtcggagatgtacagtcattcccctaactttcaacgtttacacaactcaggacacactctaggaaggaattcaatgattttcctctgggtggaggtattactaggttctaaagccgtggcaggcaagcagctaccaacggcgctaagttcaaagctgcccgagaactcgcccagagttaagtcagggaaaagaaacgcctgggaacaaacgcgccttctcccctgccccaggtgtgctaaaggacgatgccgcagatccctaactagctcagccttggagcgagcgctgggtgcctgcgatggaaagtcgctcttctcgccaagaatggtcgaaccccaaaacttcagggacgccgctcggagtaacttctcttcactcacttgcgatcagatgagaagaaagtaaagcccttccaacgtcaccctcagccggcgcgcggcagctgagtcccagcggggacggggtccgccgggtacccctccgcccgagccctgtgcgcttccaggtcctcctcctccgcgcggtcactggctgcatctccgccgccccggcacaatagaggctccgccctccttccgcgcgagctctccgcggctccctagcccagcagccctcgcccagcagcccgcgccgccaccgcctcttccctccccgtgtccggtccccgtgcgtcccgaggctccccgccgcccgtcccggcgcgcaccgcgggcgtctgtccgaacgccttccagccacctgagccctcctgcgggcgactcgctcagctagcccgtgcccgcctccaccttctccgtcatcccctcttccttgcgtccggctc

SEQ ID NO: 3127 - DNA, 2300 bp, Homo sapien
ttgggcaagttatttaaacccccctgtgcctcggtttctgtgtaaaacagggctaaccttagagttgtgtgcatattaaataacacctgtaagactctaagaacaatgcctgacacatagtgaaagggaatgatcattatctattattattcagttccataaataattattggctgtctactctgtagtagtctctgtactagaccctgaaatacctttgggatttcagcctttttgtttgtgttttgtctacaaacaatgtgttatagacttagatatgaaattctgataaattcagcagtccagttagactcaaactaatctagaaaaaaggccgtttggagtcagaggacattttaaattcgggagagaatatgagatgtaaatgaaatagttacttaaggtcttgcctttaagttattgagttactgtgccaggttttagagagtacatttacgatgcatattaaaaccactttgacattcaaagagtcaaacatgcctgattagactttcatgtcctgtatttataaaaaggttagtggtgcatttcttcagtgcaaattatttttggttcttactaatatttatgaatataataaaatctgtacagcataatgtatgtgattaatttgtccatatcatcagtttgcttttatttaaggagatatcccagaagttgctacatcttgaccagtaatttcagcagttagagaataggcaatatctagttaagggcaattgtactttagcactatgggacaaaatgagaaatgcaatcacggcaataatgtattctcttgtagaaatctgtcatggaaatggtataagaagacatgccttttacaagcagtttcgttgttacgctttatggtaattccaagcctggcctatacaacaaacaatcaataatgtttggtctgcaagtcgccttgggtagatatgtccacagggcactaaaagtaggtttaaggtgatgaattcaacagagaatctgaccctttggtctaaggaatctcagatttgactggctttgacactggcttgactggttactttccgagattttggagttagccatgtatataacagctgtcctgcagctctacctatggtgttttcacagatactgaatacttggtcacgaactcctcctatagctcctttatttgcatatcttgcaccgttcagaaactgaacacataggacacaacccttccattacccgatatctgccaagatggagataattaggcaacttttctccaaaactgttgatgtaaaggagaaaagtgactaggccccttcttagcaataggcaaattgagctccagcatttactaagatgggaaccataatacgctggccggaaataactcggaagctcattttgtccatacccagttgtagacagtcaagaatataaaaatgttctggattctcttgtccttagtactcctttctgccttccccatttctacaaggctgatggcttttaaatgttaaaaccctccctaaaggcaccccataagccctattacacaagtcacatacgaacaaaaagcgcctaagatagtcctccatttgggcgcagtcttgccttctgagaaaggggactctgagaattaatgagggcccagatctgggatatctgggacaagacttgggccttcctggtaaaacacgaaaacaaaacaataaacacggcccctcccccctctccaaaaacaaaaacaaaaacttcaaggccatgccgccgcggccatcagtagctccggctcagaatttgaccgttaaaaaaaggaaactaggctgagctagggcacctcagatcccggcagtctggggccggggcgaagttgccggcgtcgcgcggccgggggcgcgggcagggccgggcgcgactctcccggggactttcacctgctcggctggcagcgcgggcagcgcgggggcggacccggcggcgggcggggcctctgagcccggcgggaggagccggcctgggcccgccccacaggaggagccgctcgctggcggctgatccagcgtctccgtgacaggcaccctgctccgccgccaccgccaccgccaccgccaccgtcgccttttcttcttcgtcccgggcggtgcgttccactgctctggggccggcgccgcgcccagtcccgcttcgggccgcaagccccaccgctcccctccccgggcaggggcgccgcgcagcccgctcccgccgccacctcctcccctgccgccctcctagccggcaggaattgcgcgaccacagcgccgctcgcgtcg

SEQ ID NO: 3128 - DNA, 2300 bp, Homo sapien
ttgagagtgtcacctcctgcctgggccaccagcaccagcatacctcggggggacacagcacacaagacaggggacctgctacgaggagtggtgtgcaccctggaaccgccaggctcccacaaacttttcagtgactaaaccaaaaccgggtcgcattttaaaaactctacacaggcactgagagattctgcctcccatatttccccccagtattttaagctccctttactttaagtctgaggttgcagtgggagagtctgaagttggcagtcggagaaatgtgatgggtcaagacagaatgcaattccaagtcctcggggtcctgtgtgcatcactcacaagtatgctactgtccacatgtcagtcactgggttttagccaggaagatgttcatccattccagtttagagtctaaactaataacatgggtaaaccaagtagcagagagatttgcccaatatcacacaggtagctcatggcggagcagggttagaagtcacataagctgatgcccagactcatgagctttctctacaccataatggaccaaatgaaattgctgataccccccaaactgccaaagtatgtggcttcaacttactttccaatacatgctaatgttccaaaccaggctatctgggaggaacacgaggggaatcatgttctcccattgtccttcgaatgtttcagtaccgtgaataaatacacacaggaagacaactctgggctctcacgtgcagaagctaactcacacctcactcacacatgctcgacagcactgcaaaacaagcccatcactatttccagagcggccatagctccccatgcagcataaacatacctgccatctagatctgcagccctgctctgtatctagttgacatgttgtgataatctagaaaggggtgtcttcagcttatcttccaagtgtcacaatcatctttcaccttattccacacctcgttagtgcacaaggttgttataggacaagcgaaacgaagaggcaaccttgcctctctggagtcccagagtctccccatcaaactgacttaagcaatgagcaaaatagtattgagtaagccacccatttgtgctttagtcacttgctaaaaagagcaccaaccactgaaaacaatatttggcccctattcttaggaaatacacattgaagtacttaggtataaaaggacatagtgtttataacttaccttcaaatagttcacagaaaaaattaagtatatacacatacacatggggcagggggcaggaggaaggggacggatacagcaaatggggtaaaatgttaataggaaaatctggatacagggcataagggtgttctttgtattgattttattttttgcagcttttaagatggagtctcgctctgtcacccaggctgcagtgcagtggcgctatctcagctcactgcagcctctgtctcccaggttcaagcgactctcctgcttcagcctcccaagtagctgggattacaggcacccaccaccacgcatggctaaattttatattttgaatagagatggggtttcaccatgtttgtctagctggtcttgaactcctgacctcaaatgatccacccgccttggcctcccaaagtgctgggattataggcctgagccactgcacccagcctaatttctgcaacttttacaaatttgaatttccaaagaaaatgtgaaaaatatatacacctcaaaaaacaaactaaaacaaaacaataaaaatatttgctgacagagattaggctgataaaggagaagaaaaggaaggagattattcagacaggacagaggtttccagggctggagggctgggggtagacagtgtcaacacagaaaactgatgataacaaagataaaaggggacaaatagacagcatcactacagtatctctactacattcttctctctgggtattgtcaatcagggcctgccactgggcaatggcaagtcaaatacaatctttacacattttaatcttgctttcagtagactccattcatcttccaaagggtaacctagttggtagtggaatcatgtgccttgtgacatcaactgtgctcagaatgtttatcctctggacaaaccagccagcctctccagagcaggcgtgtgatctctgtacccccgcagtggtcagaatatggagaacttctcactcctcagcatctctggacctccaatctcttcctccgccctgagtgcttttcccgacattatgttctctcgtgccaccagcctgccaggtaaactttggtgccactagggccacaaagatg

SEQ ID NO: 3129 - DNA, 2300 bp, Homo sapien
aagggagtgcatggtaggctatctttacattacttaagaattcagtgcgttatagactatgttatgaagggtagagagcaaaaaatacaggaaatccaaaatggtgcataatccagagttctgtttattacaaagagtgttttaaaaataataatagcttataatttactaatcaccttgacaggtgtttttggtgcttgcctttttaaaaacgagtatgtctgctctgaaaagtcactttaaaccaataaggagaccaccagggaaatgtctgatttgggaagtggtggcaatttgccttccccgggcatttcgtacagtttcattgttgtctatgtactttctggtttggggggaaatagttaaatggtttggtttccaaatcttctttgctagtttgcggatgacgtgattaaagaaaataagaaggatgtgggacctgacaggcaaattgtgccaaagtggatgatgtggcaagatacacacttaggagaatcatcaggagttgatgaccctgcttgctgtggagcgggctggaagcttctgctggtgtggtgggtctatctggagcccagccagcttgggccctgtgtcccagggatgctgtcatgctgttccctggcaggtcctcaccctgcagtggtgcaggccacagggctcatccgcagagagtagtctccacttcacttcccacaggttttcctccctgccacccaaaggcccttagaatatggcatacctaggtagttggcctagaaaggatagcaccactgaaaccacaagaaaggttttcactggcccgggatacagcagtgcagggcagaaagaactgctttacacaaaaattcagcagaagaaaaagtacaccctaaccccagttactcttagaagaggctcagtgaaaatagacacttagcagaggtgttcacaaggaaaggagcctagtcatcaaatgatcgagcgatctcctttcctcagactgacaacatatctggggtagttggtgtagacagaaaccttgacccagattccaaggcctcagagtgggtctggctgcctgatgactgagctggatttccagatagggagaggatggccaagtgtgagtgtgtggacagcatggcttagagcctggagctccagtcatttcaataacaaacctttaagctaccaccttggccaccacaattttctatctacaaaatgggttttggcgattcaagatctgtattgagcacagctaggtaccaaacccaggctaggtgttgaaaatacaaagatgaatgaggcatgctctctgccttgcaaatctttacaacctaatgggtttatacccagctctttgagttaatttttcaagccaaagaggatccctacaagaaggaccatgtaccaggcatatataggcagctgttccatgatctatagcagggcaaagttgtggacagagccctgagctgtgggttagaaggcctgagttctagctccagccctgctagtatttagctgtgtgacctcaggcacggcactgcattacgcggagtcctgcaggcttcatctgtaggtagatatccttccatgtaccacctccctaggtggttgtaaggattaagtaagctgatgttcattgggatcctcgtgcttcactggcaccgagttcctatccatttggtacgaactgattctgaaccaccacttagcacctctgcaagagctggcccactcgctcaaggcccacctctgtagacctgaggagctgctgccccattttttgtggagaatatgtgctatactcatggccttcagtggggagcttctaacaccaagcctcatccatgccatccctccaccagcttccaacccactgagagctcagcacgtgcttacggtgatgtaaaaatgtcatgtttcattgcttcatcctcattttttctttactccaaagggcgtggtgactccaaggtaaaggggccaagcccatgagtcaaggaggcaggtttacaggaacaactttatttttttatggctagcattagtcactgattaacttgggtggggcagagctagaatttctagttcctgtcccatcaagaaaactacactggaaagttcaagagtgtctttgctggctctttcttgaatatttccaaagccttggaagttacaggttttgggtgtgggataaggaaaaactgaatgatagagcacaggtaccgctcccctttcctcatcatgcctctctgtcgcctctttgttcatagttgaccacggcatgtttgagaatttgaacacagccctca

SEQ ID NO: 3130 - DNA, 2300 bp, Homo sapien
agtgaggagtttgagaccagcctgggccacatggtgaaaccctgtctctactaaaaatacaaaaattagctagtcatggtggcacgtgcctgtagtcccagctacttgggaggctgatgtgggagaattgcttgaaccagggaggcagaggttgcagtaagccgagatcacaccactgcactccagactgggtaacagagtgagattctgtctcaaaacaaaacaaaacaaaaaaccaacaactctacagcaagttttactgagagaagtctcacctctatgcatgtttccgctctcctcttagaggcagaagtttttagttttaattagttttagttttgttcttccagtgggtgtttcgtttgttttttaaatatgagcaaatattataaatgtatatatttatttatatcccccatactctatatactattgtgcatcttgctgctttcacctaaaaatacatcctgaagattattgcatatcagcatatagagatcttcctcaatcccattttattattctatagtaatattccattgtatacatgaatcacagtttattcacctgtccctctattcacaagtctttgagttgtttgtaatctttttctattaaaaaatactaccttattcacaagtcattttctaattctgcctgtgtagttttgtgacagatttctagaactgagattgttctatcagatggtgaaggcatacataaatttgcaagatattgccaaaccatcttttactatagttgtaactattttttattccaactaatgatatacaagatattctattttctttcaccatgaccaacccaataagctttcaaacttttgattttcacccatatgataggtgagagttgttatctcagcatgcaggtaatttgcatttcttttattgtgagggttggattttgaaacagcaaaaagggcaaggaagcccctgtgatgaccaagagcctgagcatgctttcagttatttcctctcttatgtcaaaaagcatctttacaccacgattgtgaatttattcacaagaaataccaaatttcttctttcattattaacaactctgtcttcaactgccatagtttccagagaattgaataatgaattgtccaaaaccacagaagaaaagttgctatttgagagcatatctgtctgataacgagttccctgatcagtgaaactgcactatgccaaatgcagagtgggaattccaaggaagaacaaagatctgttacaaggaagttccatagaagatacacccaactgtgagtaaacagctggtaagcaaagtagcaaggtgaaataaacatctaggttaagaagaagttaagatctccaggtactacggagatgaagaaaacaaaaaaaagaagaagttaagagaagtaaagatgaatcgttagcacatagttctattttcatagataacatttttgagatatatatagtgattttctgtagatatatgagtatacccagatatccctcccacctacaccagccctttctccaaaaggaacaatgcttgagggtgttcaaatggccttttttcaccagtggctgggagccttagccatggaatgggctgtcctcatccacagtgtcccactgttttttattgccattaatgtcttccatttttagtgtcatttgatccacggaaatcccaccctttcaattttcccattgtatctgagcatatcaattctctcagcatccaaatggtttttgagcacccagtctaagctaagcatagcccaatcctaggcaacttcagcagaaaatgggtaccattacagcaaaagcagcggtgtgcttcctggaaaggataccagtagccaaagaagttgatgatagtccatggtaatatacaaggctgcaacacagttccaggaagcttgacttcagcattgcctccctagccatgagcatcactgattccattgtgtgtttaaatgtgctttacctacttctgtgagtcacatgtgggccatttagagggtgaaaagtgttggtcattttatcaccccgccctcctcatttcctgaatcttgtgaagctggctgagtcccacagaccgctagaggaagaggtagctccacaggaggtacagctgcttacacatctctcctcagagctgtcccttgacttgggggtgaatttcaggccaacagggcttcctgggatacaagagcgttctccatggatctgccttactaccatggacgtctgaccaagcaagactgtgagaccttgctgctcaaggaaggggtggatggc

SEQ ID NO: 3131 - DNA, 2300 bp, Homo sapien
aagtaagtcacgttatatggggttaaacaaaacccatcttgtggccgggtgcagtggctcatgcctgtaatcctaacactttgggaggccaaggtaggaggattacctgaggtcaggagttcgaggccagcctgaccaacatggcaaaaccccgtctctactaaaaatacaaaatttaaccgggcatggtggcgcatgcctataatcccagctactcgggaggctgaggtgggagaattccttgaacccaggaggcagaggttgcagtgagctgagatcacgccactgcactccagcctgggtgatagagtgagactttgtctcaaacaaacaaaccaaccaaccaacctatcttgttactggaaagtggtctcaatccagaccccaggagagggttcttggacctcacgcaagaaagaattcagaatgagtccataaagcaagtttattaggaagtaaaagggataaaagaatggctactccataggcagagcaacagcttaggctgctcgacttatagttattcatatttatagttatttcttgattatatgctaaacaaggggtggattattcatgagttttccaggaaaggagtgggcaattcctggaactgagggttcctcctctttttagaccatgtagggtaacttccaggacgttgccataccatttgtaaattgtaatggtgctggtaagagtttcctttagcatgctaatgtattataattagcatctaatgagtagtaaggacgaccagaggtcaccttcaccaccattttggttttggtgggttttggctggcttctttactgcaatctgttttatcagcaaggtctttgtgacctgtatcttgtgttgacctcctatctcatcctgtgacttagaatacctaacttcctggaaatgcagcccagtagatctgagccttattttacccagctcctattcaagatggagttgctctggtttgaacacctctgacaatctgatgagattttatggtttgtaggctgtgactcctcacatcccttagataagaatttggggccaggtgcagtggctcacgcttgtaatcccagcactttgggaaggtgaggcaggcggatcacaagggcaggagttcgagaccagcctgaccaacatggagaaacttcatctctactaaaaatacaaaattagctggcatggtggcaaattcctgtaattccagctacttgggaggctgaggcaggagaatcgctggaccccaggaggaggaggttgcggtgggcggagatgccgagatcatgccattgcaccccagcctgggcaacaagagcgaaactccgtcttaccaaaaaaaaaaaaaaaaaaaaaaaaaattgagcaagagagaagacaggtcagagtttagtcctcaacctctcctcaaactttccacttagcactacatgaaccatctcatctggctgggaacttacacaaaacctgaagaaaagaagatagggcctattgtctgatactaagtttttgccacacaatcagaatagatcttgaaatagaaaaggttgaatgactgaaaagtaaagaaggctacatttcttacacactcgagtttgtggattgagatgcctatttgctacatttgttactcaataaacgtttgctgaatgaataaaataattgaataaataaatgaaaaataaaaatttggaacagatccgtgtttgcccagggtgaatgctttttgatgagggagccataggcaaggtggactatgttgataaaaagagttaaactctgtaaaatatttgaagagatttattctgagccaactatgagtgaccatggtctgtgacacagccctcaggagatcctgagaacatgtacccaaggtggttggggtgcagcttggttttatacattttgggagacatgagacttcaatcaaatatatttaagaaatacattgatttggcccagaaaggtgggaaaactcgaagcgggaattggtggggggagaaatgggtccttccaggttataggtagatttaaaatttttctaattggcaattggttgaaagagttatcaatagaaaggaatgtctgggttgtcataagaacttgtggagaccaaagttttgtcatgcagatgaagcctccaggtaccaggcttccaagaaaatagattgtaaatgtttcttaccagaccgaaggtctgtgttgaccttaaccggagaggtatgaggctagtcggacccccacttcccgtcatggactgaaccagaattttagagtgccctggcctgggagaaagt

SEQ ID NO: 3132 - DNA, 2300 bp, Homo sapien
ccatttgtaaattgtaatggtgctggtaagagtttcctttagcatgctaatgtattataattagcatctaatgagtagtaaggacgaccagaggtcaccttcaccaccattttggttttggtgggttttggctggcttctttactgcaatctgttttatcagcaaggtctttgtgacctgtatcttgtgttgacctcctatctcatcctgtgacttagaatacctaacttcctggaaatgcagcccagtagatctgagccttattttacccagctcctattcaagatggagttgctctggtttgaacacctctgacaatctgatgagattttatggtttgtaggctgtgactcctcacatcccttagataagaatttggggccaggtgcagtggctcacgcttgtaatcccagcactttgggaaggtgaggcaggcggatcacaagggcaggagttcgagaccagcctgaccaacatggagaaacttcatctctactaaaaatacaaaattagctggcatggtggcaaattcctgtaattccagctacttgggaggctgaggcaggagaatcgctggaccccaggaggaggaggttgcggtgggcggagatgccgagatcatgccattgcaccccagcctgggcaacaagagcgaaactccgtcttaccaaaaaaaaaaaaaaaaaaaaaaaaaattgagcaagagagaagacaggtcagagtttagtcctcaacctctcctcaaactttccacttagcactacatgaaccatctcatctggctgggaacttacacaaaacctgaagaaaagaagatagggcctattgtctgatactaagtttttgccacacaatcagaatagatcttgaaatagaaaaggttgaatgactgaaaagtaaagaaggctacatttcttacacactcgagtttgtggattgagatgcctatttgctacatttgttactcaataaacgtttgctgaatgaataaaataattgaataaataaatgaaaaataaaaatttggaacagatccgtgtttgcccagggtgaatgctttttgatgagggagccataggcaaggtggactatgttgataaaaagagttaaactctgtaaaatatttgaagagatttattctgagccaactatgagtgaccatggtctgtgacacagccctcaggagatcctgagaacatgtacccaaggtggttggggtgcagcttggttttatacattttgggagacatgagacttcaatcaaatatatttaagaaatacattgatttggcccagaaaggtgggaaaactcgaagcgggaattggtggggggagaaatgggtccttccaggttataggtagatttaaaatttttctaattggcaattggttgaaagagttatcaatagaaaggaatgtctgggttgtcataagaacttgtggagaccaaagttttgtcatgcagatgaagcctccaggtaccaggcttccaagaaaatagattgtaaatgtttcttaccagaccgaaggtctgtgttgaccttaaccggagaggtatgaggctagtcggacccccacttcccgtcatggactgaaccagaattttagagtgccctggcctgggagaaagtccattccgatggttggcgacacggggggcttagaattgtattttcggtttacatctaaaagaagaacaaaggtctaggcttccagaatcatgggttctggtgaccgtggacctggaggtgatggtaaactctctttttgttcctggggtgttttccttgggatcctttctatgagaaatgtaggccgggttttatttttcgggttcctagtggtgaggtaaggtgaggtgcctcaacaagaaaaaggaccagttttggcttcaggtctatgtgaaagcggttaacactgggcctggaatggtagatactcaataattaaggttacttcttattctcggttcttttttccaaacctagcgcgtctaatctcttctaggccccgccccttctgagccccccctccttcggcctgtatgataggctcttcctccatttccggcttctgggactcgggtgcaccacggcttccggtgtcatggctgcttgaagtcccgggagtcggtgaggcggctgcaggtccctccctgcggagccgctggtccggctggcggagatgtgaccgcgggcccggccggcctgcctcaggcgtcgcgtcagctcccgtgtccgtgcccttaacccacaccgatggcgggatccggctgcgcctggggcgcggagccgccgcgt

SEQ ID NO: 3133 - DNA, 2300 bp, Homo sapien
ggagccgctggtccggctggcggagatgtgaccgcgggcccggccggcctgcctcaggcgtcgcgtcagctcccgtgtccgtgcccttaacccacaccgatggcgggatccggctgcgcctggggcgcggagccgccgcgttttctggaggccttcgggcggctgtggcaggtacagagccgtctgggtagcggctcctccgcctcggtgtatcgggttcgctgctgcggcaaccctggctcgccccccggcgccctcaagcagttcttgccgccaggaaccaccggggctgcggcctctgccgccgagtatggtttccgcaaagagagggcggcgctggaacagttgcagggtcacagaaacatcggtaattgccgctgtctcctttctcttcttgcccaggtcacagtccgagcacactcttcctctcgctgtctggcgttccatcttcctccccttctgcgggagaagcgggtttagccctctttatcaccccatccaggcccctttcccctttcactttattactgtctgcggtatagtggagttggtggtctgctttgccaggtgtcacatagatgctcagtaaattgtcttgcttcgagtctcatcggagaatgccgcattcattagcatacagaaatatcttttctagtgagaggaggcatgtctttgctagattgtcgtgtcttgtgtggaaatttttgaatctttgcataccagtagaaaatgggaactacgtctgggccttgtgacatcaatgctagtaactcgtatagctcacctattatatctttagtacggatttggaagaaatgatgcactattccatgggagcctttatagaagtgtgaaatttaggaacactatacctttgctctcttgagactgtttcaagaatcagatactcagaatgtaagatatgtaatgatcactgatgattgatctgtgaaaaggtttcattttcattacacgacagaaagcttatcattagttatagctttggttattaaagaaaagtcttatttcctagcaagtatgatgcatagttaatttgaagagtgagtttttttataatatcattttggagaagaattaacactagtgctacatttttttagtttactaaatggtctgttactataaccttggtattgaaaagggaaaaattttgcaagcctagggacttgcctgatctctgcaagattaaaatttcatccgaaaagtcttaatctctttgttagtatttagattatagagagctgtttatttttgttttagtttttttttttgagacaagttcttactctgtcacccaggctggagtacaatggcgagatcacagttcactccagcctccaattcctcctaaagccatgctcctacctcagcctcccaggtagctgggactacaggcacgtagcaccaagcctggctaattttttgtagagaagaggtccccttttgttacccaggctggtctccaaactcctgggctcaagcagtcctcctgcctcggtctctcagaatgctgggatcacgggcatgagccaccgtggcagacctagactgctgttttggatgaagaagcaatgtttagtttggtttttgcgcattgtgacattccttttaaaagagttacttaatatttgggtttttacttttaaaaatttctttttttttaaaggacctcatgatgcaacagtaagttttatttatttatatttaggttttttacttttaatcatttttgcttggcactccaagttcgtgttcatcaccaatgagtacttggtgaaacacaaattgaataattgtaccatatttagtatctgtgaatggtaatcagctgttgtaggctgtctcatcttatttttattaaaataacccaattgccaaaagatcttattcatgggaaaaataaattacagtggaagcttgctcatcaaagttatccttatctagactatctcaaatttgtactgcagttacctactttagtagtgacttactctgagtctgatttttaaagtattataatttctttttctagtgactttgtatggagtgtttacaatccacttttctccaaatgtgccatcacgctgtctgttgcttgaactcctggatgtcagtgtttcggaattgctcttatattccagtcaccagggttgttccatgtggatgatacagcattgtgcccgagatgttttggaggcccttgcttttcttcatcatgagggctatgtccatgcggacctcaaaccacgtaacatattgtggagtgcagagaatgaatg

SEQ ID NO: 3134 - DNA, 2300 bp, Homo sapien
tggcactggatgctctcagtaatgttaagtaattgtcaagcagcagttacctactgtgttcttaacactgagttgtgaattttttcttaaagcagtactgtagtactgaatattcctttaaaggaactgcagtgagcctatctaagtttttttaaattaaggcttttaaaatagaaagctgatgcttgatcttgcacaatttttatgtctagtatgtatgcttgagtgaatgtgcgagtatgaatgattagagaaaatttgagtcagtgtactttatagtgtgaatcctgtgagctaatacagtctatacttatttcttccctacctgtttcacatccgtaagatttaagatatacattttttgagaggtagtctgtctgatacaatgtaaatgacaaaacataattcctgagaggcccagaacaaactggagtctagcctggagttaaattgagacttctaaaatgattggaacaaagactaagttgtgccagatgtaaatcaacccctcttttagtttactttagactttgtattagctcatcttttttgtagtaaatctatagttttaaggtttctcaagatgtggctctacctactatgatgaaaattgaagtgggtcaaaagaattagatgtacagtgaagggaaaagaaaaaaaatgggcgaagagagggtggaaaataaaaggattcttttttcttcctttctgtttctcgtatccctgctccctttttcctccccttccctcattctttgcctctatccttagctgaagacaaactagaggagcagcatcccaggtagtttggcttttgactgcaaggtagttaagaaaggtgtagatataatgaggtagaagtagaaaggaagaaaaactcaaagaattcttaaaaggattcatagcaacataatgtgtccctgagtagaggatgctgctatgcgtgagttcatggacacaagttgattacatggtttttagaattataattatggattcttcttatttcatggtaggttgtctttaaagatataaaaattaggatgcctttatgaagcactgattataccaaaaaaaaaagacaagttatatacaggttattaatttttttatttatttattttttcctaaggaaaaagtcttctatctttccctgctggaagcctcctcatatttccttatgtttgccatgcaggttgctgagagtccagttagaatttgcattttacagaatgaaatactttaccccattcaaacaattattgtttgacattttagttatttataattgtcaaattcaggactctcctttaatgtttattatgaaaccaaatttggcataaggaggctgatttatgaattaccaaagggtcttgtggcatgttccccaatacatgcccttagaaggaagaactattattttttattttggccctttcaggagttgattataaattggtttgttttcaagtcagaattcaagtgggcagaacccgtattgtgaagacctaaactttcctaaatgttcatatgggtagcagattttgtggtgattagaaacatcaggtccttaaatacgatgaacatgggatacaaaggaattctttataagggcaagtatcctaagttagcacatttacttttctctcccctccgcccccaaaagaaaaatccttacaaataaactgcaggtaggcttctaagcctagtcctgcagtatgctgctaacatcttgatgccaatcttcacagcattctttgattgtcatcttattgctgatacattcatacatatatttagtgcttgacactgtagaattttgttacagaagatggttactagattttaagggagctgagggaataattgatgagccttgaattaaccatgcatttaattagattttttgttgttgttgttgttgttttgagatgatgtcttgctctgttgcccaggctggagtgcagtggctcaatctcggctcactgcaacctctgcctcgcaggtttgagcgattctcctgtctcagcctccccagtagctgggtttacaggcgcttgccaccacacctggctagatgttttatattaaagccagagaattgaaaaagaaatgcctcctgtgattgaaattattttatagctcttagcccgttctaccaaagatcacattagcagattacccctccctcctgtgatattatctttcttaaacctgaaccaaatatcaaaagatacaagtttcatgattaggatgaaatatatacatagggattttggtttattgaagttattgaaaga

SEQ ID NO: 3135 - DNA, 2300 bp, Homo sapien
attgttgactctcaagggctttccaggtattctctcttgtcatttgcaagtcgaagtagttttatgactttttaaaattcttaaaaaataattttttaattcttatatattttttctaatttataagcctcttaggatttctgttgtctaacttcattagctgatacctttggtgtaatgtcaaaaaatcataggtagtgtgaacatcgttgccttgttttcttcaatcagctcttaaaagaccatgtatataaaaagtatttcgaaggacagaaataactctagtgttagacatttctggacatttagctggcaagatgagattatggcccctcttatgcctagtaaccagaataacaaacaaatgaaacttcagcaaaaaagggtaaaagtacaaatgtgattttatagtagttcattaaaaacattgagctggacctcagttctatcttttttctttaaaggattgctaactaataattttgctctttactcagtcattcatctatgacttatagaatgcctataatattccagacattatcttaggttctttctcattttttactatacccatgtgaaataggtattagcttcatttcataaaaggacattggagtttggagtggttaaatgacttacccaaagtcacacagttagtaagcgtagactgattttgaatctgggtctcctagtttgaattaataagtgctcaataataaataataactaaaggttatttagtgtttactgttttacatacttcatttatatcgattggtttaatacaaccaccaaatggcattttcatctttattgtctgttttttatagatgagaaaactgatagcacaagtagcttgccaaagatcacaagcaataaagctgaaattgtcttcagatcccatgattaagaaaccaatcactacactataaaccaatcactacactattcttctttcaaagaaacgaaggaagttctaggatcatgagagatggagagtattcaatctcctgaatgtaaatctaccagcattacttaccaagtttaagtttttctgttgttacttgaggcagtgggtgattatgcaattggtaaagggaatgaaaaggcctttgcacccaagaaagtagaagaaaggcgcctgaatctctttatgataggtggtatgttaaatctaggtattttcgtatttcaacatattccacttcttgcaaaagctgcaaaatgcaacacaactttaaatgtaaacatagcttccaagggcacagtgctgaacatataataacctgtgtgtgcacacccacactaggttatgtaacaggactgtaaacactggtcctggaatggcctgggaggtcatctaggtcctccaccatctttctgcagagtactgaggcctagcgacgttaagtctgcaaactcacaaagatgaccccgggcttatactaccttaggttacctactacctttgcttgcatttcctctctcctttcctgtctgtttgtgcaaaagaaaaaaggcctggcttcgccttcttgggagccaaaacacaaccaaacagagagcgagtttggagcccggccaggcatcttgtgaactgcacacaaaataactagcccaaggtcagagagcgcgccaggcccgccctgaaagtttctccgcaggaaaatccaccgccctttcccaaccacccgcgtgggtggctcggaaatccgccaccctggggacacagctccctgcccatctctgtggcccgcttgtgccccgtgccgctgggccgactaagagcctcgggctcgcacctcccagtacaacctagggacgtcaggggtcctgggacccacgagccgctctctgccggccggctcctggcccctcctagcagacccaaccgacatccttcaccctcagttagtgcgcaggagggaccgggacgccagccgactgcgctccagaactattcccattgggccagagaatgagtgacgcactaggccccgccccggcccggtgggttactcctttcatgcccggcccccatccctagccccgccccggcgccccgggccgcggccgcctccgcgtccgcgtcgtcgtctgtgctcccggcgctgacgtgtctgggcggtcggcttccactccttcaggcgtcggcagccactagtcgtggcgagaggggcggggtggccggggctggcgctccacttggcccccgctcccggcccgccccgccgccgcggccccccggatgagggtatatattcggagcgagcgcgggacgccgatgagtggccgcg

SEQ ID NO: 3136 - DNA, 2300 bp, Homo sapien
ttgggacttttatcccttggtcctttctgtgttcagtgagttcttccccagaagtgtcctggtctatatacaaatagactcttgactgcctagtccgcctcagacaaacccaggtgtgtctgggttttgcagtctacatcactggctcagtcctggctcaattaagactacaacttgagttctaattatacatacacagagaaaaaacaatctcacctatggagtagaaccaccttaaaatgaaaaaggaaaacacatacctatatgtacaggccctgtcctttatcaggctcagtctggttttatgaagttgttactgttttccacatttgacctatagtatcaccaaatctgtgaaatcacagattgtatttttggtacattctttatagtaatgccaaagaggtgaactactacaggcatggacatttgaggaggatttctagttgtctctggcaagcacccagtaaagtgcctgataagagcccaacacatatttattgagttgagctgcatgtctggcctgagtcaccctcaggcctgacttcagatgctgtaagttatttgaagagtcttcttaataagttgatctctgcagtgtcttttctcttcataaactaaccctagttctagttttttctctaaggtcttgcttgctgcctttaatcatttccatggctgccctctgaaccattcccatgttctccgtgtccttttctgtaacagctgtgaggcacagatgttaacggctgctttctgaccctcagactggtgctgagcttatgagacttttagggacttaacactgactcaacactagctctcagtttcatggccaccctcattgtgtgtgtgtgtgtgtgtgtgtgtgtgtgtgtgtgtgtgtgtgcgcttttccattccccttatgaaacatctcctgcccctaacttactatgggaacgttcctccatgatctctttccatcctccctttcctgtttgctcacttcttttcttgctcatcttggagactgtgcaatcccagattaactacaaacagagaagagctggtgatagctccagagctcagagaaaggaggtctctttacaagaagtctggctctcaaaggtaagctcggtcttcttgacctgccttttgccatctacctctctctttggatctcctgcccctgggtccctgcttgccctgcattctccatactcacggagaatcaggacctccagaacagcccagcgtgggcttggtcaggaatgatccaggctctgaagggttaaggctggagcctggatggatggagagggttattagttatcgtttggagagtggagtgaaggctcctcccctgttgcctacccgcccctttcacatgatctctgactatagctgtggaagcggggagaagataaaggagggaaaaaaaagttcacaaaataatttagaaagtccttataaatgcttgtgttttcatttagcagcatgaatccaggacagcaacagaccctcagaggcagcagccaactgggaattgagtggaaaaaaataggaatcctggattctggcagtttccagttgttttcttggtggggggagccgtggtgggaagggattaaatcaaatctttcgggggagagctcagctctaggctttcatggtcaaaatactaaaggtcagctccgcgtgtgtgccccaactgtcctggaagcttcaattggaaaactccaaactttaagttttgcttatagcttcagctcaagtaagaaaaatgaggtgtggggtaggcggcgggggggtggggatcacaggaaggggatcaagtcttagatggaggggaaggaagtggagatggatatgggtgggaataaggcagaagggagcggtgtctttaagtctgtcctatggttatacatattttttcttctatgaatgggttttgctgtaaattatagctttgcccatagtcccttgggtcaaaagaaatagtctccaaacagaaaacagctctgattggtgactttccttcttccctccccaacccccttcctaattgaaaccaaatgtgcaatatattggatgctgggatccctggcgctttcccaggaatcctcagaatgtgaggtttctctcaaaggcatcttgcatcagcctgtggatgtatgcctaccaccgggctccttcaccagcaaagtggaaaaagaagcgtttcacaacaaattcttctttttgggttggggaaacgcagtggattatagctctgttttcttctttccaaaactgtgcacccctggatgaaagtaagt

SEQ ID NO: 3137 - DNA, 2300 bp, Homo sapien
tccccagagaaacagaaccaagctgagatcatgagaatgaaagaatgggctgtttctaaatactccatgcacatcttggcattttcagaattccttgcctgtggtgggggaaggggtatagctgcagattatgaaatttaacagggtgttgttgtgcacaggttattctgatttcccattcttttctttacttaaatagggcaagttcactacagcaagtgatgtgtgggcctttggggttactttgtgggagactttcaccttttgtcaagaacagccctattcccagctgtcagatgaacaggttattgagaatactggagagttcttccgagaccaagggaggcaggtaagaactgttggggatgaatggatgtggacctgtgtaccttgaaggatggagaatggcaagtcctgccttagcaggagtgggccgagatggaagacagactatccaggtgttagtctttgtcactaactatccagatgatgtgaaagaccagtatcctccccaggcatccatacactttgctttatctatgtgtcaactcattgactcttggagagcataaagggtcatgtcaggtttctccccagctcaaaggtagcaggaaacaaagtcctatctctcatgatttatctatttcttgatctagaccatgtggtttttcttctgggtcaaaaaataaaagtgtaaaagggatgtattagcattcattaaaaatatagcttagtataagaaatggggttggttttgactatctagcaatgtttctagacttggatgtctgaaaatgggcagatatatcctaaacttgttgctcttggaaggcatctctgggcccagtattgtgacatctcaggactcagggaaagatgagttcccaagctccccaggagtctcaattcctagccaagatactccaagcttttttttgggtggcttagatttaaaattcctgtgagatctggaatttaaagcttgccagtaactacagcaccgcacttccccaaaggggcctggcaacagcatacccttggattatggtatctttaccaggaaaaggataatagctgggggaaggatcttgcagacaataaaaagtggatcttctgtggcttgaacagatccaagcaagccaaagatagataaggtattgacaagagataatacattatgcatattaaaaataagagaggggtctgagaatttaattgtatcttgatactctgtaaatattttggcagcagggagtctaaattagctatcttggttatgaggcaatttgccttcttactatagtcaaaggaaaatttactcctgagtacatgagataagtgagtgggccaaagaaaaatgttgttttctgcctctgccatgatcggctcagccaagatgaacttcaatatgggttgcccataaatggaagatttggtctctttttggttgtttcatcttttgcatgaaggtagggaccacataatggcccatcaaaaaattctgctgcagacaactgcagaagacaaatggaacagcttagaaaagggctgatatgattcagaactttcacgagtaggaaaaatggacactacacccatttcagttatcaagttcaagaaagtgggcagggggcaaatcaaaccatgatgcaaagatacttccctttcccccgtctttgtaatattctctctctctctctcttttgttttcctttatttttgttcccaaagacttacctccctcaaccagccatttgtcctgactctgtgtataagctgatgctcagctgctggagaagagatacgaagaaccgtccctcattccaagaaatccaccttctgctccttcaacaaggcgacgagtgatgctgtcagtgcctggccatgttcctacggctcaggtcctccctacaagacctaccactcacccatgcctatgccactccatctggacatttaatgaaactgagagacagaggcttgtttgctttgccctcttttcctggtcacccccactccctacccctgactcatatacacttttttttttttttacattaaagaactaaaaaaggaaaaaaaaaagcctagggcagatacaatctagtaaaagaaaatctttgatataccaaagtgttggataacaaaggctagaaaattcagataatttataaaggttaactatacttgtgcttataaatgtgcagattctacaatatttttccatgtcattctaaaagaatcttcagaaagaaaaacttgaagaatactaatgtcttgggaaacatgagattaagttt

SEQ ID NO: 3138 - DNA, 2300 bp, Homo sapien
gaaggagggccttgagtgtgagtcgtccaggtttttggccatttggaacgaaaagttggacaaaatgcacaaagtaacaaaggaatgaagctgcgaaagcaaaagcagggatttattaaactgagaaagcactccacagggtgggagtgggcctgagcaagtggctcaagggcccagttacaaagttttctgggttttaagtagttcttttgaggtccctatgggctaccccttatctggatgaaggatttggtttatggctaagtaaaggctgaggtgaatttgtgccctatgcagatgatggcatggcccatgcttagtgcttggcccacagccaatccaaggcactttccctttccatctgagacatggtggaagtgtggcaggccaggtctcactaacaactgtttcagtactaagtggttaaatattaaaagccagtgcccttatacaaaggctgggatgtaacaaaagcccatcaagaattttgcctaggcctttcctgggcctcttaaagcatacaaaataaagaaagaattcttaaccggacccctttaggattaaacaagttttattgtggtctgaagaaactccccaggcctccacaaacaagtttattggggggtctaagagaactcctcaaacctccaccacttagcaggagagaatacaagggcaatcaccccagcacctggacccatttaggttaagtaaatttactgaggctccagaggaaggttttcaggactcagaccttagttacagattaaaagaagttaatcacttatgtctttagataaatgcacacttacacatagacagttcgcttagaaggcatataagctctgaaaaactgtaattttgagttggtctggtgataatttccaggccttctccctgcaaccggttacagaaataaaaactctcttcctccccagctcatctgcatctcgttattgggccttgaaaaatagcagcccaaccctcagtttggtctgagaacagaaggttgtagggagagtagcctttgatcctttgctactggggagtggggagatggggtttttccttctggtttagctttaggaagttggtgttaattgaccctaggctctcggcccccagacccaggtgttttccttttgatccagctttgggaagccagcaccaattggtctcagattccctacttccagcccttgctgtttttccttgattgagctttaggaagtcagcacgaagtggccttaagtaccctgcctccaaaccctattctgcctcattttggcagagtacttttatatgtcttggatctaataataaaatatcggggcttgtgttttgtatgccttttgcttttctttttctagcactttatttttttgtattttctaaaagcacccatctgggatggcttggagacaaaaacaggtcctttagcacagtttgagatgcactgatacagaaggttacagcacattctcagtacttcggagaatgaagttctgagattctgattccacgccacattccaagttttgaatactggtaatttacgtctgattctacataaagttcttaataaaatcagtgctcattttctcaaataagcttctttagaggaggaggtctgggatcaaaagttgggctgtgaagtggcacaatgcctggatctgtacatccaaaaaggagtggaaaattagatgataatcgcccaactttggctcctagacccaaaccttttctctaaaatgggcactggtgcaaataccgtgaggccttcctgcaaagaagtgccaatctcaggcgccagggcacagacccagtgcgtgtcacagatcctgtcctgagtgctaggccgggtgacgcccccaccaggattaaagatcaggcgcccgctgagccctaggaagcagtgacagacacctgcgcctaggcggagcgagaagagcctggaatggctccgggctttgcgtcacgcagctccgcccctcggcctatctcacccgacgccgtctccgagggcagggaacggttggcggactgagattggagggatcagctcagactcgatgacgcaacgggaggcggggcgtggccgtactctgattggtgacgggtgaggcggcccgaaatcgtaggacttccgaaagcagcggcggtgtttgcttcactgcttggaagtgtgagtgcgcgaagatgcgaaaggtggttttgatcaccggggctagcaggtgaggcctcctttgggttggcagaggcggcagcggatcaggggtccgagagagcaggggtctgcg

SEQ ID NO: 3139 - DNA, 2300 bp, Homo sapien
caatgttatcttctagaatttttagagtttcaggccttaggtttaagtccttaatccatctagagttgatttttgtataaggtgagagatgaggatccagtttcatactcctgcatgtggttagccaattatcctagcataatttgttgaaaagggtgtccttttcccaatttgtgtttttatttgctttgtcaaagatcagttggctgtaagaatttgggtttatttctgggttctctattctgttccattggtctatgtgcccatttttataccagtaccatgctgttttggtgactatggctttacaatatagtttgaaatcaggtagtgtgatgcctccagatttgttctttttgcttagtcttgctttggctatgcaggtttttttgttgttgttctacatgaattttagaattgttttttctaattctgtgaagaatgatggtgtttctttctcacagctcttaagattctttccttcatcttaactttggataacctgatgacagtgtgcctgggcaaagatctttttgtgattaattttccaggtgttctttgtacttctaatatgtggacatctaggtctctagaaaggccaggggagttttcctcaattattctcccaaatatgttttccaagcttttaggattctcttcttcctcaagaacactgattattctgaagtttggtcatttaacataatcccagacttcttggaggctcagtttatattttcttattcttttttctttgtctttgttggattgggttaattcaaagacactgtcttcaagctctgaatttctttcttctacttgttcaattctatggctgaaactttgccgagcatttcacttttctaaaagtttgtccaaagtgccctgaattttttattgttttttctttaagctagctatttccttgaatatttcttccttcagttcttgtataattttttggatttccttgcattaggcttcgcctttctctggtccttccctgattagcttaataactaacctcctgaatttttttttcaggtaaatcagggatttcttcttggtttggatgcattgctggtgaactagtgtgatttggggggagtgctgaagagccttgttttgtcatattaccagggtcggttttctggttccttctcatttggggagtctctgtcagagggaaggtctagggttgaagcctgttgttcagattattttgtctcacggggtgttcccttgatgtagtactctcccccttttcctatggatgtaacttcctgtgggccaaactgcagtgattgttgtctctcttctgggtctagccacccagagagtctacctggctccaggctaacactgggggttgtctacagagtgtcctgtgatgtgaactgtctgtgggtctctcagccatgaataccagtgtctgttccagtggaggtggtggggtgcactggacccagtgagggttcttagctttggttgtttaatgttctatttctgtgctggttggcctcttgcctgaggtggcgccttccagaaagcatcagttgtggtagtactggggggaactggcagtgggtggggccctagaactcccaaggttataagccctttttcttctgctaccagggtaggtagggaaggaccatcaggtgggggcggggctaggcgtgtctgagctcagactctgcttgggtgggtctcgcttggctgctgtgggggatgggggtgaggttcccttgtcaatagagttgtgtacccaggattatggctgcctctgctgagtcacgcaggttgtcagggaagtgggggaaacccagcagtcacaggcctcacccagctcccacacaaaatgaagggctggtctccctcccaccatgcccccccgcaacaaccccaagtctgtttccaggtggaggctgtaacagggttgaaaacttgccccaggctaccggctgctaaagaaaagggcttggttcgtcccccacctgtggagtctgcacaccagatttgcgccctcccctgagttctgaccaggaggcgtctcgccccatccaaattgttaaaaagttcagctggacatttccctctccccatggagttctacccctgctcctctggtcaccctcctgatggatccccatggtgccaggcaggaatggcctgctaggagatgcagtgagcccccaggacctctccactgcctcctccacccctgtatttcacttggctctccaaattgactcaactccaggtaacttctcccacaaagaggtcttcagtttctccag

SEQ ID NO: 3140 - DNA, 2300 bp, Homo sapien
ataagactgttgagtgatgggatagcatggtggacaatccacataactgagtatcgagacacctgtatctggacccagctctgttagtaagaagctgtaacctcagcaagtcactttctctttctgggtctctatttcctttttggtgaaatgagagtgttaggctagattgcctttgaagtcccattttgtctttaaagtcccatctattgcagtgatttatatttaactcatgacaaatcaggcttctcttattctaagtgcaagacataaaacttttattgtggaatttcaggcatcagtaaatctttttgggtactcacttatgttcctgaaatcaatctatttgagtgatcactcttttaggtgcccaggtaaacaaagaaggccatggtctttctttgagtgaccttctttcccttttaattagtctgacctctttaatgtcagttctgactgattcatttccctggtccatcttccttggtctgagggccttcctagtttcatattgcacttcagttccttccacaccaccatcaaggatggctgtcaacattcatttgttctatgttataattcaaggaaaagttgcccagtagctaatccaataaatgccctcttatgggcggctagagactttttcctataatttaaatgcatcttctgtagattatggtccctccaccactttacatttgtctgctgtctccttgctctgctagtcatggaacgtgttggtagtgggggcagtgtgggatgttcaagggcacgtattgggtagggccacatatgggcattgctttgtgccattctttctatatttttggtattttgcatctcactggaacccaactatttttcatctcttccacctaaactatttgatgcctctgtttcttatatataaagtatagctcactgtagcctatgatcaggaacctatctgctttctaaatgaaagctgttttggtcagatctagcaattaattcccttcttccacttatagctttcctctgtaactctggtgtaggtatttggtttatggctataagatgtgaaacacctgaatgattctgtccatgcaggcatttcagttcatgatattgtatgtaaaagatactgattgtctaggtgttcagaaacacctatagggcttaatattcttacaatcagtttgaaggctggtgatacgcaaagcaaactacatatttttctgcctgctctctctctttctctctacatctctctttctttatcttttgaaatatcagtttggagacttagaattacataagacataaacccatttgatataagaattgctgtgtatatttgctcatctactccctcctttggtcctcgagctgccggtttagactttttacaggacgcaggcatgtgaaggagaaactgtcagtgctaggctgaattctgttgttaccaagatttctagaaaagtattcctcagtcaggttgattacagatatagcaaatctatttttcctagggtagtttctgtatgctgccgggcttataactgtctgtcatccagctatttctctccaccttcttgtttgcataacaaccaaggcaacttccgcaaatcactgcgtggagacgatgatcctgccagctcccttttggaaatcgtgaggatcagatcttggaccatgtataatatgatgcttctaatccaaaagaggaaaggcattgggagtcagctcctaagtaagctccagaattcctgctggtacttttccttccaggaagcaacttccttgatattttttttttacaggcatatgaataaaaactatattttgcagcattgtacactttttttccttttctagaaattctaaacctctgacattggtggagacattgagtacattttttcccatatccctacttttcagaaggattttctctgctcgttcacttaacattgctgatgcgtcagtcttttcttcctcatctctttcaggggctggagaggcagagggagacagaggagctggtactgcagagcggtcgtctgattggctggacggtcgtagctgggctataaaagagacccctacaggcttagcaggaagacgctcagaggattctgacaatatctttaccggagaagaggcaaagtacgctcaaagccgaagccacagctcctcctgccgcatttctttcctgcttgcgaattccaagctgttaaataagatgtgcaaagggcttgcaggtctgccggcttcttgcttgaggaggtaagattgctttcagccattaaccatattaa

SEQ ID NO: 3141 - DNA, 2300 bp, Homo sapien
tctccataccataacccttcttttttagttgggctacttcgaatggattagtgtccctttcaaggaaagcattgactagaatagttataaatgctttcttatttgttgctttagggaaattaattgcccaggtcttaaaaatattaattacttaagaagataattatgtggaacttatatataaacacacaggcaaacacacacaggaatacatacacatacatactacatacacatatatacacatatataatttcaaaatgcatatataagttaaatgaaatattgtgaatattatatatatacacatacatacatgtgtatacacacatacatacatgaacacacacaagtgcatgtatattttcccctctgagaagtagaaaatattactgtgaggctcttgggcctcaatctcaacacgatggtaatcatctgtttgcaagctgaaaatcttcagtccttcaaacactaactgcctctagcttaactctctttaactctatctaaccctagctttcttattctagtagctctctgtctcctaaaagcctgaaatatatagacatgtagccctaaggatttagtgtgactgaaaaggattatatatgggcacataaatatttattcttctccttaaaggttttgaaaacatgaaaatagttctgctaactctcaggttttttgacaatagcaataaatacctgtgctcagagtactagtattcataatttatcaataggtcatctgtcaatctgctattggcccagaaaccactaaggcaagacaataagtccattaataaacataaatattattctactagttgaccttgtggaatttctaggtccaagaagcaaaatgaatttagttcattcactcattcactacataactattcaccaaacatcttacatgtgtcagggcagggtactttgtttagcacaagaaaaaaagagagagaatcagaaatgaataagctagagaaagttccaaattagagactgtggggttctgtctccaaaaataaaagattaattctattgcaggtaagcagaagcttatgacaccaaaagcaagacataaggaatgttcatatacaattcaacatatattctttgtcatctactctgtgcccattaatcataatggtcttgtgagaaatattttgtaaatccttatctttgcaaagcatgtgacaaagtttcatattccattcttgttataaagatggagaaatataggtagggtattttaaattgactcatacttttagagtgaattattcaacaaatatttgttttcccgatactatatacttcctgttttgaaattatctacatgaaaaagactaattcttgcccgtttgtgagtttataacctatcatagaagtgagccaactatgaacagaacataaggcagcaagtattaagtagaataaaagatgtgcagacaaatgactttggaatttcagagggtggataaattgttctggatggtcaaggaacactaggcatttcttatttgaattatctattataggagagggagaatttcaagagagagagatatgagtaaaagatattccagccaaggggattatatgtagaaatcctatatggaacagagaactgttcaatttgcctgcagaccggccatatagttatggtgatcttgaacatcagaaatttgaacttggtactgtaagccatgggaatcagtaaggattttggattggggaaatgcacctagtgcttattgatgcactggtattagcttggaaaagagtctgcactgatcagcacctttgtcatttcttgaattaagatgtaaaaggcatggtgccagaagaggaaacggaggctgggggagataacaacccatgtcaggtcacaagagcagttgacagtataatagtttgaaccaggatgtactactcatgacttgttagcgatctttatgctgctatatctgatctttatcaatttattatgaggctaagtcaggaaatgtaatttctctattttactgatgagaatgttgaggaggtcaagccacttgttctggctcatgcaagtaagcaggacagatgggaacacaactgcaatcatgagtcttcagaacaccttatgttcacattccctcatagtgccacagaccctccttttcttgtgaactggataatcacatacctgcagcccccttcccttattgatatcaccttcaaaaattgaagaaatgtcaacattggggaagaagaacacaggtaatacaaagatgttttttgtttctgtctcta

SEQ ID NO: 3142 - DNA, 2300 bp, Homo sapien
aactcctccatttctcccatttctaacctctagcaatcactattttactttctgcctctagagcacactcttttacatactttctggctatcccatccttacaaagttttaaaaacaaataagtgttggatttaacattatttctattgaattttacattttgggttctagtccatcttttagtaaattgagataatttttattcttgaatagtccatcacatgaactcctttgggacagtcagaaacatgctttgatttttagccctcgccaagacatcaccctccattgctctacgttaaacttggggtttttcttttcatattattatctcctcaaggccccttggtatcaaataatgatttagactcttgtcccaaggagtctcttctacttgttttatattccctttattagatttaatagtcaacaacagtgtccacatgtctcaaaaatgataattaattgatttgctgatgtttactcagtcaatagatggcggaacttggacagtttgtttaactcattcagtatttacagatgtctatgtgcctgacattgtgcttagtgtttggaaggctgaggcaggaggattgcttgaagcaaagagttcaagaccagcctggacaccaaaactagaccctgtgtattcaaaaaatttaaaaactagctaggcatggtagcaagagtctttagtcccagttacttaggaggctaaggtgggaggatcgcttgtgcccaggagtttgatgatgcagtgagctataatcatgccacttcactccagtctctggtctgggtaacagagctagactctgtctcaaaaacgtgtgtgtctgtgtgtgtgtgtgtgtgtgtgtgtgtgtgtgtgtggtttagagccacagctttcaaacttttttgattatgatccatagtaagaaatatagtttacctgatgaccctgtgcacacttacatattgataattaaagtcaaaatttcagaaaacaatactttttacatccgatgcacttggatatttgtctattctatttattacattaaaaacatcaggtcataatgcactgcattgactttacaagccagtaacaggggttgatcaaccattgcctaaaaagggtatataaagagggagtcatttaaaacaactaatttcagataacagagaaaattatgagagtactgttcaattccaaattcagagcttttcttacggattattcagtgccactttttttaaagcttggactcatgcctaccttttaggcatttatttacagattaacttatcagcaccttgggccccgacaagataagacacaattcaggtaaattttggtaaatattccttgagtgataggaagcaggaaaagtttgaaggagaaggaaagacaagcctaggcaaggatggctatggtggggaggtacaaagaattacaaagcattagtcatccaagcaaagtataatcagaagaccactgacagaattaacagagttcagagataatatcattatactcaatccctactaagattttggtgtttggtctcctagatcacttttttagtaccttcacagacatatggattcataaagaatatatagtaattattcatatttgttttgatttatataaacagtaatcttgtctctcagctccagaaaaccttgcctggtgcttcctgaaggctcacaacatcccagcccggcctccatcacttacttataatgtgttttggggtcttgagggcagggagctttctctttcttctctgaattcctagcatccagctgagtgcctggcacttggtaagtattcacatacacattccttgaattccctagatttcagtttccttcactgtgaaacaaagtgggctaaacgatctccaggagcccttacagtcctaagaatctatgactttgaccgatctgaagtggtccaagacactttgcttcacaggaagctcacatcttccttgtgattggcctgagattaggagttcaaacaaccaatgacctgtgcacagtttagggcctaaccctgccctggccggttagcaagagagtgttgtgataagagcagatgaaagccttatgccacagtagtgcctgtagcagagaaaggattccctcctccacctcagggcccactgctgctgctctccagcctgcagtttcctctaaggctctggattggctggaagagcaacagagggctgggaaagagcttctatatatacctcaggaggaaaggcatcccagacagttttgaagttttcaaagactggctctgc

SEQ ID NO: 3143 - DNA, 2300 bp, Homo sapien
tgtttttatgggtgataacaaaactcttagactaatgtctaggttgagaattctgatgttccaccttctaccttacactgaccagtatcaggcaactaaaagttttaaaaagtcagatttaaccttctaattaaggtaatttgaataaacactcattttttaaataaataatttacttctaatataactcaatttatcacatcaatagtaatattaacccccaaataaacaatatttattgttgatataacaaaatggttgtcttgctcttttcttcctttgcctcatttttctctttctccatggtccattctaatcttggctttcacataaatcgcttggttttttttctagattctcaacgacaatttagacatttgttgagcacttgccacttgcaaggtattttcctagggaccatgtataaataataatagtcaaaataacagctaatacttttcaagtactcacaattttgccaggcacttaattaagcactctacaggaactaattcacttaatcttcatgataccgtataaagcagatagaactgtcaccctattttaaagatgcagaaacgagctcagttaggttaaatagctcgcctaagtccacctaggtagtaaatggtgtgatcagggatttcaatccaactccctttgaccgtagagatgtgctctcagtcactacgctatggttcccttccctgcctctaaggacatataatttggtggaaattatgcatgtatcagtaatcaatttgatttggcaagtgtcaatgagacaggtctcttttttctgctttcctcactgactctaatatttttttaaaatctattttcttaatgtccttttgggtcttactagattccgactttgagacttacatcagtaaatagacattgaaaggaaagacaaaagccctgaactaatgatatgaaatgtatttttatttagaattggtatagacttcactatcaataggtttagttcttcaggacaggacaaagcagcggaatttgtgtctacattcaatacaacctttctagcacttttttcacataattcagttcaggttccccatccaacacacgactgtcaccagatgatgctctactctgtgaccagatacaagtcctattacgtcttctcctgtcccaaacctcaataaaacttaatggctttctcccctgacaaccaggcctgccatggcttcctaacttgtgttaaatgcagtgtttccactcttgccaaaacaaacaaacaaaataccatgtaaaaaaatacagatttcagggccccttatctgaagaatgcaactcactcaggaatgtgcaaatttggggaacagttcagaggtgaaaagcactgatcgaagagggagaagctaaaatcaggagacctggtttctactttacagtcccacttactgtataacttctaacaaatcacttctctctgagtccagttttcatatcggtgaaagcgagaggatttgaccagatgaactgttatgttccttccacctcttgaagtcgtgcttatgagcacagagtcagaggatgtgtgttcatatcccagctatgctacttgtgaactactgtgcgcagagaactgcattctctgattcagagccctcacctgaggggatgatagtatctctccactatcccttttctcccctttaatgaagtctaaatgagatgatgcttataagcatctaacaaaacccggcacataatcaatgttcaacaagttattattactctggaattctataaattacctctgtacttcctcccttgtcaccctgaacttagtgaagtttccttcacttggttttgctcttcaactcggaccccgaaaacgctctaaacgctggcggaagtcacgcagagatgggctagacgctcaaccccggtctcttccccgaaaccgcggtgctcccacttcctgcagtccgaggttccgactcgacgccagctccgcgagcaatggttccgccctgcgccctgccccttccatgacaactccagtcccacctgcctggcgtctcttgagcccaaccggcatccgtcgcggttggacgtgggcttggcggaatggggcgggacttccagtaggaggcggcaagtttgaaaagtgatgacggttgacgtttgctgatttttgactttgcttgtagctgctccccgaactcgccgtcttcctgtcggcggccggcactgtaggtgagcgcgagaggacggaggaaggaagcctgcagacagacgccttctccatcccaaggcgcgggcag

SEQ ID NO: 3144 - DNA, 2300 bp, Homo sapien
tgtcacttgtgttcttgttgtataaattgattatttgaaacttaagcaaggatttgtactttctactattaaatttcatgattgcaagctttccttttagagctaggacgttttgtctatttttttttctttgaggcagggtctcagtttgtcatccaggctggagtgcagtgtggcacaatcacagctcactgcagcctcgacctcccaggctcaagctatcctcctgcctcagcctctcaagtagccaggacgacagcaggcacacactaccacgccctgttaatttgtgtgtgtgtggagatagggtctcactatgttgcccagtctggtcttgaacttctgggctcaagtgatcctcccacctcaacctcccaaagtgctgggatacaagcataagccaccttgccaggccacagagctgggatcttttggaatccagattctgatgcatcacatattagatgttcccttcagcataaatatgcattctacattttcatctaagtcacagccttaaaaactgttcataaaaggactggaccaaagaaagacttcagaaaaagtcacttttccaaaaaagctgcatctgaattagagagtattgcaatagaaagcgtaggtgtaaagtatcttcataattattatcacttgttcctctcttctctaatgtttggcactctgctatcagattaatccttataaaaacacttaacgcatcatataatatttgtatgaaaatacttcaattactcaccttacccaccacatcaaattcaaatttttctgctaggcttctaaaccctttaataattgaatgaaatttctgctccaagttagtctcctaactttcccaaacttccagtatttccttttggaacctcctccaatatccaaattctatcattctttcgaagtacaatttcagttacaatttattcattaacgagagatgaagacactttccaactacatagtttgagctcctaggtgggataaagtatataaatgacttaatatatatgcagtaatactctgtctaacgagtagcaaagattaacctataattactcatctggtttctcatttatttgcagcaccacgatgctgagcagagtgagtaggtactaaaagtactctgttaaattttacacacttcgttttgttaaaataaactatttgtggacatcacagttccacgaggcagagattaaacaaaaataaacagaaatggctcccaacttcaatgaattaagtaaaacgttccttgaacttttaaaaggaacaatgatggcgttatgcatgcgtagtgctatatatgcgctgctcttttcctttgaattttggattaggtgtgatatttttaccttttcattcatggttttggatttggttaagaaacgtttggcaacggagatgtgtaaaaagctgacaagcatctgcagccaaataaaccacattaccaccgcctttccaaaaatcacacataaatgtatgcctaacttgaacaatttcagctcaagctcgtcttcttcggtctatgctgcaccagaaaacacccgttagtttagtaggaactgagctctggttgtttctgggactaacatcaaataaaaagtaacgacgggcccgcccctcacctcccaggctctggtttcttccgcctcctcccaccgctgagcacgacgaaaacaccgccaggcccagcgtcccggcacctgcccgcgccttgggatggagaaggcgtctgtctgcaggcttccttcctccgtcctctcgcgctcacctacagtgccggccgccgacaggaagacggcgagttcggggagcagctacaagcaaagtcaaaaatcagcaaacgtcaaccgtcatcacttttcaaacttgccgcctcctactggaagtcccgccccattccgccaagcccacgtccaaccgcgacggatgccggttgggctcaagagacgccaggcaggtgggactggagttgtcatggaaggggcagggcgcagggcggaaccattgctcgcggagctggcgtcgagtcggaacctcggactgcaggaagtgggagcaccgcggtttcggggaagagaccggggttgagcgtctagcccatctctgcgtgacttccgccagcgtttagagcgttttcggggtccgagttgaagagcaaaaccaagtgaaggaaacttcactaagttcagggtgacaagggaggaagtacagaggtaatttatagaattccagagtaataataacttgttgaacattgattatgtgccgggttttgttagatg

SEQ ID NO: 3145 - DNA, 2300 bp, Homo sapien
aaagcttaattcagatcttttttaaaaaatctttgcttttatttcttcatattgctgattcttttctctatcccctttatttatttataaaggttgttttcacattcttatctactaaatctaccatgtatgttatttgtgttatgttttaatatgtttctgttgattgattgtattttcttattatggatcatgtcctttttcttggcatgtctggttatttttagcagatgccagacattgtgaattttaccttgttggttaactgagaacctgaggggattcctctacagatttccagaactctttctctttacagcttcctcatcttaatactcagttccataaatcctagttgctttggcttctgcaaactctaaactctgtcttcttgacccagcaagatgtacaagttttatttgtgttctctttctctggagtacagcctgtaaactcttcagtcatggactggtgcagtaatggaattcacctcatttgtttctcttggagattgctgtcctatattgccttttatccagcatctaaaatttgttgcttcatgtatttttgtttttctagttttttaatatgggagggtaattctggtttctgttatttcttcatgaccaaaagtggtttacctttttttttaaagttattaatacaaagataatttttacctttaagttagagcagattttctacactttgttatatcctatacagttttattttatatattatgagcagaatatatagtggaagaggatgaattttcattttcatattatgttagttcaaaggtttatttaaagagtcttgctttctattttagaagcaaaacggacaagtcggtttttaagtggcattatcaactttattcacttcagagaagcatgccgtgaaacgtatatggaatttctttggcaatatgtaagatttaaatatgttttggggttacatgccagatcagtaacattatttatgaacttataatctgttttgaaatgattgtcatagacagcaaattgctgtattgcctttagaattgaactcatttttatatttatattaacttgcagattttagttactggatagcatatctcagaatcagattttctttgaaatttggtaacactatggagaggctgagttctgtttgttttaaaatcttgtagctgaggcttgttttcctatattaggaaatgttagagaatattgatatgtttacatttttttctttgaagtttgcgtagatagtgtagcttttattaaataacggacatatttgaggtttatatttgccttttaaataatggcataattggactgtttgtggtggtgtttatcatgcttgcccagattcagtccaaggcaatctctttaacagacagaaactcattttcctttcatcaacaacttaaagaactgggggagattatgggtcatctgtgtgatttttcccatttgtcttcaataatggggtaccatactcttagaaaaacaccagagtaactccaaacacttagaccctaggcttcagctttactgagctatatagatccgtacttctttgcacaaatcatgctaaccttataactcctaaacatcatataatcttcaaagcttaccacattcatgtgccaacatacacacactctcataattttgcttggttaattactatctttaagacacacctcagacatctatcacctctatgatgtcctatcacccttcttcccagccattacccaagttgggttagatgtcactcttgttggttcccattatatgaaaaataacaagctattttgtgggtttttattcttgtatctggctcctcaaggaggcttagctacttaaggtcaagacctataagttagtcttcttgagaattctcagtaccgagctcagtgcctatgatgagaatccagcatttgtgttgagtaaagaaattcctaattcatttgtcatgaaggcctaactctatcttaaattttttatttctgatggttcaaactatagtatgagtaaacattttggacacactgattgtgttgaaatgcactaatatgagatgattaaaattgctttaatagaaatcctctgcggacaaaatgcaacagttaaacgccgcacaccaggaggcattaatgaaactggagagacttgagtaagtgggagatttacaagtaaaataaatgcaatttcaaaatgcaaaatgaattgtaagtagtattttacaaccctatattccaccttaagtctcttttatctcccttaataaatagcaga

SEQ ID NO: 3146 - DNA, 2300 bp, Homo sapien
ggtgctgacacaatacagagtacatacaatgcaagttaggaaagaaaagcaggatttgccctcacatcacatccacttcacaacaaaattaagttcaattaaatgtaactgagctttcgttaacagacctagagttctgctgaaggaatttgtggaagaaattcttcaatacagtattgattgatgagtagatctagaactacagactcccagatctgaacccagatgagtttcttggacacataagggaaatgatcaaaggtggcatttgtcaaatggctcttctctctgaagaaacaggcatgtgtttttggtgtgaggactttgaactctgctgtttgcacaaaaacctaaggtaaaaaaaaaaccttctaaaacagcccttaacaatgagtttcttagcgtcaaatcagagccttccaagtagaatggtgcttttctaaatgcctgacataccaagaactaaatacatatttcatgaatgaatgaacacaatatacaaatgagtgaaaaaagtaacaataacagctttaaaaaagttacttaactttgctgtaacaatggatagaatatgagtatatagaaaaaaagatataaaaggcatcctttctaaccattgtctttgtttggcaaagtcttcatagtaataccccttccatcactttattccatagcacagaagaagtccaaataaagagacagaaaccttgggaaatagtactgggaatgggagaaaactcctccagtgaaagaatagaatcatcccctcttatatctgtttgcaaatttgaatttgcctcttttaggtttgcttaaaaataatgccaccccagaggttgcagtgagctgggattgtgccactgcactccagcctgggagacagagtgagactccgtctccaaaaaaaaaaaaaaaaaaaaaaaaaaaagccacccatgcattaattttgtacatttgtaaaacactttcacatcaactacctcaattatttcttcaactcttctatgaggatgacatcattatctgcattttacatatgggagaaacagacactaggagttttatgcgaatgcccaaagctacccatttaatgctttttctagttcaataattttgtctcctaggtggagaacacgtgaactataaggcaaagcccatggttctatatatctttgctatgtattgttgtccctagctgtccctgtatttttccctcttttgttacttgaatcagtgatgaggaatgtattagctttttattgctgagtaacaaatgaccacaacctagtggcttaaaacacaaccatttattatctcacaagtctgtaggtaagaagtcctatgagctcaacatggttctctgctcacagtttcagaaggtgcaaaccgaggcgtcagctgggctgtgctcttacctagagactctggggaagaacgtcctttcaagctcactcaggtggtctgcagagctcagttcctcacagttgtaggactgaagttcccgttttcttgtcagctattggccaggaatggacaggctcctagaggctgttctcaggtccttgccccatggccacctccctggcaaagccagtaatggcatgtggaaggcttctcatgctacagatttctctaattccccttctgctgccagccagagaaaattctgcgttgaaaggactcacatcattaggtcaggcccaccgagtctcaaggtcaactgatttagggctttcattacctctgcaaagtctcttcacagcagtactgagatcagtgtgcagtgattaagtaggggctgggaatcttatggggaaaggagacgttatatggtaatcagtcgcaacagaaatccagaagagttctttctcctggttttatctactttccctttagcttgatttctgtggttcatttagaccacagtctaaggttacacatccaacatttttcaccaacctcaaaatcactctgagttctacgtcccctccccaacgtgcgcagccaccaaaggcctctgcacacagcctcggtcccagcctgccccgcagtagccaacgagggcaaagacagggacacttccggccctgacgcctcgctgtcgctcccatgtgcccctgccgggaaatggcggcggctgtgccggtgctcccagtacgcctcaggaattccgtgaagcaccgctgtgcgggaggtgggggccggcaataccacaataccactggcggggacaactgagaaggcaatgaccaggatatcaaggataactggggcgacagtgatgatgtgaaaagaaagaa

SEQ ID NO: 3147 - DNA, 2300 bp, Homo sapien
gggctggctacacaatagaatattttatattacaaaatattctggacatttcctaagtaattggcctgctattttatcttatattcattgtgactgtgtacacagtcagatttttccctctcactttgcccaatgaaaagattggaagcaaatttgtgtctgtctggagctatgatactggaccttagttatgacttttgttggcttttttcttgatcccattgtatttattttttattttttcctacccattttcaattggagttgtcttgttggaatatgtacccttttaagcacctcaagtttcctttcaaactggacaggcaatagacacataactaatttttaacactattcacacatttctgttagactgaagcagattgtgcagtggaaatactaggcctttggagggagtcacacttgggtttaaattccagctttgacacttaataactgtggaccttggacaaattatttaacctttctgagttccctctctgtaaaatggaaataataatccataactcacaaagatgtcttggggattaaataaaataactcatgcaaattacttggtgcatagtaggcattcaataaatgtcagttcacttctcttcccagttaataatgcttattagactatattaaaaactagaactagactgtgataatgcatttctttattaggtatttaagccaaataactaatttcccccgggggaagagagagaaatgttgaattagtttcatttggtgaacttatttattaatctttctttttcttgagcatttttcagtttcatagtccataatttagttttcatgcagcaaaaatgacacagtttggtattcttttcacctttactgtgctagaattgtttttttaaatgtatctattattacatctgccacttattagagatctttattaattatattaacagctcgattgtgtttcataactacgtcgtgctgacaaacttgtgctctcagcagtttccctgaggtctaagcatttaaaagaatcaagttttaaatgacaatgccacagcaaaagaaaagcaggggtgggcgggaagacgcacaccgtctgtgttctttcgtgttaattttatatgtttgcatttaagtggagccacattttcctcaaggacgcaacctaagtaaggcgagcagggaaagtggaaactaagtgagctggaactacagtaccattgcacctttaaggactggagacttgctattagctcggcctccttcccggcccacctctgaactctgattgacagggcgccgggcgaggaggagctgaaggaggctggagaggaggcgccgtgaggaaagtaggggaggagggggccggtcctttatctggtggccaatcagggaagcggggaggagctccaggcgccctcctccctcctcctctccccagcctcccggcttccccgccccctccccttccctttgccccctcccctctcctccttctcgtcctcctcctccttcttctcctcctcctcctcctcctctcaggctgtggtttttctgtatatgtttctggagtcctgagcctgagctaaacaaaagcaggaggctgacggggctgctggagtttgcagagacacggaggaggagagagcctgtgctttgcctgccgccgcggctgggggagatctggcttttgcaacagcccaccccctttgagatcactctggcccggagtgggggtggggggcagcggggggtggggggggaaagtttgcattgcaatccccctgccttcctctcctttctcccgatcaatgcatatttgcaaaaggattaagccacagatttaagcgccgggagcccatttctgccttgcaaaggagaccggactgaaaaacctaaagccagctctgatttcttttcgccaagtgggaaggtggtttatttttcttgctttttggagtcaacacccttccccaccagcccttatccccaccctcaccccgcaaccccttcacgccccctccccctccccctcctcatcctcccaccatcctctaaagaggcaaagggattttttttttcttttggtcttcttttttcccccttccctgtttatcctgaaaaggatttgaagacaagcttgaaggataaaaagccttggtgcttcccaggagccgagccgaggagcagaagaggaagagccgggggctgccgtagcctttggagatggacgagcagcccaggctgatgcattcccatgctggggtcgggatggccggacaccccggcctgtcccagcactt

SEQ ID NO: 3148 - DNA, 2300 bp, Homo sapien
gcctcagacaaacaggagctgagaatggatgagtggaaatcagacagggagatagaaggaggaagtgtgtattgggggtgtgaatgcctgtgtgtacacttaacgtgagggtcaatctttcttataggtagcattgctgtcttgtcatcattccactgtcctaaaaccacagggctaactgtatctgaagaattatttactgatgttttttaagcaattgctactgttgccattgatcatactggtatatctttgttagaaatgttattttgattatgttattcttcacaacatccttacttgcaatttgtaatgggagaggtacacatagaagataggttcttgtgccaaaaagaagttttattgtgttataaaccaacaatcaagaccatgtaagctcagaaataatctgtattgtgtctatcaacattttgatagtattggtaggagtaaaacaaggagtggtatgtgtaaaatcattcagctgtttgaatgtcattttctctcaatgaaagaattggttagaggcatgcattccttcagctggtatctttcttcctctaacatggtgattctcaatttgtgggccacggaccctgagggagccttgaagttgttaaaaaggtttagtaaattcatgcacataccaagcattgtctgtaaacagaataatgtcatggacacacatgcagataaatatacctactaaaattctttgaatgtatgaaatgctattgtggttaatgaaatgcacattcacttaaacaagcattttttcagttcctataggttttttttattcatgtgtatcattcctccatctgtagaagctaaaaatacaataactctcttatagtggtacttgcaatgttttgacattaagagagagactatacattcacagaggttgggagcttctgtctagcctgttgtccaaaactgcttataaaatttagcaactaattttcacttttgacaactattttaattctagaaaataggtttataaagattttcttaaagtgttatctatccttccaatgacttattataaattttagaatgtatttctatagggtggaaaaatctcctttagtcagaattgaacagttttcatgaagaacatgttacaccatgtagaaacatgggtactgcagggcataggtggcactagcttatgggagcctgaattccagaaacttgattttactttttgtttaggattaaaatgccaaaaagagggaggcttgcagtatcacacttcaccaccaggtaaagcttttagaaacatatattcagtgtgaaaatgccccaagtttgcagcttcttgacggataaagacagttacagagacaaagaaagttagtgttttatgaattagtcctctactcttgaagtagtatagcttatcggcaatgaggtacatttgtatttttttctcggctgttcttcctgaggaaatacaccatgttaccattgaggaagttcttcttctctctttccccgtacatttttattgtacgcagaaagacagaagaaggaagccctgaaggaagattgtgtatgaacccaggattctgttattacgtctgatgtttgtttctagttaaaaatgagaagtaatttttgggagggagacagaaatgggaaaagtttataagcgagccagtggaaaaagcacattcattatcagtgtctttctcactgagtcgtttgaaattggaaaattagcagcttctttgaagctcataagatctttcatctttgtgtatgtgagtgtgtgtgtgttaatactaagtggagattctttctcttgccacttatttggtttttctgctaataatgaaattataatgagatccctgatgggatttaaaaaaaaaaaaaaagaaaaaaaacaccttacatgaattatcccattcccccaccctccttctgcctttctgtaaaatctattctgcataataggtctttgtttctggatttgtgacagaattgaaggaggccaggagtcggaactgcccctcattgttctttttggtgactaggatacaaagttctgttcggcacagagtactctcctctgcttctacctccgggaaccccgttaccccccagcccacacaccaccaccccagttttgggtggggagaaggcaaaggtgagtgttcgatatctttgcaggctgaatggccagttgacttgagatgcatataccatgccttcccccttttatctttaaggattcatgacatgggctgctgttgagggaaccacacatctatcttgatggcagaaat

SEQ ID NO: 3149 - DNA, 2300 bp, Homo sapien
aagaaatcttttattgctcaagttaggcttaaaactttgcacttctgtgtttccttttggatatgttctaagactagaaattaaagtcactaggaaaagaaatcccccttggggcacaattcatccatttggagaatatgctgatctttaagggacaagtatttccctagaaaaggcaaagggaagagaacactttagatgaaaaacaaagaggactcaaaaaggaaaaagaggggtgggaatggcaaaagaaaagagggagataacactcaagatatttgtggatcaagaggtattatgtggcccagatgtctcagcagtgaggacatagcacagcaccccttccttctaaatcacatgccacagccgcccagtaccccttccagagcagcttttctgttctgcctttagctggccatgccctttacacctaaggaacacccatgtttctggggatgcggattctctgcttcctagaaagaaaggcaagaaaggtacctgggaaggaacccacgtacaatgagctatgataaatacctaacaatttataccgcgcattcaatctaggataggctgcctcttcactgaaatctattaattattcatacactaaatcaaagacccattccttgattggttactatgggccagacaggtaacggtcacagaaatgaaagacaaagtgcctgccctaaaggaaatgatagtgtcatagagaaaagctgacaaaccgattattagtatacagagatgtggaggaagtttactcaacaaatggcctcaattgtgatatcatcacaattaagccttttgacattcatccttatttccttactccagtgtagactgccacatattcaaatatacaaacagaccccaatgtatgcccatgcagcaggtgacaagggccaggtgcttgtgtttacctgtacttgtttcagcactcaccccatccttacaccattaaaccgaatagccatttgtagggcttaaacacttaaaagccagtattaagcagaacctcagctctgcatctggggacaaaataccccgcaaaagggatgggaatcctgagagtgcagccagcataaatcacgccaacatcactgggcagacggttataacaaaatgcacttcctcctccatgaagagcaagggcttcgtagactgcacccaagccacaagctccacaccagaccagagatgggctggtaggcagaggcaaaggtggtttcaaggcttctgtggctttgaagaaaacatctttgagtgtgagaaagcattcacatggtctctgcgggcatcctttccctgtggtcgggcactcttcaatctgtggctgttgatttcaccacacactcaacttgtcccgccatagtcctccctaacgtagccctaaagacaaaaagaccactaagatcgccttgcaaacctaatcagaatgtggcaagtctggggcagtgatctttcactctatgatctttgacagtgggtcctaggggcaaaagtctcagactcttaaaatcttatctggctccttccgttaacagagaaaagtaaatatttagccaccagcacagaggttgagagaaaaacagctgtaatcaacactccacttctcacccctcccagatcagaggtgaagcctgacacccctgacccctaagcgagcttcctcggtgtagcgaagcacagagcccagccagcaataattccacatataaacaactcttgctaggcatgaagcacacaccagacagtaatcagcttatctaacagaacaggcctcttttccgaacgcagaggaggattagcaggcttgaattacagccgtgaagtgtaatcaagccctggtggaccctggcaaaggctactgtatattcctgctgggccatgggttgttggcacgatgtggtgtacctacaggggacgaacagaaaatgcttgagatggtaattacactgggagacagcagttgagaaatggggaagagcaagtgtggaggggagagaaatcagattccagctgatgcccacgtcctccacatcttccagtctttggaaaatcttgaagttactggatttgaacagatttttctggcttattaaaaatagaatattgcctacatcacataaagggcaaactccgccctcacttggtcacagaagcaattacagcattgtctgtagtacacagcccacggcctctaaccacagtgatgggcacacttggtgatgtgcaactcagtggggcctacagggtcccagctgacatagacatcacaaaggaatttgaaccag

SEQ ID NO: 3150 - DNA, 2300 bp, Homo sapien
gaggttcttgttagatcatttgggcatagaattgcctatggcttttattattattattttgttttggagacaagagtcttgctctgtcacccaagctggagtacagtggcgtgatctcggcttgctgctgcaacttccacctcccggattcaagcgattctcctggatcagcttcccgagtagctgggattacaggcacccaccaccacatccagctaattttttgtatttttagtagagacggagctttgcccaggataatctcaaactcctgagctcaggaaatccacctgccctggcctcccaaagtgctaggattataggcttgagccaccacacccggcctgcctatggcttttaatgccaaaagtaaaaagaagtctctcttacacaggtatgccccagaccctagaagcaccttctcaggagtgtgatgtctgtggaatgtaagaggtagcctggaaaaaaaagtgacgtatactagagattttatttcctttcagagttaaccctcatgttgttcactgcttatagagttgaagtatttcaaatagttagacaattactttaacagtagagagttatttactttacagaaaagcaatgttgactagttatcagtgttacctgtccattctgagttatctgtactggcaggtaatctaatgcttttctctatggcctttttaacaataatattttctaccacttggcagtaactagagtttcagacatagtgtctaggtctagtcttgaaaaatgacatctaagaaataatattaatcatcaacagtcaaggctcattggcatttagggcactcagtgccgtactggtataaactcatttaatcctcacagcaaccccaatgaagtagatcctctcatatatcactattttgcagaagagtacatttagttgtagagagttaagtaacttgcctgtattagtacattttcacactgccataaagacataccggagactgggtaatttataaggagaaaaagcttaattgacttgcagttctgcatggctggggaagcctcagggagctttcaatcatggcagaaagtgaatgggaagaaagcaggtcttacatggcaaagcaggagagaaagagtgtgaaagaagccacacacttttaagccatcagatcgtgtgagaactcactcactatcacaagatcagcatgggggaaaccgcccccatgatccagtcacctcccaccatgtccctccatcaacacgtggagattacaattctggggactcagaactaaaccatatcattgcccaaggccacgcaactagtaaatgcggagccaggatatgatgctgtgataaagcctgaagtgtaatggtggactttctgctgcctgtctctgggttttagaagtatttttcttagcctcttcctggaagctttcaaagcaataccacatagattattgctctcatacataaagccatcctggaaatgtggacctggaggccttgctatggaataacatacagctccaggaactggctttcagggactcacaacattgtcttttgcttctttcaggtaaaagtgatgatgaagaaagtctctgcaagtcagcccatggggcagggaaaggaactgctgaggaaggcaaggaccataagcgccccaaacgtccgagaaccatcttgacaactcaacagaggcgagcattcaaggcctcatttgaagtatcctccaagccctgcaggaaggtataggagggagcagggaggaaaaggagctgggccccacttctctgtgtgcactcagacccctctgggatctcagtgggcattgggggtcacagtggtgaggaaggctgttcagacagagcctgcacaggcggctcaagcctgttggagactccagagatcactaagctgtggccagggtgtgatagactctcctgaagctttcatgcatgcacaccaactccaaatggcccctgtcacacctttcatttcatagagcacaatgggaacagtaataatgataggtgtccattgtggtgtagacccagatgctgtaaagcaaagagtataaaaacacagtggcttgcagtactcttttttgagtctggctttttccacttggtgtggtggtttggggattcattcattcctatttcagcattccactgtataggtgtgccatgattggtttgtccatgcacctgttgatgggtgtttggggttgtttctagtttgggactgtttcaaataggactgctatggacattcatgtaaaaaaaaatacagtggtttaatgagac

SEQ ID NO: 3151 - DNA, 2300 bp, Homo sapien
attccttatggttgtatctgccctattccatttttttcttgcttaacttctatttcacatattatcctaataatacttgtagtttgtatttttttacaccctgctctacctggggtgacagaaaggacagaggtcaggtgttaggagacatgccactagccatctgggcaacatcagggaaatctcccagccgtgctaagctccaaagattcatctgaaacaaaagataaaactgttctgcctacctcacaggtttgctgtaaagatcaagcaaaatcatgtatgtgaaaatgcctgtaaagcagcattcgaatataacgtattagcctctttgccatttcccctctttcttctggagtcatattcagtgtttggcttgtgcctgctggcagaaagcacttagaatggcttttttagtgcttagtggggtcgctgctcctaagcacattagagcaagttgctgccagcactttttctttaggaataaagaagtggctctgtctttggaggaggtaatagaaaaaccctggctatgtggcatctcctctgcctgagttcaccatgtcaaacggcctgccaatttcatctcagttcagttcagtttaggaactgaaggtgccccagagaatcacactgaattgaactgaaccttcccatggtattcagatgatgggactcggattccatgaattcccttccatttccctcaactgtaagattgggacaacaattgtctccacttcatgggggttgttgtaaagattaaatgaggtgactgtgtaacaaagctggcacaaaataaacgataaacgctagccagcattgtaatttatttattgagcatccacttggggtcacacaacatgcttacctcctgggctatacagacggataaggccttattcctgctctggagggggctaaaggtctgttattgtaaattaaagttaggaggtgcagataattcacatttctccccagatactttgttcccctaacaatgtccctttacctgatttcctgttgagtgtcattgcaagttcatcatctggggggcagatcccacctagtgtctcccaagagcatgattcttaggccgtgagtcccatggcctctgtacgccccatgagtgaatatggttcgaccttaaaggaagttggaaactggcatgagccctcgggtgatgaggggtttgaggagctaggagctgctgggcccacatctactggcgctaaacagcttctcagcgcttcccggggcccgggtaaggattgcagcgcttttatagcagcagttggagagcggcgggggaatcctcgtggcggcaccgctgtccaggaggcgccgacatctccgcaaaggcccagtcggggtgaggggcactggggggcgaccgggccagagcgccccgaggtaacagttacacgtggaggggaggaaacttagcgtgtccgagagctcccagaggcggaggggctcagagggcagcggccgtgtggtggccgcgcagccaggctgggaaagggagcaccacggccccgccacgggacgcgctgccagccccccgcccagcgcaccccaccccctctccgccgccgcgcacgcagcgccgcggcccctgtcagaagctgcaggatccgccccggcgaagcagggccgactcgcacccaggaccctgggcctctgccttccctcctagccttggagaagcaactggccctctcctcccgctgaggagcgacgcgggctggtaggacgtcccgggaaggccggcagctcgcgaccacgtcccggcccagcctgggcgcgccgaggagcagagccagcggccggcgttcgctccggctccctccccggcgctccgaagccgagggcggctcctccggctgcagtctcgggggcgacgccttcccgggcagaagcttccagcagcgctccgcaacttctctctgctccagtcactgggagagagctcgcctaccaggtaagtaaggctgcccgtgcctaggctgtggctcgggcgggcgtgtttctgaaagttgacttgaaatgcatccaagagtgagccgggccagccggggctcctccccgaggcgactcttttgcttctgcagacattcccggcactggccgactggcgggaggacctccccgcgcgccccgcacaccggctcctgcgcgcaccccaacagagcgcagcgccaggagtccagaagcgggcgggacgccctccgggtcccttacagtgccccttctcgacctggggcaggtgagggccgcaacggggcggctgggacgcg

SEQ ID NO: 3152 - DNA, 2300 bp, Homo sapien
ttgacatctaaagaggtgaactgatggcccagaccaattcagtggcaaagctgggaatggaacggaggtcctttgattcctgacccttcactgcagtgccttctgactgtagtgagagttctattcattcctcaaccaagtaaaaggcatttgttcatcaattgtatgtgtctaggtctgcactaaaagtgatatgacttatgatgtgatttttgaggcaccgtccccatcctgaagtgcccaatggctggggagacattctcaccaaaaacctgtgtgatctacactaatcaagcggccttgtgggtggatgtaagaattgtttgaaagatttgagtttcaggtcaaatgacaatctatctactttcaggatattcactaaaaggaatagtcttaccactagttaaaatgtatttcatatatttcatataagacctttagtgaaaccaaaattctgccgggtatttacataaaaacattccttatggttgtatctgccctattccatttttttcttgcttaacttctatttcacatattatcctaataatacttgtagtttgtatttttttacaccctgctctacctggggtgacagaaaggacagaggtcaggtgttaggagacatgccactagccatctgggcaacatcagggaaatctcccagccgtgctaagctccaaagattcatctgaaacaaaagataaaactgttctgcctacctcacaggtttgctgtaaagatcaagcaaaatcatgtatgtgaaaatgcctgtaaagcagcattcgaatataacgtattagcctctttgccatttcccctctttcttctggagtcatattcagtgtttggcttgtgcctgctggcagaaagcacttagaatggcttttttagtgcttagtggggtcgctgctcctaagcacattagagcaagttgctgccagcactttttctttaggaataaagaagtggctctgtctttggaggaggtaatagaaaaaccctggctatgtggcatctcctctgcctgagttcaccatgtcaaacggcctgccaatttcatctcagttcagttcagtttaggaactgaaggtgccccagagaatcacactgaattgaactgaaccttcccatggtattcagatgatgggactcggattccatgaattcccttccatttccctcaactgtaagattgggacaacaattgtctccacttcatgggggttgttgtaaagattaaatgaggtgactgtgtaacaaagctggcacaaaataaacgataaacgctagccagcattgtaatttatttattgagcatccacttggggtcacacaacatgcttacctcctgggctatacagacggataaggccttattcctgctctggagggggctaaaggtctgttattgtaaattaaagttaggaggtgcagataattcacatttctccccagatactttgttcccctaacaatgtccctttacctgatttcctgttgagtgtcattgcaagttcatcatctggggggcagatcccacctagtgtctcccaagagcatgattcttaggccgtgagtcccatggcctctgtacgccccatgagtgaatatggttcgaccttaaaggaagttggaaactggcatgagccctcgggtgatgaggggtttgaggagctaggagctgctgggcccacatctactggcgctaaacagcttctcagcgcttcccggggcccgggtaaggattgcagcgcttttatagcagcagttggagagcggcgggggaatcctcgtggcggcaccgctgtccaggaggcgccgacatctccgcaaaggcccagtcggggtgaggggcactggggggcgaccgggccagagcgccccgaggtaacagttacacgtggaggggaggaaacttagcgtgtccgagagctcccagaggcggaggggctcagagggcagcggccgtgtggtggccgcgcagccaggctgggaaagggagcaccacggccccgccacgggacgcgctgccagccccccgcccagcgcaccccaccccctctccgccgccgcgcacgcagcgccgcggcccctgtcagaagctgcaggatccgccccggcgaagcagggccgactcgcacccaggaccctgggcctctgccttccctcctagccttggagaagcaactggccctctcctcccgctgaggagcgacgcgggctggtaggacgtcccgggaaggccggcagctcgcgaccacgtcccggcccagcctgggcgcgccgaggagcagagc

SEQ ID NO: 3153 - DNA, 2300 bp, Homo sapien
ggtgagacagtgctggcagaatcgtagtaacagcagcaactactcccactcttcatctactgagcccctaaagtgcagcaggcactgtttaggtgtttttaaatgttatttaatcttcataacaagctgaaagccacaaaaatgttaattccattgggctagcggccttatctgtcttgctcaccattcactcctctagcctcaacacgtaaaatagtgcccgacacatagtacacatctttaaatggaggatgaatagcaaacaaatgaataaatgtgggaattattatctccaatttctatcaagaaacagaacctcagaaatgtaagtaacttgctgaagaccataatgctagcacgcggtggaggtgagatgtgaaccctgttcgtgtgatttcacagagcctgtgtttgaggtgtgactgcattgctttctggtctgcccccatagaaacccccatgcagtaggaagtacaggctttggcagccagaagatatggatgctggtccccagggtgccacgtgtgtggcatctgggaaggtgctgggtctgagtctgggctcctcatttggaaaggtggatgttggtctagcagatctctgaggccatctagcagatctctgaggccatctagcagtataggtatttctgagttattaaaagatattctcaaaactttcttccaaagtacagctaagccaaagagttttccctctctgctaatgccagttaaaatgagaaagtatgatcctcaaatctcatagaaaattggaaatgaaacggaaaagcctgtcttgaagacattaattttgtttgggggattaattttacatgctcccaatgctcactaatggtttccattcctctgtgaagtctaatatctacttagctgtttatcctgaatcataagccaacctctagcaattgtccagaagagactgagctgtgttttttgttggaggctgtggatgaatttgagtaggtgggttttggccctttggtgcaatgaataggcagggcctagtatattagtgagattaagctgtaatagacccaccagatgccaccagtttaacacaaacatctattccttgctcacaaatctgggtgggcagtcagttcagagaggtggttgccttgcatgccatcactcagggaccaagactccttttttcttgtgtctccaccatgacccagagccatactgtgttttgcatccagatgatggaagggggaagaggtggaggggcagagaggctaggccatatgggccagacctcggtcttagagggccctcaccttttcattcactttcattagctgatgccaagtcacgtggcccagctggccacaaaggaggctggagaatgtatcctgttgtatgccgaagaacagaagaaaatattggattttggtgaacctggtagttcactatagatgagattgagagagccctggccaaggggtcaggacctggctgccagcaatagcttggcctctgtcaggtgtgagccttgggcaaatcatcttaattgaagccctgagttggatgctttctatcaaatcttccattttttgagcacatattatgtgcaggacattacaaataatgagagtcgtacatatcattttcctgaaattgtctctgtcttgctgtttatcttaaaaaaccaacaaaaaactccaactcacttttttcctaactataaaagcaatgcatgctttggttaaaaaaattataaaaatattttttaaaaatatgcggtggctcatgtctgtaatcccagcactttgggaggctgaggctggcggatcacctgaggtcggttgttcaagaccagcctgaccaacatgtagaaatcctgtctctactaataatacaaaaattagccaggtgtggtggcatgagcttataatcccagctactcaggaggctgaggtaggagaatcgcttgaaccggggaggtggaggttgtggtgagctgagatcatgccattgcactccagcctggatgacaagagcgaaactccatcaaaaacaaaaacaaaaacaaaaacaaaaaacaggtaataagaacttattgtaaatattttggtatatttctttccagtgttgtcgtgtatctattatgtctcgtgtgtatcctcgtgtaactattatgtattacgcatgtcatgtatgcatttctagatatgaaattatacagtttggtgtattattttcttcccttagccattctagaaattttattcaattactgacaactacaaattatcattttcaatggttttgtaatat

SEQ ID NO: 3154 - DNA, 2300 bp, Homo sapien
tgaggctgtaagcagcggaacagggatttgtacccagcaatgttggcttgtgagttggtgagttggtgcttttactatacatatagcctttcaaggccatataactagtgagtagcagagcaaagtgtctaaggcactaatgaatggactttttagtgatataagatgttgtctttgctatgtctatgtcaacatttttatcaatgagtcgaataagatatgaaaaagcagttcatcagattttcagaagtcatgaaataagggtatgaataagaaatattttggacaacagaagcaggatcctaaaagatttgggatgatgaatgaagccaaaaagttttaacttcagaggaatataggaagcatttcatgtaggtcccaaaaccaattgcccaaggatgggatgaagaatatgcataagagaacacaacttaggggaggtaggggtggggagatttttatcgagttagttctacatgaattaacatgcagagctgcccacctaatgcaagtgagcaaatggtcctcctgtattctatattacttatgtccactggactctcatcccagcaacagtcaaggcagctctgggctctccaaagctctttacagtgaaggcctggatatttcttcctcctttgtgacatgcttttgctttgattccccattttggcctcctcctttgtcatcatgactttgttcctgactctggtcttttattctacgtttttgttttggcttctcctagcatttgaatcttgattttttactctgggaccctgatttgacttacctctctggctctctatgtcttatgctgcatcaggagaaaatctcttatcttttttccagcccaacagagctcagcccatgaaacggaccttcaatgggtatgttgacagcaccccatcaccgtgccaacacatataccatgaggaaaaggtttggaccatatctggagtattgcatccaagtctggccaacccccttcctcactgtgagggtatctatgtaaactgaagtacattattagaaaaaggataggttgggaatagacatgaacccttggtgatacatagaattactgaaagagccagagatgcctagggaaagggggattatgggcacagcagatcaatctcaggatttgcagaggatcccactgtgaaagacttttttgtctttcaggcttctcttgtgtggcccctgggagcagtctagcacctgtgggcagaagctgtagggaaaaggagcagattttatctctataagaaactttcttgtggtgaaaactatctagaaatggaatgagaaagtggtgagctccccattattggaggtgttcaagtataggctgagcggtgacttgtcacgaaaactgtatgacagacccaaacatcaacggggtgcttagattctttgatctcgggtcagttccacacaagacaggctctgtgttagtgaggacccagtggtgtttttgaacaggcggcaggataacaatggtatataaaataaatgcagagaaagacctccacatcaagccaacccctcctccctacctgtaagttttccacctgagtgagctctggctccagctgcacttgtcaaactcccattgttagagcacagataaatgcttccggccacccaagcaggagaggcccacctcaacttaagggctactctattttagttttccgtagctggagattgagtatcacgcttttctaatcttgtgcttctgaaagggccctgttctctcttgaaccccaccccctcctcctttcacagatcaaataccaagtacattggacagatagaagttcgaatgagaaaatgcattttaataaaatcccattgatttttgtggatgtaagtcaaggaacaggcacctaaagagtcttccatcccctgccgtctcccgcctctctcctgacctacaccgggcggtcatacatcgattggcttcctagataatagatcgtgccacccggtagggacctctggggacgcgccgggagctggaagagtcgcacgcagcagcccaaccctgagttaatcaaactagcaacaggatctcaagcagcagcgacggcggtggcaagagtagcggtgacggcggcggcggcggcggcggcagcattatgcgtgattactgacaggcaccagctgctgccgccacagccgtctcaaacgcactatgtggactctccgatctagaggcagattcctgactaatcccagagggctggcccagcctgtgctccccgggctgctaggaagcgatgaccactctt

SEQ ID NO: 3155 - DNA, 2300 bp, Homo sapien
gcatcacccagcaaaccagtagaggctggagtgcaatggcacgatcttggctcactgcaacctctgcctcccaggttcaagctattcttcttgctcagcctcccaagtagctgggattacaggcccccaccaccatgcccagctaattttttttggtatttttagtagagtgcagtggtgttatcttgactcactgcaacctctgcctcccaggttcaagtgattctcctgcctcagccccccgagtagctgggattacagatgtgcgccaccacacccagctaatttttgtatttttagtagggacagggtttcaccatgttggccaggctgatctcaaattcctgacctcgtgatctacccgcctcggcctcccaaagtgctgggattacaggcgtgagccactatgcccggccgcctttctactccttctaatcacaccatatagtcccacctatcatgtggctgcaaaaaggacaatctctctacccagtgagcggctcatgcagcttcagatgcagcatggtcgcccttcgtgtgtgtggctgttttattagcctgcccctgccccttggatagctggtgtgcccatccttccaggaggacaggtgaagcatcaagtgagcacttggagaggcccctcctgtctcatacaatcgcgctagctgactctgctctcaggcaggctcctatttttagctgtatctgatggaggcactgtcttcccagcttaatgatccctctcaggtgccagtgtgcctccaaacagctctctggtgatccaaaggacaggtgggcacaggccctgatatcatacaaagaagaggctgggtgatatagggcaaagtgaacacaattgagaagctgaggcagtatgacatcgtgccctctcaaagccctgattttctttctgtaaaacaagacaggacgctctccaaaggctttcccagttttaaagttccatcaaacttcagttgtgaagggagagaacagatgattgaagcgtcaaagcccaagcaactaagacagagtcaagcgattacaaagcagaccatgaatgttagctagtaaatagtccactcagctgtctgggtacaagtgctaagggatatttaattttggcatgcttttattttctcaggagaaaaatagcagaaggaagtgcacatgccattttattccattgaaactgccaatgtgctcaacttaggacttacatggggttagcaacgtaggggcacacaagtcagtactttgttaaactgctccccaggcagggaatgttgtgggttcaggtctaaagaatgtaacagtctcaaggactttggtgtaggagccacttatggtatccagttcactccagacttttgacactgcctgggccctcttcagcaaactcatctctcagcaggtgtggggcttggggacaaaaagttcagcctgaaagtggaaaaagagttccaaaacatgccgggaaggctgaggcctaagggctgaatatgtgtgtatctgtctattcatgagccttggttctgtttgctgtgccagctggtagaaactatttttgtcttttcccttcaggctgccggagtctccactagggagattggactctaacagagtaaaggccagagggccagaggaaatcactcccatttgttgcattccccagggatatctttgatttccaggcttcatccgcattctatacttctgcaggattcactgtccagaggaatccaaggggaagcctgtaaattgtataccctttttaggggcagaattagatcatgttttcagcttatagcaaatcaataaactgttgcccatggctaagattatgtgtagcagtccttatgcctgaaacttgatttgagactgccaataatggtggctgtctaagcccagttgatttgggaagagaatatggaccctttataggagacttgtagatttcagaatgggagagaaaactgtggcacagtgtgagctttgtagtgagaagattcctctgtgggtggctttgggcacacattttagcttctgtgggcattggttttctctttggtaaaatagagatgatgaatattgcttttccagtgttgttacatagattgcctgtgatttaaggaaacacgatagccactatttactatttaccctgtgtcaagaatgtgatcctcccagcaacgcaatgagtcatattgcatgaccctcatcttatgaatgaagaaacagaagctcccagaggtgccactcgcccgtggtcacagagctggtgagtgacaaaggctgtattg

SEQ ID NO: 3156 - DNA, 2300 bp, Homo sapien
aaaacaaaatttatttaaggttctgaaatcaggtaattcaagcaatgctacattctcttttctttgtctagtctgcttcttctttatcgaacatatatttattcagtctcaaaatgaggtacacactttagagatgtggtctaacctggcaaagctgaaactagcccatgagtgtccaggtttcaggaccaaaaacaatacagctacctcaaacaaaaagaatattccctgaggttaaaccactcatagtgctttgtgaaaatggtaatactccagagccaggcatagctgactggtgtcagtcaataacctttagcatgatatatttacctaaggcttttctaagcagagcacttgtaaccatacggccaaacaggtaggcctaatcctgagactactatcttgagaaagctagtatggataatgaggctggaaatgaagtagggcaacctggagatggggccgtctgaggggaagaagtcagaaagagggagaatggcataaaagaaaaggtgacacgtcagcaaaatcactccatgagctttggcgagtgaatcagtgatcatttctcatggaaaggaagcagacaacaaacacagcccttccaaacaaagtatccctgccacactccaccagcaaaacacaccctcgccacagctcccagagcagtcactttggaaattaattcttttctatagacttcatgtgctagatttctctcctcggcaatcacataagatctagaaaggaacttatattttaatagaatttgttttaattatgaggaaagggtgtctgccctatcaattaagtcatgcttcaattagtacagctatcattggggtcattactttaagtatttgaaatgtctacttaaataaggtcactttcaatttggtaaacacgcctaagtcatcatattaattcacagccagtcacccaaggaatgctgagtaagtaaacaatcaagcattagctaactagccacaaatccatctgactttattaatttctctcttggcaaagaagcaagagaaggaagcaaaccatcagaaacattctcacattgttcattcactatacatttattacataccaggtgccaggcactgtgcttaggtttcaatatgttactaatattcacaactcagtatatatgaatgtttttaaaaaatgaaatccaattttcccaaaaataaaagtttcaactcctcagatgttttatcttatttctgcctgatatgccttcctccacggggtgtgtgatacatcccaactcttcagcttccaggttttctatccctcgctccaaaagactaatcacctgacaagtaattaatgaatataaactcacactagaagtactagagaggcactcactattttaaaagtcctaggagaatacgagtggtaaaaaaatacttctattgttgcactcagattttttatatatacatttgggttttgtgttagaaggagtagcttacacttattcaaaaactttttaaaaatacacatatatatatattcaaaatgcagacagagatgtatacatcctaggaataaagtctgaaaagagtaccactttatcagaggaattccccttgcctcatttcaaaagaaacaccccctttcccatcttcttctggcaacactgaaaaactggcacccatccaaatcaatatccaagaaaagacccacactgagaactgacctcaagcaagtcactgctcatcactaagaaaaggagttggcctggagatgtcccatgttccctctatggcctgcagattagggggtccaatgtcacctaatctactacagctccatggggagcgggtacagatactatacacatccacacactgaacccagcctggtctccaacacacacatgctgcaggcccctacccatgaggccccaactcccccagggagttccagctggcttaccaagacacataaaacaccctcacaccacccagaaggagaggtgaggaatctctttccctcagccaggcagtctcctgaggctgctgacatcacaaaggtgtcaactggcaacctcattgtcatgtggctctcccctggctccccttcacttgcaaacgcagggaaagggtgagacctttcaaagctgccaagtgggcaagcttccagcagcagtctgggagcgagcgacagagccaccaagctgggcggcagggcattgagcctcgcgtttcaatttctgttcagttctcctgtaatggaaaattgctttgcacaaagctaaagtgttacagttctttccagagccc

SEQ ID NO: 3157 - DNA, 2300 bp, Homo sapien
agttaacatgagctttggagtcacacctggttccatcacttactcagttacttgtgtatgaggatacttataacacttggtcataagttgtttgagatataagtttctagagtgtctataaaacctctaatagggtatctggcacagagtcactcagtaaatggtagctattaattgagtagaattttgagaaattaccatcaatggcttgaatgtaaagctaaactcaggcacggggaagggcatgggcagtgatccataaaggagacactttgggcttggggcagcgaggtaagcttgggtagcacccacgggtagaaatgggactcttactctttgtgttagaattatggtaaaaacacacacaccaagagacggtctggggaagagcctgccagcctaacaagaagttagcacctttggaggagagctctggttccatcagagaggctgtgtttttggaaggatcctttttgtagaatttcagtacttagcttagtgttcattgcactgacttgaattgcctctgaagtcagagggagtcttcttaatattcttcatggcggcaaatcttccgcttatgaggtggattctacaattcagagccacatctaatgaattaggtaggggataaagccaagtaattctgattcagattaaaagagaagaccaaactagtgtgattattttttttccccctctggcttaagctggcttttgaaaacaacagtatgagtaagttatataacactttaaaaatcagtgtcataattttatattttacaggtggaatgtatatatatattacaggtggaatatatatatacacacatatatgtatattttacagttggaatatatacacatatatgtatatatacacatatacatatatgtatgtatgtatgtgtatatatgtatgtatgtgtatatatgtatgtatgtgtgtatatgtatacgtatatacatatatgtgtgtatatgtatacgtatatacatatatgtgtgtatatgtatacgtatatacaatgtatgtatatatgtatacatatacatacatatatacatgcatgtatgtatatgtgtatatatacatacatatacacatacatacacatatatgtgtatatgtatacacatacatacacatatatgtgtatatgtatacacatacatacacatatatgtgtatatgtatacacatacatacacatatatgtgtatatgtatacacatacatacacatatatgtgtatatgtatacacatacatacacatatatgtgtatatgtatacacatacatacacatatatgtgtatatgtatacacatacatacacatatatgtgtatatgtatacacatatacatatgtgtatacgtatacacgtatatatgtatacacacatacatacgtatagatgtatacacacacatacatacgtatagatgtatacacacatacatacgtatatatgtatacacacacatacgtatatatgtatacacacatacatacgtatatatgtatacacacacatatacgtatatatgtatatagacacatatacgtatatatgtatatatacacacatatatacgtatatatgtatatatacacacatatatacgtatatatgtatatatacacacatatatacatatatataatgtatatacacacacatatatacatatataatatgtatatatacacacacatatatgtatgtatattttacaggcttaattaactttctttttcttgtataaaaaccctatgttgtagctacagctggagcctgggtcctctgcacggagactctggtgtgggtcttggcgaggtggtcagtgaattcttgatagggacacttggtgaatacagccgtcctccagaggtcaggggtcaggtagctgtaggtcttagagatggcatcaaaggtggccttggcgaagttgctcagagtggcagtgcagcccctggctgaggtgtagcagtcatcgataccagccatcatgagcaacttcttgggcacaggcgccgagacgataccggtgcctctgggcacgcggatgaggcgcacgagcacggagccgcagcagcccgtcaccttgcaacggatggtgtagggcttgccgatcttgttcccctagtaacctctgcgcatggggacaatggagagctaggccaggatgatggccctgtggatggcagtggccacctccttggagcacttaacacccagaccgacgtgaccgttgtagcccgcaatggccacaaacgccttgaacctggttcgc

SEQ ID NO: 3158 - DNA, 2300 bp, Homo sapien
tcttattcccctttagagagatggaagaaaatgatatccaatatccagtgtgggagaggactgtaactctcttcctggagtgcatcttattgacagagatcaaaacctagaaattcctctgcaaaggaattcagtgaaaaaaagaaatcataagcacgtacacagatttatctacaagattgtacactgcaataggaaagaagtgaaagcaagctaactccagcaagaggattggtacatccatgctatgaaaagacatgcactgattgccaaataatgttgcagcatgaaccgttcaagaaatgaaaagcgtcctacatgaaaaaaatacactgagtgcatgacaggagttttctagtccacaacatacttaggttcccagttgcaaatcaataaagtgacactctggtttatgtatcaaaagaaaagaaaaagaaatgaaaagcaaaaaaagggtttacattttatgaagtgaacagagcagaccacaaaacagaatatacagtatgattctattgtgtgtgtatgtaatttttttgtgggcttttctgtatctccgaaaattctaatataaaggaatactgcttttgtaataagatttttaaaagaaggtcctcagtggttaagtacttgtctgtggtcagagataactggcaaagaagaggccaaattttttttgagactgcagtctccggtgtaaaatgagggtgcaaggtgcatccccgctcctgatttttgaatcatcccttccaccaccttggaatgacttcttacgtagaacagccagcaagtggagaaacttgcctcaataatgcaaaactgtctccctaacttacttcctttcaatgttcaagcaaaacaaagccctctctacatccaacatgacagaaacccaacatgacagaaagtatgagaatggttggaaattgctgaaacagcaacagtaaagatttaatgagctctcaaagtacctctagatgtgcaaatatgacaacccaataaaaagaaacacacacataacctagagccttcaaaaatctagatttctgcctttccacaccttaacttggaatcattcaggtgggttcctaagcattctctcggaggtgaggaatcctccaaagaggagactctaggaggggcccaggtgtggcaatcttcaaaaggatgagggatgtccagaggagaggtggcgggagggtgcacttaaaacacgcgaaaattggaaacgtgccttctgcagtcagttccttcggattttccggcatttagaagccagttctactccttcagcccgaccgtatctgcaggtctcacccaagaccaagacccccgcccccacccctcctccacccggcctcgagccccgccccggacgctggacccgagcgtaacgggagcaggtgttcacatcaaaggtctgggtcgcgaaggcagagactccatgtgccgcaaaaaaaactccacggacaattgggagactcctttcaaaaaaacaaaactccggagccacgcgactccgcgctcagggggcgtgggtacggcccaccacgagggcagggctcggcgccagctctcggcaaaactaacaatatttgttaggccctaaacaaaaaggccctaacagcgataaatccattcacttcgggagtgtagcaacctgggacaccaagcgccgcccacgccccagctacgcgcctcagggacacatcgattgaggcgcggctactttcgcgcacgcgccttgcatgcccgtgcttcgcccttacagcagagcgcctaaaaccgctacggtggctctgctggggacaaattattcacgtcccactgttctgcaaacccaatccgggaggtatgacctggctgggacagtttaggaagatggccacgaaggcacctgggggagtagatatatgtttttgagaatgagaggagtaaatcgctggacgaccatgagcaggaagaaaattaggcctccacctcccaaccagtggccctgagttggcaacttagacagcgcgcgccagcgccaggagccccgccttgggggcgtggccgcgcgctggtcggctggggcggggcctgcttctggcctcatctagccccgccccaggcgagggcgccgcacccacaccgcgctgcgcagttttgttctgctccagctgttcgaaggtgatccaggtgagtgctagcacctgcgggcagccacgagcaccgggccgccgggggcacttcagcctttgcgcagggcactcccatatttcagcctatgcgagctgaatagagacccgctgtctcta

SEQ ID NO: 3159 - DNA, 2300 bp, Homo sapien
aaaaaaaagaaaaaatatacataggctgggcgtgatggctaacacctgtaatcccagtactttgagaggctgaggcagccgtatcagttgaggccaggagtttgagaccagcctggccaacatggcaaaacccccatctctactaaaaaataaaaaaattagccgggtgttgtggcgggcgcctgtgatcccagctatttgggaggatgaggcatgagaattgattgaatctgggaggcagaggttgcagttagctgagattgtgccactgcagtccagcctgggcgacagagcgagactgtctcaaaataaataaaataaaataaaaaaattttaaaaatacagaaattagctgggcatgtcaatgtgtgcctgcagccccagctacttgggaggctgagttgggaggatcacctgagcccagaaggtcaaggctgcagtgagctgtgatagcaccaccatactccagccttggcaacagagaccctgtgttaaaaaaaaaaaaaaaaaattacctattgccaggctgtcctctagatggttctatcttatacttccctcaacagtgtagaagagggaaaactaggtacttttaactacagttatgtgttcactcatgatggagatatgttctgagaaatgtgttaggtgattttgtcattgtgagaatatcgtacagtgtacttacacaaacctagacagtataacctactacacacccaggctatatagtctagcctattgcttctaggctgcaaacatgtacagcatgttactgtactgaataccataggcaattgtaacatagtggtatgtatttgtgtgtctaaagatatctaaaaacttagaaaagatccagtaacaatatggtataaaagacaaaaaatggtacacctgtagaaggcacttaccatgaatggagcctgcaggactggaagttgctctggatgagtcagtgagtgagtggtgagtgtgaaggcctagggcatttctgtacactgctgcagaccttacgtacactgtatacttaggctacactacattcattttttaatattttatcttcaataataagttaaactagattactgaagcttttttactataatttttaaacttttgaatcttttgtgacaatacttagcttaaaacactaatacattgtaactgcataaaaattgtttctttgttttttgttttcttttgtttttttcttgagacagagtcttgctgggtctcccagcctggagtgcagtggtgcaatctcggctcactgcaacctccacctcccggattcaagcagttctcctgcctcagcctcccgagcagctgggattacaggcactcatcacctcgcccagctaatttttttatatttttagtagaaacagggtttcaccatgttggccaggctggttttgaactcctgacctcaagtgatctgcttgccctggcgtcccaaagtgctgggattacaggtgtgagccaccatgcccggccaaaaattgtttcttcatatccttattctataagatttttttttctatgttttaaatactttttttatttttaaagaagcaacaccattcagttcagaacacccatactgactttgagctgatggcctttgtaggtttctaactggaagtgaaattttttctatttttaaaactttctttttatttcatagttactttttaagctttttttgttaaaaattaagacacaaacacacaccttatcctaggcctatacagggtcaggatcatcagtatccgtcttctgcctccacatcttgccccagtggaaggtcacatggacacacctgccatgtgtggagctgtcctctcctatggtaacaaggccttctggaatacctcagggaggacctgcttgcacctgttttacagttaacatttttttttaataagtagaaggaatacactataatgctaaaaagtatagtatagtaactacataaaccagtaactgtcacttatgatcattatcaagtgttatgtgctgtacataattatacatgctatacttttatatgactggcagcgcagtaggtttgtttacaccagcatcaccacaaacatgtggatgatacagtgtactacgatgttacaatggcacagtggctatgatgtcactaagcaataggaatgtttcagctccattacagtcttatggggccattgttaaatatgcagtccatcactgaaacgcatggctgcatgtggtagaaggtttcaattcataaatattaatttatactgctggtttatgactaaccc

SEQ ID NO: 3160 - DNA, 2300 bp, Homo sapien
taaggcaaggtcttgctctgttgccccatgctgcagtgaggtggtgcaatcatagctcactacagcctcagcctcctgggctcaggtgatcctcccacttcagcctcctgagtagacatgagagtctccctgtgtggcccaggctgcctggcctcaagtgttccttccaccttggcctcccaaattgttgggactgtaggtgtgagccaccatgcttaggtggcagctttattttaaatgacctgtttgccccagatgtgttgaatttaaggataggctggaggttcagtcatttttatttattttcaaagaggtgttcagaattcacactctgtttttcttttaataactactgtggcttcctcctcatgctgactttctacacttgggaagagaatgtgggcaaggaagcttggagggaagccagagactccttgctctctgcagctgcacagacaggccaggatctgctgacctgtggaaccagcccgctgcagtgtgtgccccccagcccccggaggggcagcgggcatgcctcagagagcagctcagagtgaagacggtagaaggggaaaactgatgagaattattgtgaatcatggtggggaggaggggttttaagaagttaggcctgttaggctgggtgcggtggctcacacctgtaatcccagcactttgggaggccgaggtgggtggatcatctgagctcaggagttcaagaatagcctggccaacatggcaaaacctcgtttctactaaaaatacaaaaattagctgggtgtggtggtgcgcatctgtaatcccagctacttgggaggctgaggcaggagaatcacttgaacccgggagatggaggttgcagtgagccgagatcgtgccactgcactccagcccgggcgacaagagtgaaactccatctcaaaaaaaaaaaagcagttaggcctattttgctgtgctaagagaaacttacttttaatgaactgagctgcatgcctatcccaaattctgttttaaggaagatgctctgaccacagtgtcagtttggctctaaagtttcaagggatactgaaagggaatattggaaccaaatgaatctgaatgggaatcccaggtctgtcactgtctgttttagaccttggaaacattacttaacctcttttgaaaataaggatttaccatcttgttggttggtttgttaggatgattagatacattccagatcagggtaactctcctaggttaaaagcagggactgaagccaggcaattaccagggatggaaattttaaagctgacggcagaacacacaccagagctgctggctcgtggaagcctttgaagtgatgatttgatgggcaatctgagttcctcaggagctgcccaaagcctcataggctcaggagccatgctctgctttcagagtactcaacctgggccttcccctacctgtgtgagatgtctgctgctgcacccgcacgtgccccaggatcgaagggaggcctcagagtcctgccctcacagtgtcccccatgtctgaaggcaaaaaacttggaatcactgtgcatatactattttggatgctcgctttcttgctttctcactttcttgctttctctctctctctctctccctctcctccctccccactccctctctctccctctccatccctctccccaccatgtcctgctcctctcactccctccctccccctccctatgtaatgtatactttagcattttaccatgttaaatattttttcaataatgtgatttttgttggctatattattctacagcaacgactactgcagtggtgtagataaatctcataatgttgatcagaatctcccaggcacaaaagagaaaaaaagatacatgactgtatacttttctgtgtatagactgcatagttgagtaatttttaaattattttatatggtactgtctttgatgacttctcagaaacatcagattgattcatacctttttttggtctctatttactcatttgccagtaataaagcatcttgctccctaaggcttcacaccatgaaatagccacagtgctgggggccgtcccaacgtgttctttcttccacagacgcaagatggctgtcctctctaaggaatatggttttgtgcttctaactggtgctgccagctttataatggtggcccacctagccatcaatgtttccaaggcccgcaagaagtacaaagtggaggtaagtgggaacacaagctggtgcccttgtaggcttgtctgggggccacaggcttagccaagaacttattttca

SEQ ID NO: 3161 - DNA, 2300 bp, Homo sapien
tttttctaggcccatagcccaaggactgtactgcctctaccaacaagaattctttaagtttgccaactcagcaaatcctcttcacaagaactcctgggactctttccagggagatttcacaaatctgcaatttctgttacaaacttgaatagccagctggtaaaggcggtggctgaggatcacacacactgtaggcaattaaagcaaagagcaatttttctttcttttgtatcaggattaagtcggggtagagaagctgtttcctcctatataaagaagagatgtgataatgccttctggctctgccaagtcactgctctgtggtttagtgtggatggtcaaatactaaattctccagtcccctgcaaatcagttttattgctctggctacattttacacaaaatatttacatttttctccccacatatattccataaaacccagcaaaataaacacaacacaaaaccaaaacaaaaagccccttcttccttatctctgtgaccttcagagttcccagagtaaatccagtgcctagcacagtgcttagcacacattaagcactggattaaaaagttttatttcagcaagatgaataaattgtggagagctcacgtagaccatggtgactatggttaccaatactgcatcatatacttgaaatttgctaaaagaatagatcttaaatatttcactatccaaaaaaagccattaactatgcagaagcaatggataattagattgaccgtggtaaccattttgcaaggtatacatacattacaacacgttttacaccttaagtatatacaatttttatttgttaattatacttcaataaagctggggaagaaagtactgaataaaggtggggttttttcctttcccaattctgattaatgtgcagaaatattttaatattagaatgtggagacaaagtcctcattcgtagtcattagaaactatctgtgagcgttccttcattcccagcacaaatgattatcttccccacaaccccgccccgttcttttagaattcctctcctatgcacacatttgaagacaataatacatcagtcctggttttaaaagggggaacagttggctgggcttggtggctcacggctgtaatcccagcactttgggaggctgaggcgggaggatcacctaagctcaggagttcgagaccagcctgagtaacatgctgaaaacccgtctctactaaaaatacaaaaattagccggacatggtggtgggagcctgtaatcccagctaccagggaggctgaggcgggagaagcacttgagcccgtaaggtagagggcgcagtgagctctgagatggtgcccctgcactccagcctgggcgacagagtgagaccctgtctcaaaacaaacaaaaaacaaacaaacaaacaaaacaaacaaaaaaggaagttaacagaggcacgacttcccccaccagtactttgcgaactctgttctggcccgggtaaaacaactcacgatcctaccacgcaactcatcagctttgcttttcctccctacccatccctgcccggaggcactcgcgttgccccagaatcgctagttgcctacacacacaaccttagactctccactgtcactgtcttgtgctcaagtcaacgctgcagaacacaggaaacgggggctggccgggaaatccgcgcatccggccccagggcgccccagcctccccggctcgttgcagttaccggttgctggctcgaaagctttctcggtaccggaggcgtccgccggctccacgcgggccccgccgcggtaattgagcggctgcgacacgacgaaggtgccagtgctcatggcggcgacaggagagggccgaagactgcgaagaagcggggagagcgcggccaggcctgctcggagaaacatgagtggcggacgcagctccgcggcagaggctgacgggccgcgggaggggcggggccgcgggaggggcggggccgcgggatcggttctaggagattttaggggcagtcactcgattcctctgcggtccaggccaggccctcccctcgccaggagggtggagcaagacaccacattctccccaccaccccgccataccccacacagtctccaggcgggaagaggacttccttcttcgtgatcaatatttgcgtagcactttgcaagtgttttcgggttcatcattgcatgtaagcatcctaggatcccattcttaatcctatcgcctgaagaaggcagaggattggagtgccaagagtctttggtggttacttcactgctaaaccaccgtttc

SEQ ID NO: 3162 - DNA, 2300 bp, Homo sapien
ttttgctaatgaaaaataatacattaataatctaataataagggtggaaggagggagaggatcaggaaaaataactcatgggtactaggcttaatacctgggtaatgaaataatctatacaacacacccccatgacacaagtttacctatgtaacaaatctttacatgtacccctgaacctaaaagttaaaaataataatttaataataaaagcacagataggtaagaggaacagctagatatttaaaaggtagatattttggaggagatctgttttctttggggaagggtcttactctgttgcccaggctggagcagtggtgccatgatcgctcactccagtcttgaactcctggcctcaagcaatcctccacctcagtctcttgagtagtcaggactacacgcttgtgccaccatgctcggctaatttttaaaaatattttgtagagacagagtctcactatgttgcccaggctggtcttgaactcctggcctcaagcgatcctcctgccacggtctcccaaagtgttgagattacaggtgtgagtcctgtgcctggccagaggtttgtcagtcttatcatctatgaattaattcaatagacatcacgaccacatttccaaaacaaacatcaggaattatgatgtgacaagtcaaaatgcattggttggggacagaatcttttaaatagaaattgtcccataaaatttgagacgtatagtttctgtacctaaatgaccattcagtgatcttggaaatctatagtgctgctcgtcaccaactcctgatatgtttcaattctgtttgcaatggacaataataaaataatatgtgagtgtggcctcaggtattctgagtttgggcactgctgtttccatctgaggaccaagacctacacatctcagtagcactgaaaaagtgaacaaactggtatagagtgccagaaaacttgatcagaatacattatatatactctaaacctgaaaaccacactccctaatattgcgctggtgagctggcaggtaaaggaaaaaacattgagaaagacagcagcccccagaagagaaacaatcctaaaagaaatgtccaaattgccaattactttctgtttgtcaaagtctctactggaggtgcatggaagtttggtgagaagaatgaacctttgtgcaagatccctcagctgacagacctgtgagtgcctctgggtggctgctttgtcttacagaaggcattttgtttcctgacactttttcctgtggcctttgctcttcgtattctgtatgttaggcttctgtttctatcaatatttgtcattaatagcatttacattgctccttcagaatttatttattttgagacagggtctcgctctgttgcccaggcctgagtgcagtggcacgattatagctcactgcaagcttggacccccggggctcaggggatcctcccaccttagccgcccaagtacctggggccacaggcgtgtgccaccacacctggataattttttttttttctgagtttcactcttgtcacccagactggagtgcaatggcatagtctcggctcactgcaacccgtctcccgggttcaagcgattttcccacctcagcctcccaagtagctgggattacaggcgcccgccaccacacccagctaatttttgtatttttagtagagacggggttttaccattttggtcaggctggtctcgaactcctgacctcaggtgatctgcccgccttggcctcccaaagtgctaggattacaggcgtgagccaccgcgcccggcccaatttttattatttttattttatttttttatagacacgggatctctctctgttgcccgcaaactcctgggctcaagcgatcctccagccttggtgagagccacagcgcccagtctctctttaagaatttaaaaagcagtttcagatcacaatatcatctatctcgttcacagtccccttgctttttactgtcaccctttaaaaagcattatacaattacagaaacggtggtttagcagtgaagtaaccaccaaagactcttggcactccaatcctctgccttcttcaggcgataggattaagaatgggatcctaggatgcttacatgcaatgatgaacccgaaaacacttgcaaagtgctacgcaaatattgatcacgaagaaggaagtcctcttcccgcctggagactgtgtggggtatggcggggtggtggggagaatgtggtgtcttgctccaccctcctggcgaggggagggcctggcctggaccgcagaggaatcgagtga

SEQ ID NO: 3163 - DNA, 2300 bp, Homo sapien
tatggtgtcctggagccaaattaataaagcatatcaaggtttctggcttacactactggaagcatggaggtacccatcaccaagatagggaaatcctggaagaatatcacgtttgtgaaggtaaagataacgagtttggcccagatatgctgaggtacataatcaacactgagtaaattaaggaacagtaagctgtaattttaaaagcctgagtctggtctctaattctttgtttgctctgtgacgtaagttgtcattatcatcctgaggctcaattttctttcctatgacatggaggtaatatttatacgagtaaccacaaatggttgctgtgtagatcaaatatggtaatttaagaaaaaaaacttcaaacccctatgaagatataagaaaaagtcacagaatacagaaagttgtaggaattctaagaaacaaaagttatatttaatccttataaggaaaaaaagaagagagaaaactaaatcaggcctataaggaaccattcaccctgtacctttagctgagtcctgtggaattcctgctttatttcaaaggtaacaaacccttcttgtttttaatcttttccttaaacacctcttcaactttctaacccaactgaaactcggcttatctctgaagacaccacttaccttgacaccagtcataatgacatatcatcctccaaacatgccttaaatgttaagatttccatatttttgctcatatgttatttctttacctggaatttcctttccccatttcattctctatccaaattctaactatccacaaggaactgcaaggccatcagcatcatgaaggctaccatggttcctcacaactgaatgaagcctcttcttcttttttttttaaagacaagtctcactattgcccaggaggcagtgtagtgacaccatcgtggcccactgtagcctcaatctcctgggctcaagggatcctcatgcctcagtctcccaaatagctgggactataggtgtgtaccaccatacccagctaattttttctgtagggacgaggtctccctatgttgcccaggctggtgtcaaacccctaagttcagtcctgcctcagccttccaaagtgctgggattaacaggagtaagccactgcgccagattgaacctcttctttagaaccaccacagcacataacatgtatctgctacgcccctcacttccctctagttggtattacacattttgcataaaagtcttctatttctaaataggcttcaagtcaggttcatctttgtatcagctggtgctcttaaaatatttattgtgaacatggacttaatgagcttgacgtgttgaaattatttctaatgtgttgccatactcacattttttactctgtttttccacttctgccttcagtctcttgtacttgtctgtcctgtaaaccaggacccaggttatgcctaaaacattaaaagcaacatgttaatagagaaatgactggaatgatcacaacaaacaaagtggttactgttggagaaggaggaattccaacttttcgctttgtatttacccatagttaacttttttcaaaggctaatacaactgactcttcagccaaaacaacagtaacatgatgtgaaggtgtctccacaaatacccaagtgaaatctacctgagaccaaagaaaactcggcaatcgactccatactcccctcctgctcctgttcacgagttgcccagagattccctgaagtggagtagatgagcctctcaagcaagtaaggctcgcgatctttcccctggtggcacaggggaccccggggcccttcctcccggggactgatcaaacgtctgagaaatacccgctctcaccctctgcgagcagagccgtgcacacagagataaaaacgatgaggagagtgtccgcgaacatagtgctcatctcgcaccttcgtctctgcactctcacccgccagggggaaagcgctctacagccaggaaaagtgaagcgaaaacggcttccgtagactccgccaccaccgagtaacagaccaactctgacagcccgaagatcgcacttccgcttccggggcatagcaccggaaaggctcgtatcggagaacggtgtggccacgagagtctagaggaaaccaacccgcaactcactggagctgaagggctggtagtcaggccgaatctcgcgagaattggaactatttcagagccagaggaggatagtggcggcggcgaactttgcccggtagattttactgactggggtgctggcgcgcgcctttttctcggccagaatccagttat

SEQ ID NO: 3164 - DNA, 2300 bp, Homo sapien
atcaatggtgtgtcatggtttaattagttattttttcctctttagtagtagataaaataatgatgcgtcttacaatgaatagcatgttgaatttgatgaattgtgtgtgccaagcactgcttgaaatgctttataatatacttttcctcatccagtcttcatagctgatgttaccaccattttgaaggctcaaagatgctaaacaataggttctaggactgctgtcaagtaagtggcagagcaagaatttaaaatcaggtctgatttccaagatcatgctcttattgttatctcagcacttaccttgggtgatacaaaggtgaataaaaacctatccttgtctgaactgctcaaataaaggtctagctcaaatatgatctttctgaaacctttccaactccccaggaagaatacatcttgttttcatctgtaccccctcaacattttaagaatacctctataatacctataatcttattatattatataatctccctgggcccttagaagtcaggaatattctcttaaccatccttttgaccctacagtgcctaccacagttcttgacatatagtagaagctcaataatgtttcttaaaaaggagacagggtctctgttgctaagtctgggagacaagaaatgcacataaagctaaaaaaaagtcaaaagtagtgtttaggagaattatatatttaagtgcagtacagtttaaaagaaccaatgagggccggccacggtggctcacgcctgtattcccagcactttgggaggccgaagtgggtggatctgaggtcaggagttcaagaccagcctggccaacatggcaaaaccccgtctctactaaaaatacaaaaaattagctgggcgtggggacgggcacctgtagtcccagctacttgggaggctgaggcaggagaatggcttgaacccggaggcagaggttgcagtgagccgagattgtgccattgcactccacctgggcaacaagagtgaaactccatctcaaacaaacaaaaaaacaccaatgataggaggaagtacaagaggatacagctcagccagcttccaggttttcacccatacacacacacaccccagtgtgaaaaagctgaaaccgtctacaatggctgaaaccacgctgctgagacatttttgaattttaattagttagcaacacttataaattaagtttcacataaaacccaggatttctggattttcctgagaaacgaagacatctcagaaactgggtgctcattctcctagagaaatgggttggatttgggtatcaaattctcctttcagatgaacttaatgctcacttatccatcgtagtaacttccaccatttgtttaggctcagcttgcataagataatttattttctctcgccagtctaggcatctgggtttaagaccccttctctagatacattactcactgcactatcacactatgaattttcaggcatccgtgctttgacttccactttgcctagaaagtcctttgctatctccaaaagtactcctactcccctaaggcactgcttcaattcctttcattagcttcttctgaccactctctcaaccgtgtcacgcagcactgtggtaatacctctattaaaacccttatcagagcgtatgcacaagcttctcctcttcgcgctgacgttcgctccttgaggccagcggcccacaactaactcatttcgcggttccagcttcacgtccatgccctggcacctacacccagtcgttcagtacctttgcggaagtcagtcttcttacttcacggcaaacccaagctaaactaatattacgaccacagaagttgggctgaggtagaagtcaagactatcccaataactggattctggccgagaaaaaggcgcgcgccagcaccccagtcagtaaaatctaccgggcaaagttcgccgccgccactatcctcctctggctctgaaatagttccaattctcgcgagattcggcctgactaccagcccttcagctccagtgagttgcgggttggtttcctctagactctcgtggccacaccgttctccgatacgagcctttccggtgctatgccccggaagcggaagtgcgatcttcgggctgtcagagttggtctgttactcggtggtggcggagtctacggaagccgttttcgcttcacttttcctggctgtagagcgctttccccctggcgggtgagagtgcagagacgaaggtgcgagatgagcactatgttcgcggacactctcctcatcgtttttatctctgtgtgcacggctctgct

SEQ ID NO: 3165 - DNA, 2300 bp, Homo sapien
gggctcaagtgatcctcctgcctcagcctctggtgtagctgggactacaggtgtgcactaccatgcccagttaatttttgtactttttgtggagatgggggtctcattatgttgcccaggctggtctcaaactcctagcctcaagtgatcctcactcttctgcctcccaaaatgttgggattacaggcatgagccaccccactggcctttggcattcctttatcctcctcctcttctccttaactacctaatatccccatgctaacccttagctgtaggttcaacttccaaattccaatgggctataaagagttctacaaaagtccatgatgactaataaatctatctagtagagaaaagaccttttggagaagaggctaactctaggaccacctaaaactcacccactccatagctatttggtaaggcacccctttaggaaacttcacccaaatgcctgcttctgggtaccaggtagtggccactctccccatctttgtctcctgtctgagctgctaccgagtttgatgttagatggtgacataaaatacagtaattcctagatatatgcggagggactggtcccaggacagcctacatgtaaccaaatccacacatgaagtcccacagtcagtcctgaggaaactgcacaaatattgtgttttccatctgcccttggtttaaaaaaaaagctgcataaaagtgaacctcacagtttgaaccagtgttgttcaagtgtcaactttaatttaaaagtgaaaaaagtttgttttctctggtatccttttttttgttttgttttgtttttgtttttgttttttgacacaggctctggctctgctgaccaggctggagtgcagtggggagatcatggctcactgcagcctcgatttccctggcttgagagaaaattatttttttcaaaataatcttcaatttaaggtaatttactaagtttcaaaagataatgctattgacgtaaattctgttttagattgtaggccccatcagctcattgatactagtcccaagttcacaggagaagagactggaagttactaggctagtcctgcctctctcaggtgtgtcccagcaaaacttttctttccagtttcagcgctttagaaaccttttctcttcaaacactaatacagggcctagactgtaccagcactgttctgagaactttacatacactaattcatttaattctcacaaaaatcctgggatgtaattgccattattattcccatttaacagataagaacactgaagcacagagagattaagtaacttgctcagggacctggatgtgaatgcagaaatctggctccagaggtggagtctgaaactgcctttctaagtgactgattgccaatctctggaaaaccgttcaattgaagatattaatggatcaaaatgtcagtatgttttcagataccctaactccataggaagctcagtgtatgggatgagatactgtggtttagaagggaattgcttttccaacggagggcacccttcagataagcccctcaaattgcccttcactagagagtcgcacgaggacaggcctgctaaaaaggatggcgctggggggtttccaagacaggaaatatctaaagccagcggctgacatattatcttggcgaacgggagaagggaaaaagaaccctcattttttggaaacacaagtttttagcctggataatgggtaaatgacattaactcttcgttccacactaatctttcaagcttgttcaaattttgcttctcaaacctgggccattccttcttatctaatctgcctattatttccttcaagctttttatcccttctgaaaataggtggtagcataccaaattaaaatacagaacagcctgtttctttcccccagggtccactagggcgcgtcggagaaagggttaaccgggcgggtgggagggaaggtcgggctcacacctttcgcagagacctcgggcggcggcggggcccgggaggggcggaggctggggccagacgcctcgccgcctccgcctcggcgaatagcagcgcgctgcccgcccggattggagcagcagcatcacgctgacctctgcctgggatgtaaaccggaccagccgctgcgggcaaaggaaggctcttggctccttcgggaaacccagccccgtcaccgggctccgagcggctcgcaggcgagcgacagcggcctcagccccggcagcgcccagcggcggctgcggaaagcggagggagtccgacgcgggcgcgggcggggagcgtgcgtccgttcgcacag

SEQ ID NO: 3166 - DNA, 2300 bp, Homo sapien
ataaaaatgtacaacatgctttgaaaactgcagaaaaacggacccttcctttcttgagagtttctacactcttcctcctggataaaaatagcagagaattagctactcccacattggctcaccactatcccatccctcactttacccaagtaacaccaaaagcttgattatcaagttagaacaggtgacgactgagaaacacacaagaagaacaataacagagttattcaccttttagggtcgcagttttcaccctcgtggtaactaaattattcagatgattaccaagatcattttgtttctaaaagctcatatgcaagtttaagcctcctccccactttaggaggactggacttcagcttaaaatttggaccccactacatgccaggcaggcattgtgctaggagggctgggaaaacagccatgaacaacaacaacaaaaaatgctcccaatccaacaggaatatgccagaagagcaagaataattctaaaagaacaggtaaagcttcctgaagggctagcattctggttttgctttgaattactagtataagtcatagtaaagaacatactcaaaaattacaaatttttttaaaagccttcaaccagggagcacacagaacagaaacttcaggacctaaagcaggccgattcctaaccccgggagctacggacgagatcaacttcatcaataaagaagtccagcagcgccagccgccgtgtctggctgggctccttgcgctaaagtagtccagaccaggagggaaaaatgtaaaaccaacatggaggaggggctactgacgagtcggttcgggagctaaaacctcgtggctctttcctcatggcgccaaccagccttcctgctctgctctccccagccgggagaagcatcatcctgcctctccaaaccagcacccagcacccagctctcaggatcccttgaggaacccgtgctccaaatgaagttggagggtgttaaacggtgggaaaaacaagtagccacatcttaaaggctgttaggggagcaaagaaagaaccatctgggaggactccacccttctccacctgcagaaaaaaccccgggtaaagctaggaagtcatttcccttgtctctccttgccttgcggataaaacaaaggaaacaggctcctaagagggtcagacacccatacgatgacccccttccgtggatccaagacgcgtacgtcctggacaccgaagagcttggagccagtacaactttctcattgaagccgaccacgtttcctcttataaccttaaaaaacagaagcccctactattatcgtttcattgatgtcacggcacctatttggctctcagacttttacccggaaacccctgtaatccccagcccttgcgtgcagccccacactgggctccccttccccgggatgccgcctcgcgcgttcccgccaccctcgccctctcggccgcgcttcccggctcgctccgccctcggcaccaggctgcgccgcggggcgagcacgtctgtgccagaccggggcttgagggagtccatcgggggttagtgggggatcctgcggaaagccctctcccccgacactggagttgcaaaacaataagcatccgcttccctgcccttcccccataggaccccggccacgagttattaacgcggggggagaaaagccggaggagcactcccgccctgcgatcgtggccgcgtacccccggaacccccaaggcccgagtcttcgcctgcccccgccgcagcgcccccaggccgcgcggggcgcactcggcgctggagcgcggccgggagcggaggcgcgcgggccacgcggtggctgccgcaactgacacggcccgcggccgccggccacatgcgccgcccagggacagaagccgggaagggagcgcggctccgggccccgccgtaccttgccgctagctgttcccccgctgacgcctataaggaagggctcgccgccgttgggctgctggtggttctgcagggtctgctcgctgtccccggccatggttcgcgccgcccctcctcccgctgcctgtgcgaacggacgcacgctccccgcccgcgcccgcgtcggactccctccgctttccgcagccgccgctgggcgctgccggggctgaggccgctgtcgctcgcctgcgagccgctcggagcccggtgacggggctgggtttcccgaaggagccaagagccttcctttgcccgcagcggctggtccggtttacatcccaggcagaggtcagcgtgatgctgctgctccaatccgggcgggcagcgcgctgc

SEQ ID NO: 3167 - DNA, 2300 bp, Homo sapien
tagtgcttggctcattaaatactgattgaatctgtatctgaacaaaggtgattttgtatgagcctgggactcaagatgggccagacatgaggtcgaacatacagagctagtcctgctgcctctgatctgaggcagccctcgtcagaccctcctcctcaggtgtacatgtgtgttcaacccactgtctggcagagagggagatggaggggcagggtggctgccagagtggtttttgccctacagccctagatcagcacactgctcctttagctggcttgggtttcttataattgttagaagcaaacctgggcatggtgcctattgtgtgtactcccccagtcatgggtttgctttccaggtcagtttagcatgtgccaatcctaggatgataacagctaaacttggagaggggaaagaactgactgaagtcagggatggaatgtcaaaggagagaaaaaagaaatctatttgtcagaactcatttatacaccctattttgagatacagggagcatccattctgctttgggtaaaaatccagctttttagggagcagtatgattacctttaaagtgtgatgtgcccatatacatgtttatgaggatgccttgtgtatgattataggagatcctattttaaaattaagaaacattttaacaatttggtatttttcagatgcctttgacaatgaactcattctcaaaacactcaaagaaatcactgaagggaaaacagtccagatccccgtgtatgactttgtctcccattcccggtaagtgagctgttctgggccagggatggcacccactgctccgcagagcatccctggtctgcactgagacctccttccttacctctcgcacttcagacctctgtcctacccctgcctaatgccattccagctggtcagtggagtgggtggtggcagcagtgtgtgctgtgggattgtagaggttggggagttcatctgagcgctccctggaacagtcctgttgtcacgattccttaactctgaaggatgggatagtgatttcagcttgagggactgcatgtgcattctgatccacattccagtgctgctgttcctggaacaagatgtaaggggaggggtagaggaagggcaggaagaagagcaaagaaaactgttttttctgctgtcctggtttacttgggattggacaatgtggagaggcatgaggtcaccagatcgtgatctcagaattaaccaagccctccagaaagcttctcagtggaatcaaaccagtcctttccagtgaagcctcaattttagtgctcctgattaggaatagaggagtggccacacttccacctcatcctccttccctttgagtgatgggaatgggctcctagaagattgcactcctgctggccagaccccaggctccttcagagcgtctcagacctgaatgtagaacacacacatcttcccatgagtctgaactagagagcatggtgacgatttggttgcaggaggaagatgagagagagagagagagagaatgagcatgcatgtgtgtgcgttgaggtgtagagggggctgttttggtgcttacctccatgcctcaccagaatcttctgaaacacttccttctatgggccaggttcttctgtgtaggagagaggagagtgaaagatcaggataccatcctcacgcctcccgtgtcactctgttttcctaacccaaccactgcagatcatggaggaatgaatgaaggcatttcgtataggatttggagcttacacgaacatcaaggctgggagagtgaaggcctggaagtttatagtcagagaatcagacaaaatagtccccactgactctagcctgaggcactggagcagaagctggggttcatggaaaagtccaagaaaccaccatgtctgggtttgcagcctcaatctgggagcttatggactgtttgcaaagtttccctgtctcagtattatgatctcctgaatattgtggattttgcttcactctcaccttcgaagtctcttgttggcgtagtaacctggaagcatgtggggcaagggattctgagaattgtagttctcccttagggggaagtggtggtggtgtcacgttgacaagagacattccagcccaccacttcccaagtaaagaattaaaatgcagcatgatggctaaggcaagggcctgcagaagaatgtaaaggagggaggaagagcaggggattcagagcaggttgtatggaggaggtgatatttaagctttagataggaaaggataagaagttgtttgggaaagggatttccaaggtg

SEQ ID NO: 3168 - DNA, 2300 bp, Homo sapien
tgttcatttcattgttgaccaccctagtgcttggtggactgtgcccttagctatcccactgtggctgccattgccagaaacattttggagaaccttttcttcccattgctctcagagcctgttcgagccattcaggtaaattggtctccattattacctggtcacaccagattttcccccagactcagcaccatccagtctgattccccgtttctgggctcagtttgactctaaatctgttttgctattttaaaaagtcaaacctggtccccagcagagcttgccacccggagactttcaggagaccgtgcaggctctgaagggagctcccagtcacagcagccgcctacttggagcaagggaaggctcccaagatgcctcctttgaaagccggtgctcaccaagatcagttcaggatcaatcattatccttgtagtcatgccttgatcagttctgagatgaagcagggaatgcaggcctgggttagtatcctgaggacacagggcccctggccttgatggcactgggctgtgctcaggtgaagcccacccgtgtctgggagagccttggcttttcagtgggcagcatgctcaactttacttgaagctcccaggtgccaaaccatttagtgccttggctgtttatcccactgccttggaagatggactcctctcatctctgagcctttacctagctgcttcctcatctacctgtggtgttgggaccaagcctccaatatctctgaatagcccactcctagcttggaaacagctataagggctgccctgccccttgtcaaatgatcaccaattcttggtggcttggctggggacaatgaacagtgtctgctggggtctgtgacacactgtttctggaacaaggaagggatggaaggctctacccctccgtggcagcccagcatttggccaactctgtatctgaacttgagctttctatggaacaaacaatggtcttagttttttaagagcctctgggtctctgattccatggagagtcaggagtagaattagtggaccagaaaccatgacatttgccatctaggtactctgctgttcagggtggaggcacagatgagcagagtggggtgatgttggttgtatgtgcatagaagtcccctggctccagagccatccagtggtgcttggttctctcttcctgcccaggtattgtgtgtggaccaagtgtttaggaaacaagcatagaagcattatgtcacaggaaggcctggcctctcactccttcacactaatgagccttctactgacccaagtttctttttctcgggcagcctgggaccactatgagcagagagatgggagtctgtgtaagaaggatgcaagtatcctttgatttggagtggacagagcaggtccttgcaaaggcagtgggttaaacaacgggatgtctgtgggacaggccagggaaggagggcagagacagggtctccagttcaccttgccgcagaactagcctaatcatccctgcttctggtcttggccacttggcaatcatggggaagttgactccccgcctcacttgggcttggagctggatacttgtggccacgcccaggataggttgccagagtttcattaggccgctgggtcgggctggaggcttgtgtacacctcggagcagtcgggcagcaggagggccggaagcctggttggtttgtatatgacctctcttgcccttgtgcactttccttgatttagcaaccttgacctgcactggccctcacagctgttggagggaagtagcctcttgcagggaaatattttcccctgccctggaatctcctatgtgcctgttaaagattccagggccaagaactcggcaggctgaggagcagctaggtaggtgggttatgcggttcaggactgcttctggaagggactgcctgtacttctgtaccaccgttgccctttacactttgctcagggcggggtgggggaagcattcaaacaaaacaaggaagggaactgtctggcaaagcataagtggatgcatccagagctcagtcccctttaatcttttgtctctgggcgttctgctgccttcctcataccggggactggcattccaggtcagcttggctgtggtcttagaggcagggagtgcctacccagtcctgcctcaggagcagggtgagtagctaaatacagacttaggcttttttttccccccttttaagatgcttgctcctctcccttttctttttaccaccctacctttattgttagtggttacaaagtgaccacatattatgtactttgctg

SEQ ID NO: 3169 - DNA, 2300 bp, Homo sapien
ttagttcatgaaaaaattataagcatatgtgtgtgtgtgtgtgtgtgtgtgtatacacacgcgcacacacacacacacacacacacacaatccaaaatctagcaagtagctttacttcattctgggtttaggaagtgatctgattacagtctgctttaaaatagaaatctaaaggctgggcgcagtggctcacgcctgtaatcccagcactttgggaggccgaggcaggtggatcacgaggtcaggagattgagaccatcctggctaacatggtgaaaccccgtctctactaaaaatacaaaaaaaaaaaattagccaggagtcgtggtgggcgcttgtagtcccagctacttgggaggctgaggcaggagaatggcgtgagcctgggagacagagtttgcagtgagccgagatcgcgccactgcactccagcctgggcaacaaagcaagactctgtctcaaaaaaaaaaaaaaaaagaaagaaatctaaacatccccccagcaccaaataacagaaatccatctctggttccatcctctcaaagcactttcccacatcccaagtctccttctccaccccttatttaaaacctttcagcaggtcctaacaagtttcttttaatctgccccaattagggtttgattaaagcagcactagtcaaacaggcgtctcctcctagctgtggagctggaggatggctcagaggatgttgtgacacaagggtggggagacaaaaataaaaaatcaactctggggcattactggcctgtaccacggtcccctctaactacaacaaaggtgcagaaacacactgtgagaaccaactggcatcccaagcaaagcatcaaagtccagaggtggtcggcttgggacaggtgagactgcgagcagtgcagagggaaactgaaccacagctaagcaccggcttgcacgaccactgcctgtgtgacaccaggcaagccactcactgtgacacacaatgtcttcacctgccagaagttgacaatgcttacattagctcttgcaggggcacctgcgtgttgtttaaaatagccaccttttgagggcagatcctgttaaaaacctgctaaattcacagatggggttgcacctgtcagagtggagtgagtggctagaaagaaaatggctctgctcatcaatgacagtcattgggtgcctggtaggcagtggtagaagagttgaatgagaagctaagaaaggtggcaagctgataggggatagggcaccacaaacaacagagaagccgtatttttttcctttttttttttgagacagtcttgctctgttgcagtggtgtgcagcggtgtgatctcagctcactgcaatttctgcctcctgcgttcaagtgattctcgtgcttcagcttcccgagtagctaggattacaggcatgtgccaccacacctagctaatttttgtttagtagagatggggtttcaccctcttgcccaggctggtctcaaactcctggcctcaagcagtcctcctgccctggcctctcaaagtgctgggattataggcatgagccaccacaccctgacaaaagccaatcatctatctttggtgggtagcctaggtctttgaaaaacagggatagacacacacatacatccattcactgcgtgtggacaacatggaactgtttgtgttgttataatgtaaactttcctcatcttccacccatctccctcaaaaaagtttactttaaaagggtttgtttgagcaaggaaggggctgggtcaccagcctaaggaaggcaatggggcagaggccaggtaaactggatggaatcaggggaacatagcgccaggttgtcctaagaaccaaaggctcccagaaaccctggcccgggcttcccacttgacaagaactgcaagtccactaacctgaaccagtatctgagcccaggtgaggcctggggtctgccccacatacaccccaggatcatgaggcttcgtgacagcaggcccagtgacatctacaccacacatgcacagcatggcccttcctgagccacttgggccacacagccaggattcggtcgctgctctgggccaagcatcacacagaaggcgagagcctttttgtctgtctttatttacagcaaagtacataatatgtggtcactttgtaaccactaacaataaaggtagggtggtaaaaagaaaagggagaggagcaagcatcttaaaaggggggaaaaaaaagcctaagtctgtatttagctactcaccctgctcctgaggcaggactgggtaggcactccctgcctctaagac

SEQ ID NO: 3170 - DNA, 2300 bp, Homo sapien
gcgcttacagacaggtatgactcgggggctctaaaatgccctcctgatataaaagaatctcccttactggcccacttctgggcctgaaattcccaccactacagccactctttctgattaaggcattatctgtagcccctattaaaatgtaaatgtcacctgggaagggtaacactcgactctttagcacccactgactgaactgtcacctatcagagagtaggaccctgagagatgggacatagggcagggacatttggactgatggggaaagaaggcttggtggtatgggacgctggagagggaatggctgggcagctgaggggagtgtgtgaaacaatgcttgccccgggaaattacttagatggaggagatgggatggcaaaatgaacttacccacatcacaggtttccctaggctttgtgtgtgtgtgtgtgtgtgtgtgtgtgtgtgtgtgtagtgtgtctaacagtttgtatatattatacattctatgtatatacctgatatggagttcactggggcccatcatgaacataatacagtgaaactccatcaagtgaaagataacaaaagccctcaactgttttcatgtagaatgtaatcacatgtaaagtgaagcctggcatctctatagatctagatggtttgtatgtagacagtgtgtgcacatgtacgtgtacacgcactcacacacacatttactcatacccagcagtggagatcttgtagatgtgaagggtgagatgcctcttctcagccatctaggatttgaatgcacagtagctgctgcattgtggacccaaatcctagatggctgaggaggttggttgttggaaaaaggacttgctgggggagcactgtgacccctttctctgttaacagtagatcctcattcaactcaggtggctctgcagaaatggccaaggcttgggttataagacttacatgggccataccatcaagactggggcttggagacagaaatgtcgccaaagtgccctttaaacttttggagtttgggaacctggagaaggtgcaggtgaacagagaatcctgcagagagtaggtttctgctcctagaaaagctggaaattgtttgggagcagcccgcaggctggatgcaggaaccagcctcagagtaccactcatgggacctgccccctctccagggatctgctatggttggctgagctgatggggaaggtgcagagaggagaaggggctggaggaacgggaagaggactccagagaaagcttgggaagtagagatgaaagaatctgggtggggaggggcaagggagaggtgatactagaactttccaaccctattttcacattagagtcatctgggtaacttaaaaaactccgatgcccaggatctacccttcgatgctataattggtttgggcaggggaccaggcatggatattttttaagctcctcagatgattctaacgtgcatctgatgttagaatactacatcagagcagaatgagaagttttgttctgcactgttaggctgaagatggctggtcaatccccacctgagtaaaggagaatgagaagactggtgcaaggtggttggggtggaggccggattctgagggctatctagacagtcaagcctctgctgatttgtgtgactttacagccttgttagctggtgatttctaatcccatgtctggttgaaaatgtggctgaggtggaggtgtttgggcgtaaggagaaaaatttccctctctattctgaagcttcaaagagaaataattcgctgtgctctatgggcccaggaagacaaattctggggctgatgcttaaaaaatggaaatggattttgtgttgtataataaatacaaataaatacatcagtaagcaagccaataaataaaccaataaataaaccaatgcacaccattttttccctcttaaggtggttctcccctcaccccattgaacctggtgacttacactctgcccctggtcacctgaaggcacccagcctggccgtggaagggggaacaagatgactgccttggctctggctctccaaggatcagagaacacagagaaacctagagaggccacccacatggagaaggaggaggaagggagatacaaatcccccgtttcccacccaaaagcatagggagggaaggcagggtttgggaaccaaggctgggccacattaggtatttaaagtccaggctgaccagctcttcatccctaggaggcttcactttgagggttggggaaaggacttgggatctgaatgaaccccatctttctacacacaaaa

SEQ ID NO: 3171 - DNA, 2300 bp, Homo sapien
gaggaggcagaggataaaaaaaaaatacctattgggtactatcctcattaccagggtgataaaataatctgtccaacaaacccctatgacatgcaatttacctatataacaaacctgcacctgtacctctgaacctaaaagttaaaaaaattattcaccaaacccagtgatcaaggttaataacaccagtaaaaagtcatattgctatcatgtacccctgacataatgcaatgagaaggcacttcatcttcatggtattcatcccccaaatccaaaaccctggtctaatcatgaggaaacatcagataaatgcaaatgaggaacaattctacagaatatctgaccagtcctctttaaaaatgtcaaggtcatgaaaaacagagaaagactgagaagctgtcacagattgagaagaataaggagatgtaatgactaaatgcaacatcatatcttggattagattctagagaaaaaaagacattagtggaaaaactagtaaaatcaaaataaagtctgtagtcttaattttaaaaagaaaaaagatatggtctatcaacaaccaattgattcttggacagtgattctgatgcccatggtcgacacataacaccttgagaaatgccttgactgtgagttgtttctccccctcagtacaggatgagttctttcatatctctatgcattttgcatttgccaaatgctggtcctgtactactcattcacctttctcttttcagtgagactctacagtctgtcagtattcaatttaaatgtcactacttgagcaaagtcacacgtaaatctctcagtggccagagagccactgagtggctctctgaccactgagggatttacatgtggccagagatttacatgtctggccttccacggcactggatacacaaccccactaaagcaggtgtcacagtttactataataacttgttaacaggtttattttctccagtgatccatgtgctctttttcaactttgaatccctagtacctagcactatgtttggctcctgccaggcaggcagtcagcctttgctgaatgaaaggaccagtgattgaggtctgtggctacacggtaaaatgagagagacgagtcatcaaagggaaaaactgcttttttgttaactataaagtgaaccaaggtgtcagaacagttaaaacaaggatgaagagtgcttttagatctcaatcaatttttaaattactcgtcacacctgtcctagctaaagactaactctagcacctcctgcggcctgttagtcagtatttcacacttgggcagcagatccagcaaatgttcaatgatcgcagaagaaatacttagaagctattggctttgaaaataaaaatgtaagaagatgcctagtaaaagcatctgctaaatattcttcctgtttggcacattagactgcagtatcagacacatgaccgtggtcatactgtacacaatgcccaatgtctgccaaaactctggcatatgagagacttagtgctggagtacggagggattcttccggtatccccactacacacagtggtggaaagaagagcttccagaacaaacccagtcaggcaaagaggcaaatacactgcatttagtaacgctgctggagcccgcccttcaccctttctgaaggtaggatactaaaagggctcaagcctaaatctaatccaacaagctatattctgaataacgaccaatctctgataaagctgttcccctaacccttctgctgcccgaaacactcactctacagcccctactgggctaccgggttccccactggactctggacagcgccgcgccctgctcggcctcacccacccggtggcgcttgggcccgccctagtcccccacccccaccccagggcaccacctaccagggccccgccccgcctcagccccacgtgcggggccccaccccggcgctagcggccctttaaacacccccacccttacacattaccccccccccacccggacggcagccgaatagggacaaaactcatggcgtacagccagtttcctccgcggagcacgtcctgtgctgctccagccgttggggctctccaccccgggccacagcctcctggcgccccccgggccgaggcagccgggccgaggagtgtcggtgtggtccggctacggggcggggccggcgggagctccggtcgccgccgccgccgctgctgcctccgcctgcctcttgggccgcccgctcgcccgccgctgggtgcgctgcacgcggggggcagccgtggtgcagaggttcatgcagcggcgg

SEQ ID NO: 3172 - DNA, 2300 bp, Homo sapien
caagcggtggtggtggtggtaaaggtgaaccggggccagagagaaggaatcaggatagcacagcagatgtggcaacagttctcaaatctgcactaagtcactatttctttgaatgtttcctgtgagattaagttcttaattcgtagtttattttccctcatacaaaactttagcccaattctgccctgtgaagtcaaccgtgatactgcttttagaaaatattgacagcatgcaaatttccacgactgtgtcagacttgctaataccaagcagaggggaaagataaacaaggagtcctgtttgtctatgaaccatcacaaaaagataaacttaattcagctgagagcagagtagacagtgcctttactcttagcatttcagactatagaaatacatttctttgccaaaccaagaactttaaaatcaaatttaacttctcttctaacttaaagttagttttattgcattttatatttcagaaacaagagtttttgtaaatgctttcagaaaaaaaaatgtttatcagtagtaactgcatggttatcgctttctttttccatacctacatccaaaagagtagcgtgaggcatcagcacgagaaaagcaggtatgagagatgatgtttgctttcaataggacggggggccggggagaagcccataggtgtaagattccatgcttttctgtgatttatactttaggtgtagatatggctcaaaggcatgaagagagagtttgctccatggatctttttggaaggagaaaaacaacaccgagaagaaaatgtaacattttagatgtacaggaaactgtcatttgaaaatgtctgtgaattgaataaaccagtgatgtccttcatctcctacaaattctgaagcatagaacagaaatatagtataagaaagaatgttctcactcataggtgggaattgaacaatgagaacacatggacacaggaagggaacatcacacacccgggcctgttgtggggtgggaggagtggggaggggggagggatagcattaggagatatacctaatgttaaatgacgagttaatgggtgcagcacaccaacatggcacatgtatacatatgtaacaaacctgcacgttgtgcacatgtaccttaaaccttaaagtataataaaaataaataaataaaaaataaaaaagtataatttaaaaaataaataaataaaataaacaaattaataaaaaaagaaatacaaaaaaaaaagaaagcacaaagtccgacacttgcagcaatggaatgctaagttttacattacttggttaaattagaatgtatgttcaaagagcttctgttcatttgaatttttttctgtttgcttttacatttctgattttatcagttaatcatatgttgagatttttttcccattacaaaattttcattctgctgttgtatgtcatagagtgttgactgataaaaggatatcctattatgtggtgctgttacaaaatgcctctatatagagcaagtgaagattagcgggaaggaagagaaggttatagtgataggcagaattctaagatgaccctagtgacccctgccctttatttcccttctctgaatggtgggtggagattgtgactatgacaggagctcacttccaagggcaattcaacaaatatttatttagcgcccagaataggtaccatgtcacaacttgtattaagagaacagttaggcagggcacagtgactcacacctgtaattccagttctttgggaggccaaggtgggcggatcacttgaggtcaggagcaccagaccagcctggccaacatggtgataccctgtctctcctaaaaatacaaaaattagccgggtgtggtggtgcacgcctgtaaacccagctacttgggagactgaggcaggagaatcacttgaacccaggaggcggaagttgcagtgagccgagatcacatcactgcattccagcctgggtggcagagtgagactctgtctcaaaaaaacaaaaacaacaacaacaaacaaaaaaccagttaagtgaaatgaggaaatttctttggtgaaagagaaggctagataaggtgacagttgtctcaaagtcatcatacggaaaacagaatagaagcacagaacaaggactattgtatataagagaagcaggtgttaatgtaaggtaagaaagaactttctaataatcagagctttttgaaaatgaatatactgtctatgaaacagcagcagcctcatcatggtgtgtggttgagacttgataaacgaagtgagctgtactgtaaagaggattcc

SEQ ID NO: 3173 - DNA, 2300 bp, Homo sapien
ggagaatgggaacaataacagagctgagagaatgttaggacaatatatggttcaactctctttttgcagatgaaacaccagcaaagagaagcacaatgacttagaaaaccacttaaacatgagtctgtagtgtattgtgcctaggccagcacgttgctcctagagtaagtcttgttagcaattacagacccgtaaaaaggtggatcctctaagatcctctaacagtaattgagatcatggggctgtgggctcaaagtcaagaattcgggtgggtcactcttaatttcttcccagggacacctaatccaagcccatgagaacattagggctctcagagactaaaactctaacatagtagggtttttcgtgtgtgtgtgtctgtgtgtgtgtgtgtgtgtgtgtctatctcaaaactgtattaatttcttttctaagatgctggggtgccagcaacatccctattactcttctcccttcctaatgtcctcctcactttctgtttgaatctgccatttcctcagaaaaattaagagggcaatgtcaatcaattcaaactaacatgtcactcctgttctacaaatacttacttttacacaaaaataattgttcattaaaacaaaaaagtaaattctagcctccctcccaatatttgaacgatcttttccacccacagattagatcttctacggtcttgggttgtcaccgtgattgcacttccaagatgtgtacgttatgtcatgctacattttacgtgttaagagcacagtgcacagtgacctctcccatgactgagagaagtaaaattcacatgtaagtagtagtggccacaaaaacttggaaagacaggtcttttccaacagatattcaggtctcagagacaatctgaagagtttgacggactctttccttgaccaaagtttaatcaggcttaagtcctcttcttcagcaggcctccaccctggtcccctgaccactcaccccgaacctttggcctgcccagctctattttagcaagaaccctgctaagttaggttagagagaaatcaccacccttgatatctgatcaccctggatatctgatcaaatttctcattcccccacccttgatatctgatcgccctagcctgccttcagcaagaatcctgttaagtgggttcagcaagaatccctctaggtgcttgatgtctcgtatcagtaactttccatctactgaccccttcgttctgctccttggctatacatccccagctgtccttactgtattccgtgttagacctcatctctccccccagtgtgatcatctttacacctatagcaataaccctgtataaagtcttccttactgttttaacaagtgtcagaataattttttcttcaacaagttctcaacaaaaacccatacccagaatctttttctggaatgaaaagggcttcagggcttctcaggtcacttttgttgtattgcccacagagctgagagtaaacaactcctttggacgttttggagaagaaaggtccttctatacacccacttcatccaaggaattacatgcttgggatattaagcaacagctacaaaaatcaggaagttccttctccatgtatatgacgaagttctggacaggagcccgctgccagaatacgaatactcttccccaaagacccctcctcatgcccctacacgctcttgccggtctagcctttcattgcctgaagcacggcgagaacgcctggagagctcgtccaagcaagtgcaacccgctggtgactgcaaatgagcacatggaactgtgcgcccacgctacgctcggttaaaatcaatctgggctcttcctgcctcgtccacgccgaggtcacacgcagcactggaagcggcctgcatcgggcggggcggggaaggccgagggcacggctacccaggcccgccagggactgcccggaccggccggaagccgcgcctagaggagggccccggagctcgcgcgggcgccgtcccccggcgccgccgaggcctgctgacatcagccgcgctcctcccctcgcctcccaacaccctcagctccgggccggaccctccctcctcccaccacgtgtcctccccgctccctcccgaggggccgcgcgcacgggaggacggagaggcggaaaggatggcgctgtgacagccgggccggagccctcgcgtccccaccccgcgccctggccgctgggcccggcggtgagtgcgcgcgggcgggggcggcggcggcgcggcccctcccccgggtcccgggcggctgggccgcggcagaggcgggggc

SEQ ID NO: 3174 - DNA, 2300 bp, Homo sapien
gatagaaaaagcaatagcaatcatagcatacatttgagcaaatgtatctaagaagtacctagtcctttgtcaagaaaaatggttattgaggccacagttgaataaatatagcattgcctccagacggccaaaatagttttatcttttctccggaagtaagagtttaaaatgccatatttcactgactctgagacatgtttttctcccattgctttactgtttctgaaattgagaatgcctcttaaaatcagtggcatgtcatagcttaattagtagtgttttctttcttaatggcacataatgatgcatcctacaactgatgacattttagtttgggtgagatagggtaatttccccaaatcatattcaacttctgtgaccaccttctaaatataaagtgaaacctggttgcaccattaatgtgcaagaactaattttctgccttataagcttaactttgctaagtgtggtttttgctgtaggttttcttggttctaaagggatatgattcaggccatgatgcatctctgtaatattatatggtagtatggttaacatttggcttctcattcacataaaaagtattttgatgcaaacatggcccccaaattatttggtccaagcttggttcctctgttgagttcccagctctgccactttctggcttggctaccttggtgcattatgtaacctctgtagcctccccttcttcatctgcaaagaaggaacagtgatacttagagttactctattaagagaactaggtgtgggtagtccacataaattggcatatggaaaaggacttaggcaatgttacctgttattaaagttactacttttggtgaacttcagattaaggtattcttagcatttcaacccccaaaaatcagggtataagccattttacttactggcattatttttgcccctcactatttgtctcccagaaaatgaagaatctgacgtaaagcctccagactggccaaacccaatgaatgctacctcccagtttcctcagcctcagcactttgacagctttggcctccgtctgcctcgggatatcacagagctgcccgagtggagtgaggggtaccccttctacatggccatgggcttcccagggtatgacctctcggctgatgacatagctgggaagtttcagttcagccggggcatgcgccgcagttacgacgcagggttcaagctgatggtagtggaatatgctgagagtaccaacaactgccaggctgccaagcagtttggagtattggaaaaaaacgttcgagactggcgcaaagtgaagccacagcttcaaaacgcccacgccatgcggcgggcattccgaggccccaagaatgggaggtttgctctggtggaccagcgtgtggccgaatatgtcagatacatgcaggccaaaggggaccccatcacccgggaggcgatgcagctgaaagctctcgaaatcgcccaggaaatgaacattccagagaaagggttcaaggcaagcttgggttggtgtcgaagaatgatgagaaggtatgacctgtctctgaggcataaagtgcccgtgccccagcacctgccggaagacctgactgagaaactcgtcacttaccagcgcagtgtcctggctctgcgcagggcgcatgactatgaggtagctcagatggggaatgcagatgagacgcccatttgtttagaggtgccatcacgggtaactgttgataaccagggcgaaaagcctgtcttggtcaagacaccaggcagggaaaaactgaaaatcacagcaatgcttggtgtcttggctgatgggaggaagttaccaccgtacatcattttgaggggaacatatatccccccggggaagtttcccagtgggatggaaattcgctgccaccggtatgggtggatgactgaagacttgatgcaggactggttggaagtggtgtggagacggaggacaggagcagtgcccaagcagcgagggatgctgatcttgaatggcttccggggccatgccacagattccgtgaagaactccatggaaagcatgaacactgacatggtgatcatcccagggggtctgacctcacagcttcaggtgctggatgtcgtggtctacaagccactgaatgacagtgtgcgggcccagtactccaactggcttctggctgggaacctggcgctgagcccaaccgggaatgctaagaagccacccctgggcctctttctggagtgggtcatggtcgcgtggaatagcatctcaagtgagtccatcgtccaagggttcaagaagtgcc

SEQ ID NO: 3175 - DNA, 2300 bp, Homo sapien
tctgtttctggattaactgattttaacatctctgtcttattgctctgtgtttgagatttcctgaactctttgggcctttctgttgaatgcattctttaattcagcaattttaatagcatcttgtttcatggatgaacatgttctgaaagttttctgcggatacctgttggaaatttatcagaattcttttgcatttcctgtctaggacctctttttttttatttttatttttttagcttgctctttcttgtcatgtgaaagaatattgtcaaatatctggtgattaattattgtccttttcatgtttaagaatgaagcataaaactgcctggagactttgctttagagtaagctgacaggaagcctactgttaaactgggggtctcccaaattcccatatacagagagctttgctgtagggtaccaacatccataccagctaccttagtaaatcccagaaattgtgttcggtttaactagagaagagtccttattccctccccaccttccttctaaccccctgacttagctattataaataccctgctctgtgtcattctgtgcatgggaatgagccttcctgggcctgtgacctgcattgcacagaagggccctgcacttggtttgtaccatcattatcttgaaattcttaatttttaaacacgaggcccagcactttgattttgtactgaacccagttttgggggtgagtgaatgggtttgtgtggatgatttaaggatatagacattccattaattttgtttttagccttacagatccctcctggtttccactcactcacattctcccaatccaggttgtgggtttcttccaggcaggttgacgtgcttctgcctcacttgccaccttccttgcctagcctaggttacagcttctatgggtctgcttcacgagtctgcacccttttagtccatcctagaaatttgttgacatctcatcgtgtctgccactcattttcctttttaacctctgttgtgcaagtgtgccatttaccttccttactttcatattttgtagcgtcttgggagaggagataaatacatgtgctcagttcatcatcttagaccagcaaattctgtcctacatctataataatactactgctaataaacaaaacacccaataaacattaattgaaaatataaaaaaatttgtcttcctaaaaaaattttagttgcagctaggaaaaaaatgtgatttgagaggatcgataattttatttagagaagtagaaagagaaggttttgatttaagcattcattagttatttgcatttcatgagcattccatgctttttaccccaaatgaaaacaaacttagcagttatcagttgtcattatttttacttatggttatatatttctgtctcctagatggtgctggatctttgccttggccagggggttccgcagcaaaacctggaaaacccaagggaaagaaaaagctttcttctgttcgtcagaaatttgatgtaggttgttctttaataggtcttgataatgactgattgaagtagtggcatgttgggactagctttagtttttaaatgaatattaaaatactggtagtagagttgaaaaaaaggagtatgatttgggaagaaaagcgtttcaaggattgtgagttctaggtgtctgaatttttatagttcttgtttgttactgcttaaatagtaatgttatcattagtacctaatgatttttcagttattcaaaacaatgcttttgtctctcctgttaagtatttttcttgaatgaataatgtttcttggatgaagacatctgtctcaagggctcaggcagcctggaggcctttaatggggtcctggtgatgtccagctgggccctgagccttttgaggactagtagagatgtcatgaaggcatttggctataaaatttgtaagcattttaaaacaaattgcttttttcagtgtatatttagggaaaaaaacttccccgaagtaacccttttataggtttatggggtattgatagctttattgattaacatcaataaacaattatttattttcaccttgactatatgctttatatcagtaagaatgtagaggccattgggatctctagagagacatgtctgatttaaaaagagatgttcaatataaagtagttttatacttggaaaatggaaaaataaccatgttgttttcataatatcaatttcaaacagggacaaaccatcttcactacaaaatcttttatattagccttaagcaaaaggtactggggcataactccaggtggtgatggagaaca

SEQ ID NO: 3176 - DNA, 2300 bp, Homo sapien
gctgattggtgtgtttttacagagtgctgattggtgcgtttacaaacctttagctagacacagagcgctgattggtgcgtttacaatcctttagtcagaaaagttctccaagtccccacccagcccagaagcccaggcggcttcacctctcaatattaaattgtttggtcagatgtccatttatgtatattatattgtctaacattacagtttaaatggacatttaactgaaaaactgtagtaaaattagtgttaataggtgtataagtgctgagagagaaagggatatttaattgagctagacgtatgagtattgtcaagcatgggttcaaaaagaaaatctttgaggcctatctttcttcgtggctagagacaaatgagaaacagggattcttcctggaagatgtacccaactatctgtagcctttcctagtcctgttgacttgatccttgaatagattcatatatatgtttgaacctgattcaaaaaaaatggaggtagccaaccataagtctcaaaaccagcagagaggagatatgcgtaaaggggaagagccatgtgatttgttaaagtcaagttaactagaatgctgagtccaagtgtggggttatgtgggaaggccagtggtgtgtgaggtacacaggtagggtgagttcagatcatgagaacatttgaatgctggagtctggaatttgttcagcagagcgtggggagccatggaaaacttaagtggatattttttaaatgtgtcaaaacttacccagagttttgacacagagaggaagactttgcctgacctttgtatctcctttcacctgtgtatctccagtactcaaagagttccagacacataataggagctcactgtatgaattcaagtgaagagaaggtgcccggctggcattgcagccaggacagggcttgtgggtttaggttgggcagtgaggaagttgaatgaatgaacttaaggggacatctttggagaaattacacaagatctaaaagctatctaggattatttaaaaaactttgggaggcaatttgacaatatacaccaaggcatttataaatattcccatcatttgatccagtaattctatgtgtgggactctatgctaaagtaataatcctaaaggaggaaaagttttatgcataaagaagttttgcttcattatgctatatgcttcaaaagcaatattacagtattgctttttaatagagaagaaatggacacagtctaacaattgggaaacaagttgtgtaccttctatctgtgggggtatttaatatgttgtcattaaaattattctaaagacaatgtaatactacagataaatccttaagtttaaaaacgtgcaaaattgaacatagaatattttaagtcatgggagtgtgcgaagtgaaggagaaatctctctcagttaagtgtttgtccgggagtggtaaaacactttttccttctttttatctttatctttctgtgtattttccaaattttacatagttacctcatttactcaaatacttattaagcatccactatgtgccaggcgctgctctagagaattgcgggtaacagtgaataaaacacaactcctgtcctcgagccataacatttacaagataaatcaactaaatgtcatatgagacggttagtgctcggggaaaaataaggcaaggaaagagtaaaactgatactgcatttacttttttaaatggaggggtaaggtactcctccaggcagaagaacagcaggctgaattcggaattgccccagcggtaacagaatgaaagagcttgggacacgccagcctgtcagcaacgttgcagccgaggcggggcgcgcgggtttaggatgggcgcgcgacaaggtgaagcggatcacgtgactcgaggggcgggaggaagagagcagagtttggccgggcaccttccctgcgaaaaggcgggcggagccgaaaaccaaacaaacgacttctgagagattgggggcgggactgacggcggccggcttagcttccagagccaaggccttccgccgagttggtttttgggttgttgatcgcggtggccgggcggtctgcggtcgggctgagacacgcggagcaatggcgacctttgtgagcgagctggaggcggccaagaagaacttaagcgaggccctgggggacaacgtgaaacagtaagagctgccctagcacagcgtccaggccaacacgcgggtgctctcctggcctcgggctgccagcccgccccggagacgcccgcgtcgcccgggggcctgtgcagcctggagtcc

SEQ ID NO: 3177 - DNA, 2300 bp, Homo sapien
actttagggaatcagtcctacaaaaatacatgcatacaaaaattaattatgtaaaattatggtcattgcagaattaattgtaaaggccaaaaaaatagaaataacattataatataagaatgggtaaataagttacagcatattcttactgtaaaattttatgcagtatgtccttaaatggaaagatgtgaataatataaaaatttggaaaagcaaatttcagaactatatataatccccattttttaacaacagagatgataattatgcatattcaaagatacatatttgcatctttcttatatacatatagaaaaaactgaatgtaaaatatatctttgggcattgcagttgagggaagtaaaggaaacccctgctaatagttcttttaaatgtcatacatgaaacatgtatcagatgaaaaaaagaaatttttatttcaataggtttttggggagcaggtggtgtttggttacataaataagttctttagtggggttttctgagattttgctgcacccatcaccctgacagtatacactgtacccaatgtatgatcttttatccgtcacccacctcccccacttcccattcccaagtccccaaaatccattgtatcattcttatgcctttgcatcctcatagcttggctccctttaagatgaaaaatttgatgagccaaagatacaaaatgaaagtaaaaggttttttccttgtcttcataccagtctccataccacagataactaattttgtaatttattctaaaaactcttttaatgcatatgttcacaccatatatgtatctgtctgttcttataaaaatgttacatgtggtactgcaacttgttcttttgactcttgaggtcacagaactacctcagtcttttcacagaggcatccttattccatcatacaggtttactgttatttagttaacttgcccccacttatgaatactgggtgtttccagtcttttgctgtggcaaaacaatgtagcaataaatattcttgtacatatattttgctaaacatttgcaactatatctattgtgtaaatttctgccagagggattaccagtgaaaggagatgtgcattttaaattctgaaagatattgtcaaattatcctccagaaagaacacaccaatgcacatttccaccaatgacttaggaaagtgttcattttccctttaggtttgtcgcattacgtgtcattaaacatctatatttgcgaaagaggtgaaaagagtcttatttattaattgttgtttatttgtatttatttaattcggagagactaatttgtcatttgttttctgaccacttgtgttcctttttctaaaaacattaataacctttgactgttttcctcctggtttggtcatctttttcatactgacttgtaaaagctctttgataattgaggaagtttaactttttaccatttgttctgcaaacacatttttccagtttgctattaatcttttgactgtttatgacttttttttcccatacagcgttttgaaatgtttatatggttgaacatgttaattttgtttctttttggcttccggattttgttcttatttaaagcagcctttctcaccacagattataaattcttttggaacttttatcatttttttatgtttaaatcattgatccagctggaatttattttggtggagaggaatgtttacttttaactttgtaggtatctaaaattgtttgagttttctaaaatgagcaagtgttccttctgtaaaagtgccagtaaatgaaaacagatgaatgaaatgaaaagataaggcataataacccacaggacaaagcctagagacagaaagacgaggtaagaggtattttaatcatctcagttgggctattcattcaatacattgaccacctattatttgtcaggcccagtgctagatcccaaagacataataagggcctggattgagaaacggacaatggtaatgagaatgaggggaagaactgatggaagtgttttagcccatagaatgatcaccatggcaacgggagcctgaatcatcactatggagacacagtgcttcagattatgactagagggatagtgtgattttgtcagtgaaaattttgaaaaaggtaaacaggtatgttacagatgtttcaaaatgacactattacttgccaaattgaagttagtgccttggtttttcccactgtttggggagactagagacaaaataattcacaattcacaaataacatagattaagacaagcacaagctttatttggtcatttctgctca

SEQ ID NO: 3178 - DNA, 2300 bp, Homo sapien
ccctctttagggttaaatgagaaggtttgttaaacatgtagaactctgcctagaacctaaaggaaacccacaagtgttaggtacctcctatatttttatttttctgtatatgaaaggaaatagtcctcaaatttctctcatgcagtacatagcatgaaaaaatcatcctggccaaaataagcaaagaaagagtttatgaaaggatattgggtggctcaaagaattgctggggaagtgaagagccaagtgtagaagagaggctagaacccagagagcctgcaagaccacagccaaaaatcacaccttggagcatcctggtggcttgacctctgccacagctgatcatgtacactggatgctgctgctgcctcagtgacaaaatcaattctccactgtccttgtttcttatatccaccacttgctccagaatcaaaaagctctgagggagaggtcagcctggctatgccaggggcccgggcctgcattccagctgggatggtcagggaggtggctctagactttctggcttctgcagttggaatttctcagaataagaagggaattgagatgtcaggcagccataaaagacagctgcccagggtctattcttcccatttctcacatgttcacatacatattctccctgtctgtgtacacattcactcttaggtgtggagtctgtctgctccaggaactcccctccagcctggcaccactctgttttcagatgctacttgagacctttctgctatgtctctttcctctgcccagaatgccctcgcctgccccctttccaccagggatccttgaatggctcaaatcttgtgctttctgcaaatgccagctcagatgttacccctcctttatcgtggtgccccctccccacccacgactaacttagtccttcctctatgttcccaaggcactttctctatgtctccattattgcacttgccccgttttactaggaataagtatcatgtctttaatggtctgaccttcctccctttcctcgacccaagatgaggctcctaagggcaggaagtctatctcattccactttgtaaccttagttcttagcacctagtagaggcttcataaatatatttcttaagcaaatcatacatttctcagttctctctcaacacatacattttgagacacaagacaaatccgtctgacaaataggaataatccatgtgaatgcgtgctggaatctataaagtgttggatggatttaagccgttataatcatttatctcattctggttttacatattttctgttaaagggccggatgcccttattctacctcatattttaacaggaaaaagtaatgacgcgagattcccgcctacctttttcaattctgcggagcctcttgcctggttccttgcactgtcaaaaaggaaaccagacggaggggcgggggtaccgcagaagcgaacattctagcctagaggacttgctagttaagtcctgtaagaagttacgccaagtccccgccgtcccccaccctcgccgctgtcactctctccccgttcaggttggctgtggctgcccgcagacacaggctcccctgctcgagtccccagccagcgttctcgcccgggttcccgagcgcgggcgtccctgggagaagccgcgatggtcgctccccgctcggcgcggcccgcggggcggcctcccccgcgcctctcgctgcctgccacccagagaccccctctctccgcgtggcctcaatcactccacgctgacctttgggccgccgggggccagcacgtgaccgagaaactttggcagtcgcggcagcgggcggcggggcggaggcgcgggaggcggtgcggcggccgagctcccccgcgcggcgggctctgcggcggggagacgctcgccccgtgccgcgctgcctgggcatgcggatgcgccgccgagcgctgcgcggaccccggaagcccgcggcagcgcgcgctcagccggcggcgcgatccagcccccggccccgcctgcgcggccggcccggcgggcgctgcgcccagggacgcccggtgcccgccgctccgccgccgcccgctgccgcggggtgacagcgatccttctgttccagccatttcccactttcctcactccgtaattcggctgggaagttggggaagatggatagggtcttgctgaggtggatttctctcttctggctaacaggtaagagtccttttcaacagaaacgaataactttgtatattcctgtagtggttctgttctcaccgcgccccccgcccccccattttcctccttactga

SEQ ID NO: 3179 - DNA, 2300 bp, Homo sapien
tatgccaatgttttttaaagtcaactttattgactttaaaatgaaacacacctattttaagtccatagtttgatgaattttgacaaatatatactactaatagccaccaacaccacaattaaggtagagaacatttctgacaacccagaaggttccctgtgtcagttctcaatctcccctccccacctccgggctccaggtaatgctgatctgatttttataactacagttttaccttttctcaagttctgtatacattgaatcacatcctatgtatacttttatgtatgccttctttcactcaacaaaatttcaaaattcatccatgtcgaatatcaatagctcattccttttcattcttgagtagtagtctactaaatgaatgtgccacaatttatcagttcacctgttgatgaacatttgggttgtccagcttggagctcttatgaatagtgctactctcaaaattcatctacaaggctttgtggatatatattttcattttcctagaagaatggaattgctgggtcctatgataagtataagaaactgtcaaccagttgtcccaccaataatgtatgaaagttccagctgcttcagatccttgccatattttataccaatacactagaaaaatctaaatgagatagacactttttctaggaaaatataattacaaaaattaggtgaataaaactaagaaaactgagaagactaataaccatacaaaagatattgaaatggtagttaaaggtggacgcaccctccaaagatgtaaaagatcagagagttttactaataagctctaccaacctgtcaaggaatagataattcccatctattattctatctgaacacaaccctgataccaatatttggtaaagaaaataccacaaaatctatacagttcaatattactataatcaaggaagccaaaattctatattatgttttttaaaaaataagcaaagcctcatgatcaacaatagtttatactaagaatggtaggctgcatcgttagaaaactagcaatattctttatgttaacaaattaggccaggttcagtggtttacgcctgtaatcccagcactctgggaggcctaggcaggcagatcctcgagcccagaagtgtgagaccagcctgggcaacatagggagacctcgtctctacaaaaaacagaaaaatcaccagggcctggtggtgtgcacctgtagccccaactactcggggggctgagatgggaggtcctacttgagcccaggaggtctaggctgcagtgagccgggatcgtgccactgcactccagcctgggtgacagactgagaccctgtctaaaaaaaaaaaaaaaaaaaaaaaaatttaaaagataaaaccgtgtgattacctgaaaagatccagaaatttagcaaattttcaactgccattcttgattttaaaacatatacataccccatatatacatacacttagaaagctgacccgagaaaggaattttctctgggaaacgtaattagaaaaccgagagaaccaactagcacgatgtaaactagtataagagatcagcagtgtgactatatacacaggaccaacactaaaatcaataccttctctagacatcagtagtaatcaattagaaaatataattttttaaaagaaatttttcataaaaactcatattgttaattaggaataaaattgacaaaaaggaaacagttttatgaggaaatctataaaactttaaggatattttaaatctcaacctcttcctctgtttccttctaacacttatttttgaatgtacttttaaaaaattcgagttttgttgcttcactggtttttgtcatcctctcccctcattcgattgtaaacttgagggcaaggaagaccttgtcatgttcctcatacatgttcctcaacacttttcacagtgcttggcataaagctggctggccctttgtacctgtaaaacgcggaaacacccgcagctcctctttttctctacctactttgtcgcacattacgcaataatgtacagaaattgctccaggcctcccacgtgacaatgcctccgcctgccacgcacccagccaatcagagcacttggcacctgcgacggcgctctccccccacctcacccgcaaggcggcacgagccggaatcttccagtctcaggctgtttgttcccccgcggggcaatgcgactgcgcgtcgcttcctgattggccgagagttgcgggctgcgtgcgcaggcgcctacctctgttacttagggcgggagcccggcgagggcgccggtgc

SEQ ID NO: 3180 - DNA, 2300 bp, Homo sapien
acctgtcaaggaatagataattcccatctattattctatctgaacacaaccctgataccaatatttggtaaagaaaataccacaaaatctatacagttcaatattactataatcaaggaagccaaaattctatattatgttttttaaaaaataagcaaagcctcatgatcaacaatagtttatactaagaatggtaggctgcatcgttagaaaactagcaatattctttatgttaacaaattaggccaggttcagtggtttacgcctgtaatcccagcactctgggaggcctaggcaggcagatcctcgagcccagaagtgtgagaccagcctgggcaacatagggagacctcgtctctacaaaaaacagaaaaatcaccagggcctggtggtgtgcacctgtagccccaactactcggggggctgagatgggaggtcctacttgagcccaggaggtctaggctgcagtgagccgggatcgtgccactgcactccagcctgggtgacagactgagaccctgtctaaaaaaaaaaaaaaaaaaaaaaaaatttaaaagataaaaccgtgtgattacctgaaaagatccagaaatttagcaaattttcaactgccattcttgattttaaaacatatacataccccatatatacatacacttagaaagctgacccgagaaaggaattttctctgggaaacgtaattagaaaaccgagagaaccaactagcacgatgtaaactagtataagagatcagcagtgtgactatatacacaggaccaacactaaaatcaataccttctctagacatcagtagtaatcaattagaaaatataattttttaaaagaaatttttcataaaaactcatattgttaattaggaataaaattgacaaaaaggaaacagttttatgaggaaatctataaaactttaaggatattttaaatctcaacctcttcctctgtttccttctaacacttatttttgaatgtacttttaaaaaattcgagttttgttgcttcactggtttttgtcatcctctcccctcattcgattgtaaacttgagggcaaggaagaccttgtcatgttcctcatacatgttcctcaacacttttcacagtgcttggcataaagctggctggccctttgtacctgtaaaacgcggaaacacccgcagctcctctttttctctacctactttgtcgcacattacgcaataatgtacagaaattgctccaggcctcccacgtgacaatgcctccgcctgccacgcacccagccaatcagagcacttggcacctgcgacggcgctctccccccacctcacccgcaaggcggcacgagccggaatcttccagtctcaggctgtttgttcccccgcggggcaatgcgactgcgcgtcgcttcctgattggccgagagttgcgggctgcgtgcgcaggcgcctacctctgttacttagggcgggagcccggcgagggcgccggtgctttgttctgtctgaggccaggaagtttgaccgcgctgccatgccgaaccgtaaggccagccggaatgcttactatttcttcgtgcaggagaagatccccgaactacggcgacgaggcctgcctgtggctcgcgttgctgatgccatcccttactgctcctcagactgggcggtaaggctggagcggagtgagagggctgggcagggcagttgggcaagccggagggtgaggcgggagggcagaaggcctcgaggaggtcaggcggcttggccctgccagaggaagaggaaggcccccgtttgtggccctgggcaaaccgacaccagaaccacctccctgtaatgccccagcatctgcctgcgggccctagagcacgggatcctcacggctgtttctcttctttgctccttcaatccccaaaagcttctgagggaggaagaaaaggagaaatacgcagaaatggctcgagaatggagggccgctcagggaaaggaccctgggccctcagagaagcaggtaaagttaacgagagaagagccgccatctgcctggcacataggcatattcagtaaaggctggatgagtgaatgagtgaatgtcaagggtggactgctttgggggttcggttagtgcgaagacgacgttcttcttttcccctggtgtcagaatgcctgttaaaaaaaaccaacagcctccacaactagggcatgcacacattggtgtaatttgatggtgaaaggcctggggaattcctgttaggaaacctgtagacaatacactttgatcgctaatgggagtgtaacatctaggg

SEQ ID NO: 3181 - DNA, 2300 bp, Homo sapien
gaagcagtggtgatatatgagctgacttctaaaggacaagtaagattataatagcagatatagtaggggaagggaattaccgagggggtggcatcaataaagttttgggggtaaggaagtatgagttctgggtatgaaaatatgtctaacttggtcagagcataaattacgtattctggaaggtagactgtgtttgagaacaaatgctagaataccttaaaagctaatttgttaggttctgcagagtcagtgataggacccaagcagacaagtaattaggaagactaatttggcaaagatattataaaatgttggggctgaacaattattacatataataagagaattaacaaggtgcctgagtgaaatgtaataaacagaaaacaacaaattttgtatgtcaaccaaacctagcagtcaaaaggattaataacaataagtcatgtaggatactatgaattcataacacaaagaaatgctaggggaaatatttgcaatgcttatcacatccaaaagttcctttccctaatatacaaagatctgctagaagtcaacaagctaaagatcaacagctcaatagaaatatggccaaacggctggacgtggtggctcatgcctgtaatcccagcattttgggagactgaggcaggattgcttgagcccaggaattcaagaccagcctggtcaacgtagcgagattctgtgtctatatttttaaaaatttattaaaaaaagaaatacgggcaaatgagctacctagtctcagaaaagaaaatatatatgatgtgcaactatattaaaagattttcaatttcactaataatttttttttttgagacagagtcttgctctgtcgcccaggctggagtgcagtggcaccatcttggctcactgcaagctctgcctcccgagttcaccattctcctgcctcagcctcccaagtagctgggattacaggcgcacaccaccacacctggctaatgttttgtatttttagtagaggcggggtttcaccgtgttagccaggatggcctcgatctcttgacctcgtgatcagcccaccttggcctctcaaagtgctgtgattacaggcgtgagccaccgcgcctggccaaatttcactaataattttaaaaagtaaattatatatacatgggatatcatgttcacttagattggcgatgagcagaaagtttgataactgtgtcataaacacttggtaactgtgttagtgagtgtgtggggagataggtatccttatatgctgctaataggagtgtaggctgtaaaattctcatggtagctagtttagcaatatctataaaaattacaaatatgcataactttcagtgagtcagaaattttacttttaagaatttatcttacatgtataatcacaacacgtgtgaaatatcgtacacataatagatattggttgcaatcttttcatagttgtgaaagatgaggaaaaacaatcttaaaagtagtttggttaaataaatcatgtcactcatatacagtgaaatatcatccccattttaaaaagatgatggtggtggtgctatacataccgatacagaaagctttctaaaacctttcattaaatgaaaaatgaataaatcattgcagaacagtgtatatatatctaaaatatctatggaagaaaccagcaacagccactgctcctggagaattatggtcccacaccactgatcattctttcagtagggtgaccatcatccaaatttgcttgggactgagggggttccttttggtttgaaaaccaggacagtcctaggaaaagtgagacaagttggtcacatgtccccaagatgatcttctttcacttatgaacttgctactttcccagtcagaatataaactctgaagggggagacttcctgttttcttcatgactatatctcttgcgcactgtggggtggaggctgtagaagaggagagaagtagagaaacagatcacattgtgtcttgaagtgtttcagcaaatatgggcaacacccttcttttactagcttggaaccctacctctgagtgcatttccctttttattatttatttcctgtcagttataagagaggcctacccctttgtgagcagtctaggactttgtacacttgttaagtagggagaaggcaggggaggtggctggtttaaggggaacttgagggaagtagggaagactcctcttgggacctttggagtaggtgacacatgagcccagccccagctcacctgccaatccagctgaggagctcacctgccaatccagctgaggctgg

SEQ ID NO: 3182 - DNA, 2300 bp, Homo sapien
gactgttggcaagtagattgatgagagcagggaggaaggtctccagtggtcccagtctgcattttaaacagctattacaatgaaggcataggaggcatatttgtcacattcatgaaggatgcaaagccgaaaaggaggccaggagcaggtaactgatctgttgaatggtagagtcaagactcgcaaaagctcctgtaggctataaaaacagacatccaccaaaagatgttagtaggaatttgtgaaattatccttaagtttaaaaatgactgcacattaaaaggaacacgacttaattgcagtttttaaaaaacgttttacaggtttcagttgacggatgtaaaagataacttgagttcattgtgtgacatatcctcccatattgcaagtttatatggtatcagtaaagccccagtgacccaaacaagggtggggaagggcccattctactctatgtgagtgagtcagtccaaacctgaaatatcttgctccatcctgagtacaaactcctaaaaaaaaaaaaaaaaaaaccctgataaattcaagttttgacctagaggaaagtagctagaatagtaagggaacatgagaagatgttcaaataatgtttgaaggactcaaaatagccaggaaaagaaaaatatatatatttcgggaagaatatgatagcaatcttgttaaggatttttgtataaaagccctgtttcatacaatgtatccatagttgactttataatgtcagagcaggagtactggatgcttgttacagaaatttatacttttccctaacatatgaaaaaaattttgaagcactagagtgatccaaaaatggagtgaattgtgtctatgtgtccatgtgagctaatgagctccctgtcactggaagcattcagcagtggctggataacaggtgtgacaggtgatccagcatcagggatgttgtaaagggaattctcaagtttaggatgtgacttatgatgcttcccaacaccaagattctatttctctgtgattcatttatcttagcttctcattccttttctgctttatcacccttccccctgttcttgtatttctcctccctctgttgctcggtttgtgaggagaaagtagaaatgcactccagtgtttcaaatacagggccagtggggattgtgatgtctcccatctgtaatatggggtcagtgatgctcagccctcctgtgtcttgagcccggatgaacttcagaggcaaagtaaacaccttaagtgcagcatattaaaacagcacttaccaaagaaaacaaacaaacaagaacactacaaggaagccactgtcattacatcattttctcttgtgttttcatttcagggaaagtcctggtcagcagcgaaatgggcatcagccggtcagcagtgctggtggtcgcctacctgatgatcttccacaacatggccatcctggaggctttgatgaccgtgcgtaagaagcgggccatctaccccaatgagggcttcctgaagcagctgcgggagctcaatgagaagttgatggaggagagagaagaggactatggccgggaggggggatcagctgaggctgaggagggcgagggcactgggagcatgctcggggccagagtgcacgccctgacggtggaagaggaggacgacagcgccagccacctgagtggctcctccctggggaaggccacccaggcctccaagcccctcaccctcatagacgaggaggaggaggagaaactgtacgagcagtggaagaaggggcagggcctcctctcagacaaggtcccccaggatggaggtggctggcgctcagcctcctctggccagggtggggaggagctcgaggacgaggacgtggagaggatcatccaggagtggcagagccgaaacgagaggtaccaagcagaagggtaccggaggtggggaagggaggaggagaaggaggaggagagcgacgctggctcctcggtggggaggcggcggcgcaccctgagcgagagcagcgcctgggagagcgtgagcagccacgacatctgggtcctgaagcagcagctggagctgaaccgcccggaccacggcaggaggcgccgcgcagactcgatgtcctcggagagcacctgggacgcatggaacgagaggctgctggagattgagaaggaggcttcccggaggtaccacgccaagagcaagagagaggaggcggcagacaggagctcagaagcagggagcagggtgcgggaggatgatgaggacagcgtgggctctgaggccagttccttctacaacttctgcag

SEQ ID NO: 3183 - DNA, 2300 bp, Homo sapien
attgtgctaggcactggggacagctggaaacataaataactcattaggaggaaaatgaaactttgatacagtctattttaagctatttttgttctcacagaactatccttccttaaataaaaatcctttccatgaaaatttccttttatagaagtgaaacagtaaagaatgcataacacatacactagcttcaatgactttccgaaggtcatattaatatactttttgaaccaaagagcaaaactaggattaaatagaagacaggaaattaaatgagggtatttgagctctttttcttaatggagatgatttcaaatttgtggtccccagagcaggggcatgtacttaactatttccaataaggttgtcaattctgagacttcccttacagtaatgctggtgaaaataacttaggccatatttccagattaactagttaaatatttcatttccttaagtgtgctggttggcgtggctctaaataattagattacagggcggtctaattatttggttcaaacagtcatgcacacaccctaaggcttaattaccacgaacaaatcaatcccacccccaaatcgttgcctgtcactgacaatagctttaactgtacttgcacagttaaaggagtccaacgagcattctaggactgatgattaaaactttacccattaaaataattgcactcacttggaaatcagttttgtttttaattgtagaaccagcagttctacccaatttaaacttcagtcatatctctcaagacagattaactagagctgattttttttaaactttgcttaccatgaaatacacctttctattcttaaaaaacaaacaaacaaacaaaaatagggctttaaaaattcgtaaaataattagacctgggactttgtccagggaatttcgccatttaagataaagaaaactcagcaacattatgtctagttaccaagaaagatatgtgcaacgcgaaacctttccccaataccatatttactctgagaaacacagcaaaataaaattcacgatgaagttacgatttcgacatttttattagtcatcagcttactgctaggttttaaaaggtgttccaaggcgggaagaaggcgcggggggaagcctcagaatatggggtctgtttcgattggggggagcggcgttagaggggcgtgaaggcagaaaggaagggtagggcggaaattagcgacttaataagacgcctagctcccgaggaagccagcctggcgttagaagcaagtagagcagaagagatttagggctaattaaaacaatcacacgacactccccctcgcgtttgccggggccgggtctcctgcactagcagagccgggggcggggattagctcggattcaaatttaaagcgggaggcccgcgtgtggctcagcaggtgcctcatgcccggctcccgtggcggtcgtttccgcccctacctgcccagagggccggaaattacctagcgaggagcggcttatccattgttgccaatgtttcaactgcgcggaaaccctgaagaaagtgcggagcacagggcacgcgggccgctcactgcccttccacgcgcccccacgtttctggccgctgcgctccttgccgtgcttttacaatgccacaggccactgggggagaccggagcgaagccaggagggaagcaaggcgggaggaaaagggagaagtgtaagaagacacaggcgcccgggatactatataatctggttctgagctagagggagcgcatgcgccggcgacacttctggcggcaggagaaaggcgcgcatgcgcagagccgagacgaaaaatgaagccacagggtgcctggctgattgagggcgctgctttagctaccgaagggccacagcgccccgaaggcgcgtgcgcagagcgcgggaagggggtggagctcttctgagggggccggggcgaacagagccggcctcgcgcgccccctggcgcgcgcccggggagaggaaggagcgggagggggcggagaggagggaggaggcaagcagggcgggaggggggaggggagccagagcgagggagggtttatcgaccgggcgattttggttaaaatattcaaaatggcggacggaggagcagcgagtcaagatgagagttcagccgcggcggcagcagcagcaggtaatcattacagcattttacatattcatattcatactcaaccccggctcccgctgcccccccccgcgacttagcataatttattagtactcaggattattataattaacggcggggagatggggggccggggagc

SEQ ID NO: 3184 - DNA, 2300 bp, Homo sapien
taatacaaagtggtgtgaaatattaaataagattgatgctttcaaaagatggacatgtttatccagtgacttgatgtctgccctggcacaactgcatcacattcctccagtccacgctcttgtctgagaagcatgaaagcatttatctcacaataacctcatgaaagggatatcatcattttataggtgataaaattaaggctcgaagaaggaaggaacttaaacaggtattacaggtattaaatggctgtgttaagtttctcccccaaagtctctcctcataagcattttgtgattcagtaaaacagaaaaactggtaatgcagagtgctgatccaaaagtttaaggtttttggtcctctactgacttgcaagggaatctttttaaaggccccttgttaaaatctgtctttcatttcctgaagactagttctaaataaaaacagttattaatgggctgacacctttcagaactctcctcaaatctagtgcactcttctgtgtatctgtacacacctgacttttaaacacaatgtctttgctgccgtttactggtttcttcactacacggaaaacaaaccattcagtctgctgctttaccacctctcagcaattccctacgtgtttaactcatccataatgcataggaatagccaagagcacagattctgatatcagaaaattctagttttaaatcctgattccgaattactagtgtgacattggataaagtgttttagttctctgtgcctcagtttccttactttaataatatataaggaaagaaaggggtaataatgcttattactccatggagattttataaatctcctgaattgtctgtgatgattaggctgttgtcattgtaatgcctaaaaaattttgggttgatgacttaccttgtaaatatactttaaattgaataaacatatagtttagtaaggattatatatatgtatgtatgttcattaagtgaaatatacttgagaataccaagtaattccacaatttacatggcccaccctttgacaatagagattctaagtaacaaactgtcttctttctacttgagatttattttcatgggggaaggatactgcataatatgtagcattcaactaatctattctgttaatttggtaatataaaaagatttgtagataatgaatttctatactctttaagatactttatacaccttgcactgcttctgggtttactgttgcctcgttttaaagtgggactttctcttgacggaagtgtgttaagaattggaaaattccctatcagtagactagcaccatcttgacagccttgtgttctgcttctaccttgctaattgtttccttgggattatttggattgtgtagaaagctttttgcaaatcctcttattactgaagtcattgttgccagcaggaataagattaaaggtgcttaagtctgtagggttgtttctaatttgtacgtgtcatttcagtggcattttaacagaactctgtctcctgtacctcccttctcccttggtactatctccagttaggtccaagaagccaggccattggaagaagtctcattttatcctcctaattattatgctggcactcaggagataatttttcccttcatgcactgccaattaatatgcaaatagcctgataaatatttatgcaacgatttaaattatgcagggagtgctttcagtatattctgtaaatgaattgttcatggacttcaaagtgctggctgctgtgctaacgaggagagatttgcataaggccctaatcacgcgcatactgattaagcttcattatggaaactgccagctgcaatctttgtttctattttattacaaaaagaggaactttttcatgcttcagttgccttgacaatgtcagtcctagctggtaggagagactaaaactcctctgagcaactgaagtttccttattcagttgaagattgctatggtgtaacagaagttgtattttgcttttccccttaatccactttccaccctacgcaacccccctcttttcgcttaagaacatactgtagatttgttagaaatagtagtaccttctttccccaccccaaactgctacctgtttcttccttgtttggactctctgctcctctagaagatttcacagcaatgctggactgcagtgactatgttctaggtgggtaccagcacagttcttttcttagaagctttaatatggaaatagagtgtgtcgggttgactatgcataaatgcttaatcgcatatgcagcctgtggcgggggagggggagagttg

SEQ ID NO: 3185 - DNA, 2300 bp, Homo sapien
agcattcaatacaagtgtggcatggctgataatgttcatttagtgtgggaaaacatcttcaaaaaaagattaacagcatttttctgtgggacccgttggggtggggtagggtgggttgagaagggactgagcttgttcataaagttttaactccgtaagacaaacttctttgtcttctcagttctagctcggtgacacatagtagactttatttagtgatgacaaccccttgtgatgaatgtcaacagtattaaactagaacttcccctgattacttataggtccaactcgctggaacaagtttacaggctgctgctcagtctttaaatgtacaggtaagctgggacctgggattatgggtcaatcttttatttattttttcttatatttttctgtagtgagcatatattttataataggaaatgcttagaagtattaccttttcaaaattagtgaatctcgtgaagattcaaataatgataattattaccattaatgaaaatcagttttatattatgctactgtgcatgaaccaaaaatggacaggaaaagtctactttcaaagttgtatgtgtaagttcagtaaaaatgtttctaagttatactgctataacacatacctaaacacacagcctgaaagttctcttaaatgccagtttgtttccaaaagacttgttatttatcatttttgatgtcttagggagaccttatagggaagaggaaagaacactggactgagacacaagggtcttaggtttgcattctcattctgccactgactagctgtgtgacctttggcaagtcacataacctccttgggttcagtttttctcatctgtacttaagtggggacatttataagattgccagggttcctctccatcctaaaatgttaggcttctaataattgtaattaaacctgtttgtagatgttggtggatagacaatcaaaatcttaaaacttaaatctggccactttccttctttgaaccatatggcacaacatgcaaagttcaagtgttagacattgccctcttaatatttctatcaacctgctggttcctttcattatagtgtttaggtaactagcagtcaagagggaaagacagtattatggaagattgatttcagtgttgctaatgactaaagaccttgggttgagcatttcatgaaacccagttgaatatggacctagtaacacgtaggaacaaggagagaaaagaaaaagagataatgtgaccttactttctgagggagaggaggcggaaaattgccttggttgccatggtaaactttcatcccttagagagatgttggcaaacaggctgtatctccagtgcagaatgtttacagtcctgcactgtaattatctctcaatgactggcagaattaatcagagcatttatgttaattagccttgctgcagtccccaaaacaggtggtgagaaatatgcaaatctatgcagaattttaatgctttgcataaccagttttaattaccgtaaaattttctcttcgtgcccctctctcttgactgcagcattttctctctgagcttgtgtgttagttgatgggagttgctagatttaccgttctgtaaaatattaggtggaaagttctgtggatcaagtgatcattctctgagatggtatatggagaagtttcagactgaccaccaggtgtatgttaaaatattggtttggaaggtctaatgtagaggtgaattgaaaatatattcttccctttaccccctatttctagagttgaggaattgggggctatgaaaaaaatctataaatttgtgggggatgactttatttttaaaaattgtaatagcagctttgctggcattagaattaacaagtttaaaaacttggtatgtgaaactaggaaaatacaaataaaagaaaggaggtaaaccagaactcatgactgaataagctcatgttttaaatgattcctaaaagatggggttttaagtacatttcttttaatcaaccatttgcaatcttttatttcctacccaccccacctcagtctaaatctaatgaagaatcgggggattcgcagcagccaagccagccttcccagcagccttcagtgcaggcagccattccccagacccagcttatgctagctggaggacagataactggggtaagtgttcactgagagaattataacaaactttttctgtgtcagaactgccattggccaatagctgattagaattgttcaccatagctggtagtaacatggctatgcctggcactattgtgtctttaaggaacttcctacac

SEQ ID NO: 3186 - DNA, 2300 bp, Homo sapien
ttgtgtagaatcatacctacttatacttaatgctagcactgtaagaaataagtcttttttgtttaaaaaagggaagataagattaaagattcttagtgagatcatcttgccaatttgttgtacatctctcattcattgttgggggaaaaaaaagcacaactatacctctttaatgttattttcttccattatccctcatttatttggaaagataagggaaaccttgtctgtattatccagaagcacagatatttgcttgacacaatatttaaattcagcccaatctttaacattaaaaaattttctttttaacttgctggaaaagttggatacattggcaaatatagggaattcatgtcttttttttttttttttttctggtcttgctctgttgcctaggctagagtgcaacggcatgatctcggctcactgcaacctctgcctcccgggttcaagcaattctcctgcttcagcctcccaagtagctgggattacaggcgcccaccaccgcacccggctaatttttgtatttttagtagggacgggatttctccgtgttggccaggctttttgaactcctgaccttaggtgatctgcctgccttggcctcccaaagtgctgggattacaggtatgagccactgtgcccatcctcatgtcaatttttaaagtgataaatcctgatattatacattgcaattagtgtagaataaacgcttggcttatagaactctctgttcttagtctaaagctgttcccaaaccaggtcatcctcacgaaacattcttgaccaagaaaaaagataaggtcattgagataggaagacagaggaaaagcctcttgctgttgtttcttcccaagaaaggagaagccctgccagggagaagtcagtagtattgctgactcactgtatcactgagtgtagggtgtggtagcaaggaggaggcaggggattcacgctgacaggtggctctggcctggctcttggggggccttctgaagaccagtctgcagtttgaggaagggccccaacaattcatttggagagcttggccaaatactttctcattaaatcagcacctaaacttgatgaacttaaagtttgtttattagagttgaaaacattaaaagatgactgatactaatgggagaaaaatactaaagacccaaaatttaaaattttccaaaatggacaagaattgatgggttaatttgctcataactgatatgagtttgcttttatgtgtgtgtggaaagcatttaatgtgtgatgctgttcatagtcctggctatttgatgtcattttcagttttacaacattttgaggatgacactttataaaatggtaaatctttctcagcgtttacaaacttggcttttgagaagggaaaaatcctctttgctatttctgtaagaagaataactgagatcagctattatataggtttgcatggatggtgtccacaatacaaatgtaaacttggacaggaataggataaataaattgctttcatcataaaggccaatcatccatttcttagtccaaggagattaaatataaataggacacccctgagatttccagtaaggtatttgaaaggattccactgggagggcagggaatatattttttctcagagcatccagtttgtacccagttttctatatggtttgtgaactgtagcttttaaaaaaaaattttgtagttttcttctaaccttattcattaagtagttccttgttttggcccttctactcttggccttagctaaaagcagtaaatgtgagtgaattttatgttgattatgtcacctggatctcctttccttcccttctttttctcattgaatggtggtaccttaatttgggtaacagctagcttctggcaccttcataaaatacctcagaatagcttagcattgttgcaaaactggttttaaactaaaaaccaaataaataagtgaaaaaattttataaatagtggaaataattctagctgtagcatttagttgaactaatgtttattatgatcgataaacaagattgatgctgtatgtatttgggatcctgtttataggttacaatttatagggttagggagggttgggtgggggaagaggagatgttgattatgttagaaggaaaacattgctcgtgtgtgtgtttgttttttcttatatctgtcttgccaaaggaaacttgattttccctgtgattggctttggcctctgtggtctggtctgcagcagtgtgtggtggcatgcaggtaacatatggggtgtccagtaggttcagggaccc

SEQ ID NO: 3187 - DNA, 2300 bp, Homo sapien
ccatcaccacttttcagataataaaacctctttcatttccgtgtccatggggaactatgcaccctaaggtcctccacacgtgggaggggagaatctgttcaggaactctctgaagtcagtattcatcaagaaatgggtatttgggatgatcacaccacatgagcatttctatgaagcggacattttcactccaggcttcaatgtccttgattcagtgagagaaaagtcaaaggcctgaaggttttccttgatcttttcaggattaaagcttttaggaatgacaaccaccccttgctggatgttgaaacgcaaaataacttgagctgtgatcttattgcacctttttagaagtgcatcctttaacgaaggcagagaagacatatttgtccaggttggattcctagtggtccccaaagggctatatgcaatcatgacaatgtcatgttgttggcgaaatttcaaaagttttggttgggtgtaatatgggtggcactcaacctcgttgctgactggcttgggtttgagtcctgggttgttctggatgagctccagctggcctgctgttaaaactggatactccgagggatttcaccaagccagcatctttacaagcttccgaagtctcccaagtggcacacagatttgacttgtgatataaccatttgccattctcacctatagggtagattttgtcttctggcttagcggccatgggtatttcagtgatgtaaagatccacacaatctagctggaggaccttgagcatcctctctaggctcgggcagaccagctctgggttgtgatttgtagcccacagttttccacagtagaagatatccttcctctgcacctttccttctgctattttccccctgatggcctccccagctgtgtcttcattttggtatatgtaggcttcatcagtgtgtcagcaccccagaccaatgacaaccttcactgatgaagactcagactaaatgtagagacagactacttgggctgtagtgacatctctacctaccacctacttgctgtgtggccttgagtaagtcatcggcccccttaggggtcaatttaggctctgagtaggtaccaagtctgatgatgggaatgctgtttccatcacttagaggtatgcggtgatttgcaggactcactttcttcatagtgtcctttgatgcacaaaaacttttaattgtgatgaagtccaatttatcaattttatgttggattgctgtgactttggattattggctattcttgtacattaatttttttcatatcaattttggaatcagcttaacttgttctaaaactttttgttggtattttcaatgaaatagattgattaattaagagagaatggtggtctccttaaaagagagcttcctatcaaagaagggtatgcctttccatttacccaagtcctttcggcgttcttcagcaatgttttaaagtttgtttcatatagatatattacaatttttagacgaagtttatgtctaggttttaatgttttattattgtaaattactctggtgtttaaatgttgacaactaacacaagtgtttaaaatactatgtgagctacagtatttcacacaatgatccaaattcaggccaagttcagatctgcaacctcagatctactccagctctttgctttatagataaggaagctgaagtctagagatgttgagtgactgactcaacgccacacagcaagtaggtggtaggcagagatgtcactaaagcccaaggaatctgtctctacatttgtcctggactctaatccagggttctgtcattttgccagccaccataaaatatttgacagtctaggaaaacagcaaatgttcttacatccatcgagaacttgtatttgcctagagatggactttaccaatcaagataggaattagataagaattattttttttaaaaaaaggagcattaaaacaatggtcaaatgagagaaaaagcaaaattcagacagacagatacatacacacaccccaaaccctcaaacctccagggcttcctgcctgtgaaccgaaagggggagtgcgaatttcttggccctgtcggcaggtgctttctcaaaggccccacagtcctccacttcctggggaggtagctgcagaataaaaccagcagagactccttttctcctaaccgtcccggccaccgctgcctcagcctctgcctcccagcctctttctgagggaaaggacaagatgaagtggaaggcgcttttcaccgcggccatcctgcaggcacagttgccgattacaggtaggg

SEQ ID NO: 3188 - DNA, 2300 bp, Homo sapien
ataaagaatggaggccaggtgctatgagcttattgaccagtttccagaatagcagaatcaggagcacccgtgagagaatgagacaggccatcttagaagaagcaaaaggaatgtcccttacatggagcagggaagggcagcgggggcaataaattcatgaaaccgccgaccccaagcttaatgtcttaacaggtcctgaactggtaagttcaaatttgtacatgggatattgatagtagactaacaatccctttgtgcgtctatatgagggactcctgggccagtagtttaaaaggtcttgacgggcaataacaaatgttggtgaggatgtggggaaaaggaaacccttgtacactgttggtgggaatgtaaattagaataaccgctttggaaaaaaatttggagttcctcaaaaaattaaaaatagaggtaccatatgatccagcaatcccacagctaggtatatccctaaaagaaagaaaatcagtatattgagagatgtctgcactcctgtgtttactgcagcactattcacaacagctaagatttggaagcaacctaagtgtccatcatcagatgaatggataaagaaaatgtggtatatatacacaatggagtactattcagccataaaaaatgaatgggatcctgtctgtctttgcaacaacatagttggaactggaggttattacgtgaagtgaaataagccaggcacagaaagacaaacttcacacatcctcacttatttgtgggagcctaaatggaaacaattgaactcatggagacagagagtagagggatggttaccagaggccaggaagggtagtggggggacttgcaggggaggagtggggatggttaatgggtacaaaaaatagttagaataagacctagtatttcatagcacaacagggtgactatagccaataataatttaagtgtacatttaaaataactaaaagtataattggattgtttgtaacacaaaggataaatgcttgaggcaatggataccccatttaccctgatatgactattatgcattgtatgcctgtagcaaaatatctcatgtaccccataaatgtatacacctactatgtacccacaaaaattaaaaattttaaaataagtaaataaaaagttttttaaaggtcttgaactttcgggcttctgcctaactttactactagtgtaagtgggccccttgagatttcagcaccccagcatttgttagtgactgaaataatgaaaattctgatcaggcccttgcttgcacatgttgacaactctctttttgcccaatatcccttgttcctacaacataatcataaactgctgatgtactgtttctttatcaagcaggaggagataataacttcagggttacgaaaaagtttgcaggaggaataagtcctttgaagtactttgaggccagcttctgtcgcccagaagtctgattgttcaaggaattatctgagactgaagaaacacagactttttccctcgattccctgaaactccccctccctgactcgctggccgcataaacactctctgcttcttctttttgttagggcggatttgagagatcttgccctcccgccttctcgctttggccaaatcgaataaacttttatctccaagcacctatatgtcagtgtttggcatcagctacacatggggtacacgagcctgagtctgggcttctacaacgctgggaccctcgctgttctttggagctgatggtaaattcaacagaaaagaggcgcatgggtagaaaatgcagcatttcctctcagatgccagatattcatctccaaaggtattaaaaggagggggtgtgtgcctgtgtaaagaggctggtcttttcctagcagtacgatttgggcaagttgcttgatttcttcaagcctttctttttccgcctgtcaaacaaaacaaaacaaatatcccgtttaggacaaattcacaatccttaaagagggcaggcagagcgattggaatgcagatgaaccaatcccttctcctgcaggttgcggagctgcagagggaccccgccccctgcattgtgcttagctctgattggcgcctcgcggagggggcggggcctgggcgcgccgagctccggctgggtccctgcaggtcttggggcccgggactcttcctggagacaccgccatggccgggctatcccgcgggtccgcgcgcgcactgctcgccgccctgctggcgtcgacgctgttggcgctgctcgtgtcgcccgcgcggggtcgcggcggccgggaccacggggactggga

SEQ ID NO: 3189 - DNA, 2300 bp, Homo sapien
ctactcatggctgcctaaacacagctcggggctacctcttggtccctccctccccgttttccaccccctccctcaggagaagtcccagtctggggcccaaatagctctggagcagcattaaactctgcactggggacccaggagcatggtggaggccaagcttgtttgctttgtggtcatctgttctcagccaagagaggcctaagcagggcgtggggagcagctgcaagtcaccttgggtgactgatgttatctaggcctaacggtttcctctgggtaagcacttccgccctcctgtttgtgaagccagaaacctgtgctggggcagccccattctgagcacaaaggaggactaggtagagggagaaaggaaaaggccctgtggagcagagttagaagacctgatagtagactatgcagtcatcactacgtcctgcacctttaaaaagaaaggaaagaagcacgagcaaaagtgtgccttgcaggttaccagtaaatacccttccttactgccgactctgctctcgagtcttcacctgagcagccatgtggctggactgggaggggcctcactattaattcctgggagtgagggctcttttcactgggtccccgagtgcctgtctctaaataaaagaaatatcaggctcttattcatctgaagcttgtacatggggctaagcatgataaaaacagccactttttgcagagtgcctactacattgtataggtgaggaaaatgagaatcagagcagttaagtgacttgtctaaaaaatacaactagaaagtagcagagctggaattcagccctcaatctgtctgttcctaaaaccaggcgtcttcctctatgcttagctaagctaaagaactagaagccactctggcattagggctgccagtgttttagaaagttgggccttagaaagttctaggacaggaaggaggccatatttctaagactggtacccaaagcagcaatctaagtgcctgaaagtgcaaagatggtgccgggataaccagaatcagggtagtctttgtagcaggagcagactctcagccttttttctctactgtttctccacatgtctcttcacagtgctcaccatcacctgtcccattgcccacctctgatggggctcccctcccctggttgagctggggttgggcgggtgagaatgctgtgggataacccagaggcgtcatatacccagccaataccctggcactcacaggtctctcaaggcattttcctgtttctctctgccgaagggtctgaagggggccgggatccgggtagcagggagtgaccctggtgcagattccagtccccgaatccctcccatgcggtctctgctgcccagccgggatggccctaaaggaaggttgctatgctgggccctatgggaatcagatgttgagcatcttgccctttgctatatttaacaggaatggagacgaggccctttagcaagcagcttgtgggagccaaaattcccacaaaaccgaatgcatcagtcaaagcaaggtttgaagaaaagatttaccacttcagggagcttggaaaactttgcgtggattcctgattttcctcctcctcctcctccttctactcgtatacagaagatagatggatagatggatagatagtggtttcctggaaggtggagaggaaaagaggtgagaagggaaaggtggtcccgtcggcgccacgctgagctctgaagcctcggtcagaagggctcctcttttggtagaacacaaacgccttccaccagggagggtcctcgaactccacccaagaactgcagggaaaccaggtatgacagtaatgcaattttaaaaagagggagaggaagaaggaaagcaggaaggatggacacaaaagaaggaaatcgaaaagagaggaaacaaaaagaattaaaggaccactctaattcttgaagggacaggaaaaagaaagaaggcgcattaagggagggagacgttgagaaggactgagaccgtggcaaagcccagggtcctgagaaacttcgcgagacagaggggcccggtggctgcccatccccatgtttgggcacatggagtcgtggctcccgctcttgagtcctgccctgggagggacagtatctgtttagatttgcgtctaaatttaaaccctgatcgtcggcctccctccccgctccccaccctcccctcccctccccttcctccctccctccctcctcctccttcctcgttctctcgcgcagggcccccgcggccggggcagtcccgcagccgagcgcagccgggcgcgcgc

SEQ ID NO: 3190 - DNA, 2300 bp, Homo sapien
ttccaggcatttggacaaagaaacttcaaaagcagccactgtccaaccagcaaattgatggactaggcttagtgacctactggatgtgagacgcagggtgatttgtcaggcttctggctggctgagctattccctccctgcgtccctcccaaaccctagcacgggagtgattttggtatcttggtggaatcctgcataagttactacacatctcaataagggagggccttctcttttactgcaatcccctccaccccccaagccacacaggaagttgctcagctgatagtttcagggcctctgccatacactattccttcctcatctgaggggggagaaactgcctctgtggaaggagaccctccttgttttcctagaacaaagttgacacttgcatttggccctccagcagcaacctgcttgaagtctaagagttgcttttctcttatctccaatccttttcttcaagaggttagacaggccatacatcatagtgaatctgcagcctggggcctaaggcagtttgtacacttccagaagagggaagccacttctaaaacaatttcttaaggagacttcacccaacccaagaagctgggtgttgcctgggccatttccctcctctgccctgaagcagtggccagctcagagagaaccctgttgttttgtgtttgtgtgatctttgggtggatgtgtgcacaccacctgctgagcttcgctgtgtgcgtgcctcaccgccagccctaatctgccagagcttcctggccttgcaaatgtttctgtggagggtccatattagactccagtggttcttgcagtctataaagtctccttgaaggtgattccctgttccttgaagacaactggctgggctggatgcctgaatatagctccctgacttctctaaaggacaaacttattgcccctttagagaagtcatgaagctttgccggcaagcacagagtctagcttagaaaacacaaccagggccaggagtggtgtggctcatgcctgcaaatccagcactttgggaggccaaggcttagaggatcacttgagcccaggagttcaagaccagcatgggtaatatagtgagaacttgtctctacaaaaaattttaaaactagccaggcatggtggtacacactggtagtcccagccacttgggaggctgaggtgggaggatcctttgagcctgggaggcagaggttgcagtgagctgagattgtgccactgcactccagcctgggtaacagaatgagaccctgtctcaaaagaaaaaaataaaaagaccaccagggcccaggcacagagcctggagcggggaagagatagcggagttaactgtgaatcctgattgcactgaccacagtctagtgagcaacacatgtttccttttgaatatgagtgggaatcacctttaaaactatataacatttgcatcttctcaaaagccccaggtcctactaagattgacttagggctacatatcaggtctcattttcaaggaggaaacacagggaagcctcaagatgtgcagaagagagggatgtggggaatacacccaaccactcctctgctgaggttggaacagaacaaggaaagtccccggacctcctctcagcaggcagagaagtgcggggcctccctctggcaaagcctgcagatgtggccagcatacctccatacacacagcttcagaggcaagggtgtccaagggagtcttaagttttatcagaaataatgtcattcgactgaccagtaaggggagctttcagaaagttatggaagaagatgcgacagacacaggaaggacttcagaagcaagaagacaactggactctctaaaatgccactccgaaagcgaaaagggaagcccacagacccacgaagacgtgctggcctcgtgttgccagttctgtttctctttcaatacccatctcttcagattgaagggcttctgccttcttgcagtttttgctgacacgtttacccatttacaaaccttggctgcacctaacttttttttttttttttttttttttttttttttagcatttaagttcctagccaaaatacccgggcctctaggaaagcccttttctctccctctgagatctttccttaccaaccccagcctcccaacccgggtgtcctaggtgggaccagggacgatccttcggagttggtcaaggaggcgtcggaacagcaggcatttgcccttctagttggcagcagcgatgagccgcgtgctccatgctcagggcaggggcagccgcccggggaaggggcgcccgata

SEQ ID NO: 3191 - DNA, 2300 bp, Homo sapien
gccatcagcaaacctctgcaggctgaacacccaacagtcttccctgccatgccaggagcctagctgctttgctctgtaaaacctaatagaacaagcttgtccaacccacggcccattggccacatgtggccaagggggacggctttgaatgtggcctaacacaaattcataaactttctttaaacatcatgagttttttaagtgtattttatgtgtgccctaagacaattcttccactgtggcccagggaaaccaaaagattggagacccctgcaatagaactttcaagtgaagcaattcaactcagctggatggcttttgtttcttttccctttttgtagcaggctggtgagaggagatggaaaagtttattttaaaaactcagctccaagactccttttggtcccattgtagctgagtaggcttcaagggagggggccgcctcattgtagctgagtaggcttcaagggagggggcgcctatcccgtactttggatggagccctcttgatatactagagactgtggaatcctgccttgagcatccctgggctgcagaggagcccttggaaggggcttggaggcatggagcctctcccttggtgactgaaggcagatactgagaccggaccagagatgtggacttcagaactggggcagacaccattctactatattcataatatattaattctaccttctgcattataactttcttttcttcaaattttctccttgctgaaatggatctgaaaatatcaagcagcaaacagatatattcaaccactctagataaagaaacaaattttaagtatttttgatgtgtcatgttctaggataggttgggttgttaaaactggagaagacagatacccatggatagagatatggaattataatagatttcatagctccagttagagacaggaggctcagattgttaagtaatggcttgggcaggagaaagtctcattctttgccctttggttactattttagggagcttggacaagtcactgaaccttaatgaaaatattcaagcctggtatgctcagagcctccctggatgacaatttgtttccatttttgcttcaaggtcctgatctatatttatcaatccctcacaatgttgccccagtggtattggtttacggaggcatcattcatttatttgttcattcatttaccggcatttactgagtacctactatgggctaggggatggagccatgaataacacatggtctgtgtgctcagcaattacagtagaaagagaaaaacatgaaaaatgtgggtattttaaaagctctcgggccaggtgtgatggctcacacctgtaatcccgacactttaggaggccaaggcggatggatcacctgaggtcaggagttcaaaaccagcctggccaacatagtgaaacccccgtctctactaaaaattagcaaattagctgagtgtggcacctgtaatcccagctactcgggaggctgcggcaggagaatcgcttgaacctggcaggcggaggttgcagtaagctgagattgcaccaatgcactccagcctgggcaacagagcaagactccgtctccagaaaaaaaaaaaactctgtgagttccagccacatcttctttcagttcctcaaacacctcctgtctctcctccaggaggtttttgtgtaaactctactcaaatgcccttggctacctctggccaccctctgactaaccctccttacccctcaaacctcacactttgcctggatcacttctactgacctcagtttaaatgtcacatctttgggtcagattttcttgtcacctgctctcctaaaacccttttcctcttcagcatttatcaccctaataaataataagctggagctaagataataatggctatggaatatatgtctcccctactagactgtaacctccattatgaaaggactcttttgatttggttcattcctaaaccctgagcaccaactgcagggcctggaatacagaaataatgaatgaatgaatatgtccaagatgtactaaaaaaaaaaaaaaaaagagggagctgccaattctgcctgaatgggggaaggtgcatggtggggaaggggagcttcacagggggttttctggaagtgcccagggtgaaactgtgcttgaaggaagctcagatgtcagtttttcagattgtgctgtctgtatatctaggcattcataaatactttctagaactttgtgtagtgttttgcaaatgtagttaaacagatttgtgaattcagtaatttataaaaacttaagcttg

SEQ ID NO: 3192 - DNA, 2300 bp, Homo sapien
aatgctaaatgggtgtggcttaaaattaatgatggagaaatgagatcttctaggccattctaggaagtccagctagcaaaaaaaaaatcaaatgtgtaaaaacagggaggactcaaggaaataaactagtggtaaggaggggttcaggcaggcttgagcctgccggctagggccagagtggaagtcccccagccagggtgatggagacccctgaaggcagagaggaaccttcagagagagccgcatcttctcacagggtgaggcagggagggaggagctgctgcctggtcataatgcctggaggcttcagccttctgacagcagcaagaggaagttattttggaaccctgctggtcatgagggctggggccttgataccttccagagctggcccaatcatggtctcaagaaagggcttgggaggccctgataaaccaagtattcattccatacttcttagatggggaactaggattgacaaataccaaaatgtaaatcagtgggaaaataacatttacaaaaatttattttacacactaattttttttttttttttttgaggcaaggtcttcctctgtcacccaggctggagtgcagtggtgcgatattggctcatcgcaacccccacctcctgggctcaggcaagcctcctagtagctaggactacaggcatgcaccaccacaccttgttttgtattttttgtagagacagggttttgccatgtcttcaaccaggctcctgcagcttctgggctcaagtgatctgctggcctatgcctcccaaagtgcgaggattacaggcgggcaccaccacacccagcccacttatatactgatttttaaaggatgcatcactctagtaggtagggtatctgatgtgaacatttccattgcacctttgactaagtctgataagctgagaagaggcctgattctgagaatcacatgcttcccagagagatcaccttcaggcagctctgctggtgctcctgagaaacagcttctgacagtggtggacctgagttctagaagcaaaggaatctggctgctcaggtttcccagtatccgccaacttcacgggggcaggaaggacagagttaggcaagagaggaagctggtcaccaggtctccagctcagcacccctgaggtccctgcaccagggcctggccgtcagcaggtctctaaccctcttctcggtgcgattcatctttgtcaaagtataattttcaaaagtacaattttcaaatttttcaaaattttacagtgcaataaaatcataagttatcttttttactggataggaagcattttgcatcttcacaagataaaagtctgactcttatgcaaaatagagattttattcaatatgtcaatttatgaggaaacttgtaagatggtaaaacttagtcaaacagcatttgaagaactggttatttatagataattagacaatttcttttttttttttttaatgcagggtctttctgtgctgcccaggctgaagtgccatggtgtgatgacagctcactgcagcctcaatctcccaggctcaagctatattcccatctcagcctcccaagtagctgggaccacaggcatgcaccagcacccccagctaatttttcttactttcagtagagatggagtctcgctacgttgcccaggctgatcttgaactcctgagctcaagcgatcctcctgcctcagcctcccaaagtgctggattacatgtgtgagccaccatgcccggcaagaatttttttttaagtgtcagaataaaattactaaattagacaccgaactgattaatgttttacagtgcaataaaatcatgagtttttgtttttgttttttactgaatggaaagcatttgcatcttcacaaaataaaagtctgcaggtcaccatgtgatttcacaatcccacatggctctaatctataataaatagcaaacaatgattcgttctcctggaaaattaaacggtccttgcgtggacttgtgaagcagtgcaccagactgacattgaaagtgcatacagtcctcctcttggcctttttttatgagtttttggataactttccttaacactttcttctaggtgcggacgaggggctcaataaaaaggcgccctccctccaggcgattccgaaggtcacagtcagactgtggagaacttggagatttcagggcggtggagtcatctcagcagaacggtgctaaggaagaggatggggatgaagtgttgccatccaagagcaaggccccaggatcccctttgtccagtgagggagcagcggg

SEQ ID NO: 3193 - DNA, 2300 bp, Homo sapien
ccaggctggagtgcaatggcgcgtgatctcgtctcactgcaacctctgcctcccaggttctgtagcaggatgagccgcagacaaaactcctcagacacggagttaaagaaggaaggggtttattcggccggaagtatcggcaagcctcctgtctcaagagcctagctccccgagtgagcaattcctgtcccttttaagggctcacaactctaagggggtccgcgtgagagggtcatgatcaattgagcaagcagagggtactgtgaatgggggctgcatgcaccggtaatcagaacgaaacagaacaggacagggatttttacaatgcctttccatataatgtctggaatccatagataacataaccggttaggtcaggggtcgatctttaactaccgggcttaggtcaggcaggcccaggcctggtttcgggtctggttcttaggcgccgggttacctgcctttaatttcgcttctctttccttttctgagtataaaactatatgagaggttctgtctctcttctctcagttcaagcgattctcctgcctcagccacccgagtagctgggtacagtcacgcgccacccatgcccggctaatttttttgtatcttttagtagagatggggtttcactacgctggccaggctggtctcaaactcctgacctcgtgatctgcccgcctcggcctcccgaagtgctgggattacaagtgtgagccaccgcacccggccctcatttttacaaatgtaattgagtacttgtttgtgtacactagtagacgatgtgcttcttgagagtaaagcccaggtgttctacatccatggttcaattaatgcattggtatcttttccaacctatggcatttgagatacaacttcaaaaggatctgctgacagaaatagggcaaagtggttctggtattttttttttttaagtttttttctcactaatgttcttatgatttcgctgtactgcaatgttagctgaaacagcacagatatcaggaatggcattgttaagactgaccttagacaaaaaccctgaagtgagaggttacattttgggttctcaccatactcttcccccgctcttgtcctaattgtctaaagcttgcttcccttcctcatcgtatcagcctcccacctgaatcttcccttttcctccttcacactcatctttcttgtgcccctgtcccccatttttcccttttgtaagccattttcataaggatccttccaaatatttcccctattgattggacaacccgtaggtggcagactgttctgggccaaggcaaccaagttgagcagggccagcaatcagtgtcgggaacttctgcagggcacttcagaatcagtgttgggaacttctgctttctatttttcacggacacagacaggaacacagatatgcgaaagcaaaacaatcaaaaagcattttcatttgtttttcaggtagtaggaaagagttccagattcccatccttctgaagccaggagggaggttcctaagaggaggttagggcaagatggagacttctttttaaactagtagatttcgcaaattgcaacacatacattatctagtccacgcaaaggacaggccttggggacacggcacggggaacgtgttccacctggacgactgaatcagaagtctctcccccatcaattgaacgcctcattatttttctttctgtcttttctttctttttaaggtaaatgaattgcttctttttcgttaggtgaggccggcagagaacaagaagagctgaaacggaggcgaggttagtacccagcaaagacctgtggcgaggagagacaatgaagaggaccacgggactggaccctgagaaaggcagaggagacgctggctggtggggcccgcaggcggacagccacgcaggcaggcggaaggctcggctcggcctgggaccgctgcagacccggcctccgcgcggggccgaggcgcctgggtgggaccgaggaggcggggccttcccggcggacggatgatggacagcctgactctccaatcgcgtccttaaaagggtgcgggcaggccaatgagcggacagcgagggccggagtggggctgaggcttcggtgcagagctggagagccgcggctgggaccggagtggggagcgcggcgtggaggtgccacccggcgcgggtggcggagagatcagaagcctcttccccaagccgagccaacctcagcggggacccgggctcagggacgcggcggcggcggcggcgactgcagtggctggacgatggcagcgtccgccggag

SEQ ID NO: 3194 - DNA, 2300 bp, Homo sapien
ctgtcaaaaactctcattgccacttggaacacatagcctagttatcagtttcacaactattctcaaagacttagtaagaatatattagaagtccttactatcaatgcagttactgaactccgtaaaaataatttccacagtggtgcaaatcgattagtatagttgagttgaattctttatcacagctttttgacaggtctttattgatagcttcactatgtaagttttctttctcaatgccaagtctgacagccctgggtttcaactcaactctgccacacattaactgtgagactttgttaacctctgtctctgacctttaatattttcaagagcaaaatgaggataatcatagtactgacttcataggattgttctaaagattgagataaggttttaacacagtgcctggtccacagtaaatattgaagatatggaaagttcaggaaacgggccaggcgcggtggtgcatgcctgaaatcccagcactttgagaggccgaggcaggtggatcacctgaggtcaggagttcgcgacaagactgactaacatggtgaaaccgcatctctactaaatacaaaaaaattagctgggtatggtggcacatgcctgtaatccgagctacttgggaggctgagacaggagaatcacttgaaccagggaggtggaggttgcagtgagctgagatcacgccattgcactccagcctgggcaacaagaagaaagttcagaaaatggtaatcttattaattgaaggtagacccagaaagtacttttctttaagtactttaaaggaagttttaattttactacaaaaaggatatactgtgttaacctatttgcacggtttctgaactaataactttatagcagaaaagaagctgcttggggtagaggagtagtaggtggggtggagaatgctcaataagagataaattctttagtctttttttgtggtatggcatctcttttaaggaaactttgatccaaggtatgtcagtgctgctgtttcctcatagtaaatattttcttttttaacttataaaatcatagcgaaaggttgaatgttaatgaggatggacctcaaagctaaggttcctttctgtaaaacaaaggtctctactggagcctgtttatataatgaagcagaaatagaaaacactggcatttattaagaatagctctccctaaggggattgtttaattaaatgaggtatgattctaattataagactggtttccacaactcacaccagaaaattcactcaatgaacataattaaatgaccctcttgttttcctccctaagacaactgtgttttacaacatttggaagtacacagtaaacaattacagagcggggctttataggagaacatgtacagctttttaaataagactttttaaattccaattttaaaagctgtgcccctaaatgataattgtggttgtgatgatatacataagaacatttagaaaatcaacacatgatttaagctgttagaaaacacaccagcctcttaaaatacatttttccagtgtcacatcagataaagaaaactcaaatccagtgcccattggatttcaagttatctttgggataaatttgattaaaagcgtgcacttgaccagtcagaaagggcaggtatataattcttcaaacaaaaatttacctcacaaatatatctgaaggtaagtattgaatttattataactggtaaatttcatagtcctggtacaagctgtaaccactattgactaaaattaggtgtttgcttgctctggagatacttctgatgatcacctaccaactattgcctaatttcaaccatcctccacatggccaagggaagaattgtgtaaactactctggggtcatgtcagtctcccctgacccttgcctcaaatgtgcggataagagaacctgaaacagccagtccttccttgtacagtagtaggccactcaggttggtgggggaggggacggcagtgccacccaatcagaaacatggtcggtgcccgtggaacaatgagctactgatgagggtgtggcctggaaaacggcttttagacaaaactgtcattttatgggtcagctatagacagacatggcgcttcagctgtcttcagaataatgtcacccggcctcctctcctgtcttctgcagtcttaaaagacctagtccctaactgaggtctggcttttcctcagccctggatgaagtggaggtatgtggaagtaagagtctcagcagaaagattgattgcagagctgaagatgagggcgaccgtcaggaaagaa

SEQ ID NO: 3195 - DNA, 2300 bp, Homo sapien
ataatccagatgttcaattcattccattatcaaactggaaatcagatttagtaaccagttcagactccagagagctggttcataatcagataatgggggaactagacaactttcctaatgataccaactacagaatacagattttaactatgtaggagaataaaagccacttttcgggtagcacttcagtctttcaatttacaacacattttctagtttgccaagtcttaggcttgaaacagacctcagaatatatctgatgttagcccctagcaaataagtattattacaactcactttatagaagaggtaacagaattctagatctttaataaagggattggaatctttcagtttcttacagttttttttttcaaccacaagaacacagttttccagtaggcaaagagagatgtaacgtttactgagcatttacaaagagtcaagcacatatgttatctgtcattctcatagaccgcgtattacacaaacagagatctaggcttttgctcaaggtcacaactataagtggtagaagagaatgatatccaggtctgtccacacaaaaagctctgggtagagcttgttcaacaatttcataaataaggatagacttaaaaaaacacactggacctatgggatgagaaatgacactgactcaagcctggatgaagtaaagcatgcagtttgggggagggctcagtctgcaggcctctgccagcagcagctgaagaaagtgacctttactccaaaccctacagtgcgacaaaccacccatccagctctgcctagagtgggttaatatgccacaattcgaaaagagaaagagaatgagtgtttcatggtggccccagacagtttggtggccgcagaagttgagaaggctcaaatctggagatcaggtttgggttggagtcgtgcgtaagggagcggatgtcacataggtggggaagggagctgacttgagatacgttggcttaggaagagatgttgcaggagagagggtgaaatgcacaggctaggagagtagacggcttcacttgaagggaagggattggggctgtggatgcctctagaggcagttgtcagagggcctctaaaaggtccattttagaggaagcgagaaggaaggtctcgataaggagccattcagggtccattacctgctggatggttgtacaacggcctcaatttctcgggcagcatcagctccactttatcgaggagccggtggtaggtggcccgcaggcctcgggcaccggcggccgacatcgccgccgagggatcgttggcagccgggtgggagcgtggctgtgttctcgtccctggctgacaacgaaggggagctagtcacttttcctgccacgacgactcgcgtccgcctctcgcctggagtacccttcccgcggctttccctgcccgctgtgaaccgaaaagctgcggcccgcgccccgcgaaggttgagggggcggaggctgccgactgccagcccccggtccgcctccggcccccggcaggagagagggaggagccatggcaacaggtgccaaaataatcacctcaccaagtctgcgctgcgccctgctggcagcgcgcttgcgcaggccgagctgcccgccatgattggcccgccccgaggcgcgggcggggtcgagcggaaacctcctccttctccccatgccctcgaggccatgttggagaagggaaagtgaagctgcgctggttctactgccctttcactttgattaagcaggcccgtagttaaaatgggtttttgggccttcagtgcctaaagatgatgccgcacaattctcttgcttcttttcactggagactcgtgagcgagagactacagaattgagtagcttctctctctactcgtcttttatccctagcgacttaaggatctggttagagtggcccgaatgcattcttccagggtgagggcagccgcagcacacaccagcctcagtccccagggtggtcgtcatctcgcgagaaagggttggcggggagggtatccaggacgaggagagggaggagtcgccatcgcctccgcctccgcctcctcctgttggaggggggctgagggaggagactgttgctgatctttggatgttctggttagtctaagaaggagagtatgaggcgagctccggcccgggtgcggccgggcttcaggggcccaggcgccgctgctgccaccgccatctaacgctgcgccctggaggcccggcgcgcggatggtgccggtgcggctcgggtgttgaaacgggtgtcccctccccctcctcccctcc

SEQ ID NO: 3196 - DNA, 2300 bp, Homo sapien
aaatgtattcgtattttacttgagacactaaaaagaattaaaaaattgcatgctaacttttcttaaataatttacaaaccagaactgttggttgtaatgagatttcattttcttctctttacttgaaatcaaaaacaaatgagagcaacaaacactttttaactagcaagtggcaaaactggaaagaaaaaaattttatgatgttgtttgccgtatctccaaatagaaagaaagagtaatgaagagtatacaggaagaaacaaaaaagacctttactaagtacgtccatttttaagaaaccaaactttttagttgactcgggcgtgacctagaatcctcaaaaaaaaaatgttatgcaaaacgaaaaaagtggaatactgttcccccaagtactgaaggttgtttttagaaagcttaactacgaaactgtaaatgccaagtgtgttttccaggggtgggaagaggaacgtgaaaccctacaccacctttaagcggtcaaaacgaactgaagagcagagtggaactgggagagcgcgcgggggtggggagagctcagctatcacttttaggttttggctcagcgccgcaaaaacagtttacacggattctgtctggagcgtgaagtccctgagggtggtcaacgcgtcgcagccgacacctaaaccctctggagattgaaggagagggtgggcaacaacttaggttcttcggctgagcggggaaagcgcgctggaaaagagcaaaagagctaacttttgctctaaacgcggcagctcctggaggttccgcaagtctcccgagtcccaacccatcagcgaccccaacacctttacaagccagtaccttctgcccacggcccggccctccgagaaaaacccagcaagggcggcggctggcagcatgcacagggggcttgactgggggaggcaccggcacggaattcggcaaccaaggccccacccaacaccccagagtctccgggcgcccccaccgagacgccgtcccacctccaacagacccggcagcgtgccccctcccccactctaggcggcgacctcagcgcctccgccccggggcccccgctcacccaggtatcgactccgcagccgggacgggtcctccagcccgagggaccttttcctcacgtcccacaacaggtgtgggtaggagccaccccgagacatggctctgcctgagccgggtgggaggggagaccaccgcgtgggggaggggaggagggggaggggacacccgtttcaacacccgagccgcaccggcaccatccgcgcgccgggcctccagggcgcagcgttagatggcggtggcagcagcggcgcctgggcccctgaagcccggccgcacccgggccggagctcgcctcatactctccttcttagactaaccagaacatccaaagatcagcaacagtctcctccctcagcccccctccaacaggaggaggcggaggcggaggcgatggcgactcctccctctcctcgtcctggataccctccccgccaaccctttctcgcgagatgacgaccaccctggggactgaggctggtgtgtgctgcggctgccctcaccctggaagaatgcattcgggccactctaaccagatccttaagtcgctagggataaaagacgagtagagagagaagctactcaattctgtagtctctcgctcacgagtctccagtgaaaagaagcaagagaattgtgcggcatcatctttaggcactgaaggcccaaaaacccattttaactacgggcctgcttaatcaaagtgaaagggcagtagaaccagcgcagcttcactttcccttctccaacatggcctcgagggcatggggagaaggaggaggtttccgctcgaccccgcccgcgcctcggggcgggccaatcatggcgggcagctcggcctgcgcaagcgcgctgccagcagggcgcagcgcagacttggtgaggtgattattttggcacctgttgccatggctcctccctctctcctgccgggggccggaggcggaccgggggctggcagtcggcagcctccgccccctcaaccttcgcggggcgcgggccgcagcttttcggttcacagcgggcagggaaagccgcgggaagggtactccaggcgagaggcggacgcgagtcgtcgtggcaggaaaagtgactagctccccttcgttgtcagccagggacgagaacacagccacgctcccacccggctgccaacgatccctcggcggcgatgtcggccgccggtgcccgaggcctgcgggccacctaccaccggc

SEQ ID NO: 3197 - DNA, 2300 bp, Homo sapien
ctattgttagtgttagtgtattttatgtgtggccggagacaattcttcttcttctactgtggccaagggaagccataagattggacacccctatgttaaatactttttaacgtataacctcattagtggtaaaaattttgtaccgccaggtgagtgaaagatggcatattttcttttatgtccaatttgcttatatttcttttttgctttctctttaggttaatacaatctgttggaatgacactggagaatatattttatctggctcagatgacaccaaattagtaattagtaatccttacagcagaaaggtaaagtagtttaaaaaatctgtaatttaatgagagaaaaaaaatcaagaaggcagaaatgaagaaactgtgaacagtcatagaatgggcatttatattagaatatcctccctattttgctgaggtttattgtataatttagaggttcttaggtacatgtgggtctcttagattacttagggaaacaagattttattcagccttgggatctagaaaatttaaatatactttatttaaatggttaataattggtacaagtgacattatttcaataacattttttgggggaaaatgtgccataaataaagtatgagttaatgagaaaattacttttatgtgttaccttaatatattatcttaacattctaaaaagttacttattttaatgttaagaatagtgtgggtaaagctgccaactttggtcattgtttcgttttcttaaaaatttgaaatttagtcttttagaaaatttacatttaaaacttttaaagacaaaaacagccaaatgactgcggtgtgaatagttcttgaggtactgagaaaattaaaatggtttcaatgaagaaaaaaattaccataagctaataaactccctcactagaaggcaagagatatctaagaattaaataattttctaactctcaagtaactttaattactgtttcaaatagcattccattttatccacagaatgtttcctttacaaggatggtttcagagaaattaagatactgaatgataaagctataaacagctgactgattgtaataaaaagaaagtgtgtgatgttctttacacttgacataacagttaaatgagaaaccttctgttttagaaatatgactaaatagttattttaaaatttgtaagatcttaaacattcaacacatcatttaaagttccagttaagaataggaatatgtatatttcctagctgcctcccaactcacatgatacatttttctctcctgattgtcttaaatttcctgtatcttttttttttttttttttttttttttgtggcaaggtctcactctgtcacccaggctggaaggctggagtacagtggtgcgatctcggcttactgcaacctctgcctcctgcgttcaagcgattctcctgcctcagcctcccaaggatctgggattacaggtgtgtgccaccatgctcggctaatttttatgtttttggtagagacagggtttcaccatgttggccaggctggtcttgaactcctgacctcaagtgatctgcccacctcatcctcccaaagtgttgggattacaggcatgagccaccacgcccagcccaaatttcttgtatctttaagtcttttaacatctattattttaatagtaattccaaaaatgtactccagcttttaattttttatggtagtagcaaccgtgtattggtgattgtatcagtcgggttctagtcaaagaaaccacacagtaatttcaatagggaaagtgtaataaaaagaattactacctatatcaggagattggagtagtaaaggcttggctgctaaaaagtaaaaaggtctctataaaatacagaaataacagatactatgaaccgccactaaccctgggactgagataaaccactgaaaagaagagacccccccgtgctgagtgctgagatttagaccttattgaagagggtgtcatggctcactggatggcagggaagtctctgtgatgtcatgctagtgtaacttgttgcgaattcccctctggaacttggtggaacacctctctctagagcactgagaaatactttttaaggagaggtttctcatcagaggtagtatgctacaaaatgtctagggacgtggggaaatgaggcaggagaagctgtcgggtgttgaactgttcatttagtaggtgggccctggtgaaactgcaggactctggtgctatggtgttggggaaactgcccgtgctggaagaccctggcactggaaaacctgtgcatggttgc

SEQ ID NO: 3198 - DNA, 2300 bp, Homo sapien
gcaataaaatgaggtactatgtttcaattcttttgggtagttctcctgtatacccaagagaattgaaacatgttcctacagaaacttgtacatatgcttaattcagcattattcataatagccaacaagtggaataagtttgttcgtcaaccaattgacgaatggatgaacagaatagggtatcttgctaaaatggggtattatgaaaaatgaagtactgatacctgctacaatatgaataaaccttgaaaacataatactaagtgaaagaaaccaaacacgaaaggccatgtattgtatgattatttatatgaaatgtttagaaaaggcatatccacagagacaggaagtagattagtggttgccaggagctgagcagagggatgagtggggagtggctgatgatggtttgtttctgggatgatgaaaacggtctggaattatataatgatgacggttgtacctctttatgaatatacaccactgaattgtataatttaaaattatgaatattatggtatgtgaattatatttcaatacaaaaatgtttaaaatggatcagatgtggtggctcatgcctgtaatcccaacactttgggaggcagaagtgggaggattgcttgaggccaggagttcaagaccaacctgggcaacatagctagactccatctctaaaaaaatttttaaaacagctggttgtggtggcacatgcaccaactactcaggaagctgtggctggagatcttattagctctggagttggagcttacagtgagctaggatgggaccactgcaatccagtctggagaagagtgtgagaccctgcctggaaaaaaaaaagttaaaaatgtaaacattaaagggagcggtcaagagtgataggtgccataaacatgtcaaataagctctgaaagatgctgtttgagttggcaattgattattgatcatattattgaacactttataattgatcagtgaacttggcaattgatcattcactggtgactggtgagaatgaagttagtggaaagataggaaatcaatggaaagattgactacagtggattgaaggaggagtggtagattgaatatagaattttctcaagaagcttaagtaaagtgatagcaagagaaaggactgtagctgtaaaactgagattttatgaagttgaaatattgttttttttcttaaaaatgataagaacctttagcatgctgtggcaaagagccaagagagagaaaatggatgtaggtatagagaagagagaataattggtcaagcaagatactcaaggagttgaaggaatgaaataaaaagcacagatggagaaattaggcttaaatagaataaatgatacacccttcaagaaaggctggaaggagttagaaagttgtagatgtagatttaatttatagaattcagctgaagaaaatgatgttatttttattttctctgaagtaggaggaaaaattgttaagagggcaagaatgagggcagcaggatggaatagatagcctgaggcaagtcataaagggtcgcaatagattctgtttgggaaccgaagagtaaattgtcaataatgagtaaattgtcaataataaataaaaataatgatggttcccattgttaattaggtatgtgggtaatttaactagactatatttatcatcacaatagaaaactaaggctcaagatggttaaaaatatcttccttttgtcagctggaaggtgatacaggtgggattagaaatcacatatacatgatttcaaagttgcattcaggctctttaggttgaagatattagatataggctgtcaacatcagtggatatttatcctcagaatgaatgctttaaaagactgacgcttataccagtgtctttcatattttcatgtagatctaatttgcatactcaagaagtagggagatggaaataaatagacataaagtatgctttaagagttgagagtagatgagttttagacttacatagaatttacccgttcttattttttagttgcgacaaccaccagttaagcgtttgagacttcgtggtgattggtcagatactggacccagagcaaggccggagagtgaacgagaacgagatggtaactatactttggtcagcttttctttgtatatggtattttaaaattaatattttaacttccagtttcttcactattataaattattctgtaatgaacattcttatacatataggtatacttatgcaaatatatcttaggataaattcttagaagtggaatggcgcagtcactggataagtacctt

SEQ ID NO: 3199 - DNA, 2300 bp, Homo sapien
tcatcgtacttatcacgtcttttccattctcatgtttctgtacacaaggagctggcatcttctgaagaatcttatctaaactttttgggctttttttttttttagagaaaatcattagtcccattcttcttttgaatgctacttttccttctctaaaaactgaccatgaattatattctcattcatcaatttcttatttctttgtcagaaaagcagttagcattttttattattatgcaagtattcaacattcattgtaaaaaaaaaaaaaaaaccaaacaggcagaacttaaaaaaaaaaagtatacagactttttcatctatatcaggattgtctcttgcttttattttagtttctttggcaacagatgaggcaatagaacatgctaagagcttggactgaaattgacaagtttttgaatctctctaaatctcagttttctcccttgaaaacgggcatgtttaatagaacctacttcataggtttagtatgaagatttaatgagatcatgcagagaaagtacgtagcacttactagcacattgattggcacctgagaaggccctcattgattgttagctacagttctcatcttttgtaaattgtctttcagatactttgcccagttttctatggtgtttatctttttcttattgcgttattagagctatttatttattatagaattaaatgaggattataccatttgtctttcatttgttgcaaatatttttcccaatttggtgtttgtttttcagtttacttacagtggttttgccttatggtttctgcctgtgatagcatgcataggaaagccttgttattcctagaattaagggaaaaggttcttatattcctctcatattttctataatttagtatcaaaaactgtatattccttctagaatttattttcccataaagtataacgtgaagccatagctttggttttaccacatggctgttttcttgtctcattaccatttattgaataatctttttatttctgtgtgatttaaaatgccatattaacgtatgttaaatatatttactcggttgctgtgtcttttccactaatatgtctctattcctactcagtaccataatattttaattactataatgtatacactaagcgttttattcatgcctgaatcatagctttctcaatggaaaaaataaatatatatataccaccttagcttttttttgccaaaatagctatatattcctttctggtttaaaagaaatacatgtttgtcgcgcacacacacacacacacacacacacacacacacacacacaaattcagtataaaaaatttacctgcagtaattctactgacatgacactcaacactgatgcatagccttcctgacatttttctctgcatatatacacccatatgaatatacagttttagttaaataatattatatatgtactctcttttttttaaaaagtcaatttgacttctgcagtcagcctaaaagagtttttgtcatggcaaaaagtccatgatcgtttgtattgtttattgagttactggtatttgtctataattaatgtttttttaagttactgtaaatcttactttttttcttgttcacatttattttaaacttaaagaattgttgcatttctatgaacttaatttaaatctcagtcagattgttatacatgtcctctttctcattcagtcctcttgttacacatatgccatgatttgtcacagaatacttattgaaaattatttctttaaaaattggcctcgtattccgctatagctagaaatgctaatagaactatagtcatcatcaggtgagtattaaaactgaagcagaaaatattaccctgtccttctacagaactatgatgctcagtcacctgccatgtttgaacagcagatcagaactggaagtgatccacagggagcagttcaaaagaccaaagaactggccaggcttttgttcaaatactaattttaaagtagcctggaataacagagtctagaagggcatatgataaaaatctgtataaccattaaggttttggatatggtgaaccatctgtagtgaagacaagaaaggagacaatgtagttcacttaaaattcaatagagagacatgtagaaatacatactagataatgaaaggatccaaacagtgaagaagcagtccctttatatttttgaattttttttcaagagtaaagtgtgttatgatagtcatcttgatttgtttgaaatgatgtttacaaatgctattaaaattataaatcctacattttacttgtgaatt

SEQ ID NO: 3200 - DNA, 2300 bp, Homo sapien
ctcgtcctagaaaagatatcttacttgggtcaaacggatgtggctgcaggcagtttaccacatgattatcagcttccagaagcatcaaatgctcagcagtgtgccgatcccagatgaaaatgtggccacagtcagaaccactcattacaaagttagcaccccagaaattggcttcttttatctaagggttaaaaaaaattatttaaaaattcaaatcaaagttattaaaacaaagatttatgctactcttacatttttttatttgttttaattcttacattttttaaaaaactggcttagaaaatagtaaaattaaaaattgatgctgggcgcagtggctcacacctgtaatcccagcactttgggaggccaaggcaggaggactgcctgagctgaggagtttgagaccagcctgggcaatatagtgagatcccctatctataaaaaaaaaaactgacaaaaatctgtcttctagcttctttaaattatgataggcattcatcagcaagggtaagatggcagtaagtaatagaaaatcccccctaagaagagggactttgctttgttcaatactatatttacagcacctgaaatggtacttgggatacaataggtgcttaattattaactgctaaatgaaagaataggatttctgggttttgggcagtataatggcaatttacatatatgttgctgaactttccaaaaattgtaccaatttagctttataagacaatgaaataattcacagataaaagaaattgtcttttgtattttgctttagacccaaagaatagaaagaagatcattagctattataagctaacacaattgagaaagatacaaacatacttaattttatgaagcagaatcaaaggcatatgatatactggaatagttataatgacatttttaaatgaatgcacatgaatgaaacatcaaaaatctttgtatttcaaacaaggattttaaaaaattttaactgcagctgctactttgccatttttggtgctctcacaaaagaggggagacaattttattgttatctgagctactgttaaatttacttatcttctcttttctcactccttcctctaattattttcatgctaacttttaggcaataaaatgcaagaaatataaattggttacttctattaataatgagtaaccttttaaaaatgagtaaattgttactagcaatgacatttatagaaagagctaattacttccccaacccaaatgttattttttaacctagatcctaaagaaagcaagctacaaattcatcagcaagggtaatatggcagtaatatggattaaaactgattctgtagataccttctgatgatgcaatgtatatgaggagaacaacactttctagttatgaagggatcagagtaacagttacactagtcatctcaaaaacttttcttattaagtaattaatattacactgggtgtagaaacttgtagatcgtaaaaactacaaaagatcttagagatctttctggtctattcttatttcatctggtaagtcactaaaacaaattttcacttgtcaatcttaaaaatgggtataaagtggcctgacaattttttgcaatcaacttagattttatagatccaaatccttctctccaaaactaacaaagaatgctaatacaagctaaaaaaaaaaaaaaaaaaaatccaccagaaacttttcaggtagacagcaaatgtgagaaagagagggggaaaaaaaaaaaaaaacaaaagcaatgattacttgtataaactaaaaatttttttaatctgcatttttttagtagagttttcttgtaaaaaataatgatctttcacaatatattatagggctaaaagaaccatgttggataaagagataactgaagatttaataatgtaatactgaaatcccattggcaatatatgaagataaatcattatggaaaaacactcagagcatgaaactgcaatttcaccaaaaaatgccatgaacatttggtaccattgtcctggagttgcgatggcctttataaaccatttttactagcggccttctaatgttcaaagtatccaattcttccatttctttcctttcttttctccgtctgaagaactcctgaatacgggcaacagcagagcgtctatatgaattacatattaaaaaaacaaaaataaataaaaatattcacaaagaataatgagaaacttatgaaaatatagtaagtctaggaaatacataaacacactatctcaataaggcacccccaaccaaaagcataaaaacgcagaca

SEQ ID NO: 3201 - DNA, 2300 bp, Homo sapien
cacacccacacgtgtttacacacacagcccagatcctgggtgaggtatggttataactgaacctgctttccctgagcctcagtttcctcctgtggaaaatgagataatggcccaatgagtgtatctgctttgctggaggccaaagctgccatcttgcttgtccgtcgctcctacagcggtgatggcccttgggtcctgtgaggagaatgagttctgccgcagcccaatccctacatttttctactctatatcttccccgctcacccccagggactgttgtttactctggaacttggaattcgtttcccatccagacatgctgattaggagagtgacaagagccatccagataccaatatgactgggctgtggatttggtggagtccaggggctgtccgatgtaaggaggctcttcagaaatgttgaatatggaaataaatatggcctctgtcagagttttaggttcataattaatcacatctcttctccacacccctccctgagttcagaatgaatggagaggttgttacagaggtcagaggtggaaaacagttcattcgcttcactggcaaagcagattatagaacagagcttgggccagcagcctcatgggctttataatatattgcctttctataggaaaaaatgaactaaatgctccccaaccccccagcccacgtagggccacacttgccccatcagtcctgctttgtgagtgtggcagctccaaaggcaccctccaggtggtgcaagagcaaggcactgccagggggtcctcccctgccatgagtgagtggcagggcagagagtggctggaggtccctccagtctttccctcttggagagtggggtacaggttgcctactttccagaaaatgtaaggaggagaggataaattgttcccctgaaatgtccagagaaaataggcaatgagttaataataacagggaacagggtgtgaaattgaagggctcccccctctcacttctgttcgttttagtttagggctcctaatcctgggagggggcttgaacctgtaatgtcacgtccaaccttgaggttctgcatggggaatctctgagcaaatatggagaggagagagatgacattagggtttgtggaagttttgttacactgcttcagggagctcaaagaccagaatactctttcaaagatgtaaaaatgttgattagcattagtagaaagtatttatcaagtcttttctatgggccagacataggccaaacatcttagaaagaattatctcctttagttatcacagtaacttcttggagtaagaggtatcttaatatcttctctttacagatgaggaaactgaggctagattagatactttttccaagatttcccaggtaggaagtcagggagtcagcttttggtctaggaatggaactttgaaacccacgcccttaactgcggtttgtctccctccccggggtggtggagcagcagcaggcttgtccccaaggtagtccccaggcctggctcctcagctgacttttttttctgccttctccctcagaagctgccaagaactcgattcttcatgtgaaagctgaagtacacaagtccttggacagttacgcagcaagcttggccaaagccattgaggccgaagccaaaatcaacttatttggggaggaggctttgccaggggtcttggttacagcacggactgtcccggggggcggcttcgggggccgccgaggcagcagaactcttgtgagccagaggctgcagttgcagagcatcgaagaaggagatgttttagctgccgagcagagatgagggcctcagggtgccgtggggctgcagcctgagaggctggcccggggaggagttcccatcaccgcctgtgccgcggccttgggagcatgtcactgtgtacagctggccacacacagggaaggagcagcatctggtatgcagccaccaggacaaggactgaaaataatgtctacagtccacagcttcagcatttccagagaccacatgtgagcttcttttaggtcccagtgatgggaccagaagcatctaaagcaaaaaaaaaaccaaaaaaaaatctagagatgtggctgtggctttttgggaggtggggcatgggaggaccagagacgaagggcttggaaggagacccccacatgcatcatttcctcctcttcacagtgtgctgggagtccagccgtgcactgtgccagatgcctcaggaggagaaccctccccagtgtactgtgaaggatgacacagcacttcttcctaatgacacgcgaccgtcctgg

SEQ ID NO: 3202 - DNA, 2300 bp, Homo sapien
ttttcccatctctgtctttcacgctagtaccttcctttaaatgtctagtgatccttgggcaccccttcacctctaataacgagggcctagaaaaccacagggaagccctgggtggtgggatgcaggcaggcttcctgactgtgggttggtctggcagggccatttcacaggcacctgactctcagtgcctgtgagtctttcctctaggcttggtggattttcccagggaagagttctgcagtctccagcccaggttaagtgggacaaggggccagggtcccactacttaatatgtaaatttccacaataccctcagtttttactgggtcgcttctgccgcggctgtgcccggggctcactctctctcctctcctaccaacactggggtctggcgcccgaggcctagcctggagaagagcagtggctcctggccccctaccccccaaccccgttcctgagttttcagagcctggtgaagcctgcctctcccaaacctccccgttgccaacctcagttctctattccgggtcagctcatcactctcaaccatctgctttccagcttacaaaaattctctccttcctttggggtgtaagcctcttaaaaatccctctttgataattcaagtaggatttcaggaggtgaatgtggggttgaaccctccatctttaacgggaagatcttctcacctcacattttccctcctgcctgcctttttgattgtgctccctggccctctgtcatcaccttggtggtggttgacattgtcaggagagtttcccctttgggggaacccagtgagtgctgctgacacagtgggacagaaaagaggggcgagccaggagggagcagctaagctctcctgtctttcagggagttgagagtgagttttgcaagggcgaacagaagggcaggagatgggtctgtggggaaacggaggctggggcccctccttgcagagtgtgattgtgttgtcaatgccaattttgtctttcagacctgggcctgtccccacacctcactgcgctcatggcaggtggacagcccctggggcacagcagcagcacgggggacactggcttcagctgctcccaggactcaggtaacctgcgtgctttataagcctctcacctgtcgcgttttccctgtgttgcgtttcccccgtgtcgcgtttcccctgtgcaggctcaagagctggcggaggggcatttcccacggtgggtggggggtgagaatcataagtctgggtttccagtcgtggctttgacttttcagctttcctgtgtctcagtttcttcctctacaaaatggggctgtcagttcctgttctctctgccgcacggtgttattagggggttgaaagtgagtgaaagcctttgcaaaattaaaatgagaaatgattgtgatgataataaccactgacccagaggggccttgcagtcagcctgcctggtcttcagtctccagttggctttttaagagctgtgttatctcaagcaagttgcatgatctcctcctaaaccctcaactttccccatctgtgaaatgggggtactaatccccattacagggcagctgtgagaattgagagacttaatgaatgtgaagcactcatcttgttcttggcacagaaggagccctccagcaaggtcagctggccttgtctcctcactccatgtcctttgatatgaaactcagtctccctgtagaaacgcatctccaccacaaatcctgcagagccctccctttagcctctgcctaaaggatcttgcaagcccagggctgctccttgtctgagcagtcggcttcctggcatcagagtcatggcaccggggaggtggggagctgcagatgctgtatcctgtgctggaagcacgctgttagagccacaggaggccctgggcagaggcgcatgggcagaggcagggagtcacactcatggctccacattgctgaggaagagccagggtgtctggccacacctgctgcccatccccaggctggctgttggtgcactggcgcctggagggagtgccgctgaagctgcacaaagccgcatgcctggcagtgggtctgccgctcccagctcctccatctctctgctcttgggagcctttgaaaaaccacctctgacttgacctgggtttcctgttccccatgagtgctccagggctgcgcctaagcctgtgtcatggaactcaggggtgagccttggggttggcaccgggaccaggccatgacctctcttagtcatggagaattttccttggaaaattccttatctggcaacccagagggcc

SEQ ID NO: 3203 - DNA, 2300 bp, Homo sapien
ccttgtgcagtaatatgcttatttagaaactttgagacgttaattaataatttacttattagagtcaacaaacccagaactcgccaactaaaggcaaaaaccaaaaacaaccttacaaagacacagacatagaaggcacacctagaaagtatctccatagcacaaagctggagtaactaatatgttacataactgaatcaaaattcagaatactttagcagcctggaaatatgggccaaaatgcataaagggaaatttagtagaaataatgttttgtacataggcttaaaaacattaattccacatgttcaagattagggacatctgtcttcacagaaattcatgtatgtataaactttggggtttagtcaatcacacacttatataagcccaacagaattagttgctacaagaaaatgttttgagacagggtcttgctttgtcacccaggctggagctcagtgacacaaacagctcactgcagccttgacctctgggctcaaggggtcctcccacctcagcccgctaagtagctgggagtacaggaatgtacgaccattcccggataattttctgtgtatttttctgtagagacagtttcgccacgttgcccgggcttgctctcaaactcctgagctcaagcagtctgcccacatgggcctcccaaagtgctgggattaccggtgtgagccactctgcgccctgcctccagaaaatgtattcttagagtgaatagtagaaggggattattctgatcatggagataattgcccctttggacctgacacttatcaaaatacatccagaatggtgtgttcaattttggggaccgcaaatcaagagagtcatagacatctgagagcaaatacaaagcagggaagctgagttagtgaaaggtctggaaaccactatacagctcactatgagggaagctttctctctggcacttaggactgctggtgaggggaagggctgccctattaacccatgcactccctctggccaaagagtgtttgagtagaggcagcggatccaccacgagggttgtgaggatggccccgctgctgtgtgtaggcagtttaggcagcagagtttttgtcttgatcgtggaaagcgatctttcctttctttttggtgtcttctgtgtgcagagaatgagagcaggtggggaaagtgatctgtggggttttttggctaactgaagtatatgaagagttttggagaaacattagtctgtaggatttaacattaacatgtgtcaacctgcggctttagccaagatcccaagccagtttcctgagggcagggactgcaccttatagacagtgatgtctgtgggccaagacctcaaatggtgcctctacttccccatttacagttagtgcttgccctccctcgccgtgtctgatgagaacagtaatgacgtccccatataaactgtacctgattaatccctgcttagggagctcagaacaattcccatgagaatcttacagtcaaattgtaatgtgcaccaaaactgactggcggtgggctaaaatgcagatttgattccgtgagatggagatgcggagcctgaggttctgcctctctagtgagctctcaggtgatggtgatcctgctggttcagggcccaccctgagtagccagggtctaaacacagcagtctgcagagtgtctcccatagaccacttgtaacagccccctgccccctgccccagcctgcttgtttaaaatgcagattcctaggttgtgcctgtgatctctgcgcccagaacctctagtggtggagctcaaggatcagctttctaaactggcacttcagacgattcttcagcacattaaaggttttgaaccactggtcttgggaaaatggataggatgggttagaccagaggaagaaattggtcagggggatgtaatgaatttcacacatggttgtagaaaatggcccacttatgtagcgcttacgtggggaagacccgctgagagtctgtactagctgggtgatctgaggcgtagcacttaacccctttaagcctttcttccctaaggtggagacgatgtgatttgatgaatcttttcctgtcccctggtcctgccttatctttccagtcgtccagcatgctctgcccaccccacgccgaggtgcactgaccatgagcctcaactcctccctcagctgcaggaaggagctgagtaatctcactgaggaggagggtggcgaagggggcgtcatcatcacccagttcatcgccatcattgtcatcaccatttttgtctgcctgggaaacctggtc

SEQ ID NO: 3204 - DNA, 2300 bp, Homo sapien
tcattctcaccatgccagtctgtggcatatattttcagacctttcgtgaataccaattttcaaaagggtttagttctcagattctatgtcactggatgatttacttacatgacctcatttaaccttttcaactctacagataggaaagtatgagtatccccattttatatatgaataagctgagaggaaggttaactcactccctcaggctcatagagcttagccgacatctgagtcagtgtaaattaaataaatatcagggatttcaaaataagtgtctaaaatactattaagaacagaaagctttaagctccttcaagtgtctggcttgccgcgtgacctagactcttaagtggagcgtcagcttccagtttttgaccaaataaagcatttatcccataggaatattaaggcacccatttacttttttctccccattatcccatttgtccccagagcaatgtgggtgtttggcaggtgccagacagtaaattactgttctaaattgtgcctcagtggcccaataatattaaggaagcatctcccacagtgtcaatctgtagacaagggaataattaatgtatttatcaaagcagatggatttcagaggaatgtgaatcctgctctaagcacagcatcagggtttgtttttttttttctggagtttagtgaactgggctttgtaacttcttacctgattattttgctgccctgtttgtccttccttctttccctttttagcagttctactctgtgcttcaacttttcatccccttattaagactgctgcatagaaaacgtaggagtctggagacaggcaggcaaagtggggagtgaggaagggaaaacaaacattctgagaaggaactgttccgtcccccgagctgacagcgcccgctctttgttttgtgatgactgctccctggccttttggttccgagggagtgcagggcagcagtgtgaagacctgtttacgtccactccccactccccggggctggcttcgggacgaattcactgtggtattaacagagcccgggacagagcctggcagaaggcagatggatgctcgtgcccgtcggctggatgaatgaaaggtgagcagcaaaggcgataccaggatcgtccacggcgggactggaggaggagaatgggactgtgcggagcctgcgggaagaatctgaaagtgtctgtgtgatggagagagacatggaaaaggcgacgtcccagcggctggaactggggcggaggaacgggaacagggaaggcctgagttaggcaccacaaaggttttcaggagaaaagtggggcgagccgagagggtaagggcgagacaaagagcagcagccgaggctgttcgtgggaagaaatgggaaagaagcagccgggagggcgggcggacggacgcgaaggaaggggcgcgggtggggaggggcgccgggagctgggcggggcggggcagtgcggggcgcggggaggcggctcggggctccgggggccggaggggcccggccgggcgtggggggggcggggcggggcgcgggcgccgcaaagttacttggcctgcgcccgcccgggtccgcgtgctggtggctggcccgcgggaggagcgaagcggggctcggtgggctgaaacccgaaacctccagtcccggagcgcggcggggaggaaggaagcggcggcggcggtggccgaggcggggaggcggctgggccggggcctgagctgccgcggcggccgctcctcggtgagcacccggcgtggggcgcgggcgcgggcccgggcggagagggcggtccggatggagccaggctaaactcattgtgcgaggctgagggctcagggcgcgggccgggaagggtccccgcccccacggcgctccctttctccccgcgcccctctcggaggtcagggctgtcctccgcccgcactgcgccttgctttggagagctggagctctttgtgggaagatgttgggggcgcgcccctcccctgcggcctggggcttctgagaggcccaccccattctgctgggtgcagcccgccccgtttctccggcgccgcccgaagcccctaaacagtccgctggatgggagggcgtaggtgcgtgcccgggactctgccgatgcgggccgcgccccctggggccaagagactccacgtcccgctcagggcaaagggtgtggggagaagcggtcacgcccctcggctggaatccgtgaggaccaggtgagcagccttctcccagccgggactcagggcgctgtctccccgagcctgggcgggcggcgggtggcgc

SEQ ID NO: 3205 - DNA, 2300 bp, Homo sapien
tgtcgtattaagaatcactgagtgagatgctttctgttccaagtaacagaaataaacccatactgattcaataaaaatatatgtatattgattggctcttgtttctgatcagtccagaggcacatcagtttcagggaagtttccatctgaggtcaaatggttttaccattctatcagtggaggcatactgtaaacaaataaatagaaaaattgatgcatattttataaatttggacacattttatgtagaaaaacaacagagctgtgaaagagtacatagattagagaatttcttttagattggtcaggggctgagtgcagtggctcacatctgtaattccagcactttgggaggccaaggtgagaggatagcttgagcccaggagttaaagacaagcctgggcaacatagcaagatcccatcagggaagacttctctaaggaagtgacatttaaggtgagatgtgaagggcaggaagggcttggcctgtaaagagtggaggaaataacattccatgtggaacaaatagcatatttcacagttttgctttcaccagttttatgtggactgctagactgaaatgatattttacataaaatatgttttatatataaattattcaacacacatgtgaggttcagttggacaaggcctctcattatcttactttataagtctttgtggatgtctctaaaacagaatggtttattaaactaatttgggaaaggagaattagtgtgtatctttctctttttctaaaaaaatataaatacattcttgcacaaaatcagtcacgtttttcacaattgtcacctatacaatgatatacggtgaaataattactttaataataatttgtctgttttctctgcatctgattgaattctgctcatagctcaatattagctccagaagggaaaaaaatcttaagagagcaattgaaaatgcatttgttggcagcaatttccatccctgaatgcacagtaagttctgagcttatgagctcagaaaaaagaaaaatctttgtgataaataatgcatttgataatgagcagcaggagaaaaaaagtgttttctgttgaagagttcaaaatgaaatagagtaagtatgggaaaaggttgctcagtatgaaggacatctttcgcatcatggatgggtatggagccacaacagccgtaactgtttattttttattctcattctcaccatgccagtctgtggcatatattttcagacctttcgtgaataccaattttcaaaagggtttagttctcagattctatgtcactggatgatttacttacatgacctcatttaaccttttcaactctacagataggaaagtatgagtatccccattttatatatgaataagctgagaggaaggttaactcactccctcaggctcatagagcttagccgacatctgagtcagtgtaaattaaataaatatcagggatttcaaaataagtgtctaaaatactattaagaacagaaagctttaagctccttcaagtgtctggcttgccgcgtgacctagactcttaagtggagcgtcagcttccagtttttgaccaaataaagcatttatcccataggaatattaaggcacccatttacttttttctccccattatcccatttgtccccagagcaatgtgggtgtttggcaggtgccagacagtaaattactgttctaaattgtgcctcagtggcccaataatattaaggaagcatctcccacagtgtcaatctgtagacaagggaataattaatgtatttatcaaagcagatggatttcagaggaatgtgaatcctgctctaagcacagcatcagggtttgtttttttttttctggagtttagtgaactgggctttgtaacttcttacctgattattttgctgccctgtttgtccttccttctttccctttttagcagttctactctgtgcttcaacttttcatccccttattaagactgctgcatagaaaacgtaggagtctggagacaggcaggcaaagtggggagtgaggaagggaaaacaaacattctgagaaggaactgttccgtcccccgagctgacagcgcccgctctttgttttgtgatgactgctccctggccttttggttccgagggagtgcagggcagcagtgtgaagacctgtttacgtccactccccactccccggggctggcttcgggacgaattcactgtggtattaacagagcccgggacagagcctggcagaaggcagatggatgctcgtgcccgtcggctggatgaatgaaaggtgagc

SEQ ID NO: 3206 - DNA, 2300 bp, Homo sapien
tccagcctgggtgacagagcgagactccgtctcaaaaaaaaaaataaatacaaataaacaagacctgcgagccaggcgcggtggctcacgcctgtaatcccagcactttgggaggccgaggcaggtggatcatgaggtcaggagttcaagaccagcctgaccaacatgatgaaaccccgtctctactaaaaatacaaacattagccgggcatggtgttgcatgcctgaaatcccagctacttgggaggctgaggcaggagaatcgcttgaacctaggaggtggaagttgcagtgaaccgagatggggcctctgcactccagcctgggcgacagagcaagactctgtctcaaaacaaaacaaaacaaaacaaaacaaaaaaactatggccatgcaaggcaaggattaagtcatgccctacaaaccataaaatgtcgttaaatggttttttatgtgcaatggtataatgtgccttactttccaacctgactggtgtagaatcacatgacagatagcagactcccttttcttaagcattcctttctactgacttcaagtctttagacaaagcttaacactgttttttgtttgtttgtttgtttgtttttgagacaaggtcttactctgtcacccaggctggagtgcagtggcacgatctcggctcactgcaacctctgcctctcaggttcaagtgattctcccacctcagcctccctagtagctggggttacaggcatccaccaccgtgcttggctaagttttgtatttttagtagacacaggttttcacaatattggccaggctggtcttgaactcccgacctcaggtggtccacccaccttggcctcccaaagtgctgggattacagtcttgagccactgcacctggcctgtgtttttatttgtttttgagacagggtctcgctcacccaggcatgagtgctgtggcatgatcatggctcaatgcagcctctgaggctcaagagatcctcccaccacagcctctcaagtggcctgggactacaggcagataccatcatacacagctaattaacacggtttgtagagatgagggcttactctggtgcccacgctggtctcaaattcctggactcaagcaatcctctcacctaggcctcccaagatgctgggattataggcaggagccacctcgcctgactaaagcttaaatctttcaacagattgccgatcagaaaatctttgaatccacctatgatctgtaagcctctccttcaagacatcccacttccttagcctgaaccaatgtatatcttccatatattgacttattttacctgcaattcccaactccctaaaatgtataaaacaaagagtaatgccaccgcttcagatgctctttgttaggacctcttgggactattccctgggccatggtcactcatattggttcagaataaatctctttaaaaccttttacagaatttgttttttttccattaacaaaatcatctcattttgaggcaactgaagcctaaaatcgttagagaagcgctttgcccaaggattcacacaatagtgttgcaaatggagatttagcactaagtcagctgtgttgttttcactatactgggtgcctacatagcaactagaccatggaaagtcttcgcatatctacgaggatgcaatttttgataggagttggtcatagtcaagagtggctagatggccacttctaaatcttgttggtgctggatttcctaaactctgtgggattacttctttttttgacctcaaaacagaaaaatttcctctgtaacacgattcactaacacatgaggtaatcacactgctttgaggtctgtaaggatcaagttggaaccgtcatccccttccctggcagtccctaaaatccttcgagatgacgtcacccaacgagttcaagagggcggtgcgttcctaaccacaccttctgcaacccaagtgccgcccctctgactttctcctttttccttttttccggaacgccggaacgtaagacgtgggtcacgcaacaagagcaactagtcccggaagcaaaaagcaaagaggcggagaagaagacgggaagcagagcccgcgtccgggtcggccggcagggggcggggccgggcatggtaacggctcggaagcctaggaggctgggccggagggaggcggaggaaccggtgttcgccgccgccgctgcttcagcttattccttgtggcctctgcgggtcctgcctcagccatgatgatccacggcttccagagcagccaccgggatttctgcttcgggccctgga

SEQ ID NO: 3207 - DNA, 2300 bp, Homo sapien
ttaatgactacttagtattcttgtgaatgaatgtaccataatttatttaagcacttccctcatttatgaacttttaagttgtttccaatttttttctattacaaacaatgctacaatgaatcaccttgtaatgggccaattgcacaatgtgcaaatataaatgtaggtaaatcaggagcccatattctgggttcagactcagacacattggagaaagataagagtggatgcctgttacattttacaatagataatattaatggattgtgaaatatatactgagcactgttctaagcatttttgaaatggctttattgcaatagaattcatatgccatacagttaattcaaagcatacaattcaatggtttttagtatgttcagagctgtgcatgcaaccattaccacaatctaattccagaacatttaaatcaccccattagtctcttactaccatttcccctcctccatccctaggcaaccattagtctactttctgtttctatgggtttgcctattctggacatttcctataaatgaaatcatacaatatatggtctattgtgtctagcttctgtgaaagggaaatatcttgggcccccccaaattactaaagggaaaattcaagctgggaactgcttagaacaaatctgcctctcattctattcaaagttatcactgtgttcactgagataaatgcacatctgattgcctcctttggaaaggctaatcaaaaactcaaaggagtgcaaccatttgtctctcacctatctgtgacttggaagccccctccccccttgagtcttcctgcctttgcttcgagttgtcccgcctttccaaacacaaccaatgtacttcttacacatattgacggatgcctcatgtctccctaaaatgtataacaccaagctatgccccaacgaccttgggcacatgtcgtcaggacttcctgagtctgtgtcacaggtgctgttcctcaaccttggcaaaataaacttcctggtaaactgagacctgtctcaaattttcgggctccacacttctttcacttaatacaatgttttcgaggttcatccacgttgtagcatgtgtcagtactccattcttttttattgcatgggtatgtcacattttatttaccattaatcagttggtggccatttgtattgtttccactctgttgcccaagctagagtgcagtggcttactgtactgacaatcatggcttactgcagccttgacctcctgagtccaagccattcttcctcctcagcctcgcaagtagcttggattacagatgcccgccagcatgcctggctaatttttaagaatgttttgaagagatgaggtctccctatgttgcccaggctggtctggaactcccgggctcaagccatcttcccaaagtgctgggaatacagacatgagccaccatgcccagtctacttttagtttttttaaggtcagaaaaaaaaacaattgtacaaacacaaaacaatttaacaatctattattcctttcaacattccttcagtcactttttttttttttttttttgagacagagtctcgctctgttgcccatgctggagtgcagtatcctggtcatagctcattacagcctggaactccttggctcaagtgagcctcctgcctcagcctccggagtagctgggcttccaggcacgccccaccacaccagactaaggccttgagtgattaaaaagaaaatcttttcctgtgtaggcacgatcgcaatatggatgaaccacagcctttgttcccgtctgcacaaggcttctcccccgtctttgtgtctccggagccttgcacgtggtaggtgctcggcattcgttgactggatcaagtagggcgagggagcgcggcccgttccggtttgaaactgctctggacgccgaattagtgtttggcagcgcctggtggtcttcaatcccagcccctccggcccgccgcgccccccgggaccaaaacaagcggaggcgagcgcgggcgcgcggggcatgccgggagccccccggtgggcaggtgcctgggcggggcgcgccgcggttggcgcctgggcggctgggcggctgcctagcacccggaagagccgtcaacttagcgagcgcaacaggctgccgctgaggagctggagctggtggggactgggccgcaatggacaagctgaagaaggtgctgagcgggcaggacacggaggaccggagcggcctgtccgaggtgagtgagcccggggccgtcggccccctctcgccgcgctcccgccctgcgtcccctgccc

SEQ ID NO: 3208 - DNA, 2300 bp, Homo sapien
aatttttactgtaagtcactcagtgattatctttaagttccactgatcttttacataaataaactgcatttttaattttctttttttatatgagattctggaaatacttctttttttaaattatactttaagttctggggtacatgtgcagaacatgcgggtttgttacataggtatacatgtaatgttatccctcccctagcccccacccccggacaggccccggtatgtgatgttcccctcccttttccatgtgttctcattgttcaactcccacttatgagtgagaacatgtggtgtttggttttctgttcttgtgttagtttgctgagaatgatggtttccagcttcatccatgtccctacaaaggacatgaactcatcctttttttatggctgaatactattccatgggtgtatatatgccacattttctttatccagtctataattgatggacatttgggttggttccaagtctttgctgttgtgaacaatgctgcagtaaacatacatgtgcatgtgtctttatagtagaatgatttataaccctttgggtatatacccagtaatgagattgctgggttaaatggtatttctagttctagatccttgaggaatcgccacactgtctttcacaatggttgaactaatttacactcccaccaacagtgtaaaagtattcctatttctccctgtcctttccagcatctgtggccaccatgccactttttaatgattgccattctaactggcatgagatggcatctgatggtggttttgatttgcatttccctaatgaccagtgatgatgagcattttttcatatgtttgttggctgcataaatatcttcttttgagaagtgtctatccttcgcccacttttcgatggggttgttttgctcttataaatttgtttaagttctatgtagattctggatcttagccctttgtcagatggatagattgcaaaaattttctcccattctgtaggttgcctgttcactctgatgatagtttcttttgctgtgcagaagctctttggtttaattagatctcattttgtctattttggcttttgttgccattgcttttggtgttttagtcgtgaagtctttgcctatgcctatgtcctgaatggtattgcctaggttttcttctagggtttttatggttttgggtcttacgtttaagacttcctcttttcctaattgaataccctttatttctttctcttgcctgattgccctggccagaacttccagtactatgttgagtaggaatggtgagagagggcatccttgtcttgtgctggttttccaagggaatgcctctagtttttgcccattcagtatgatattggctgtgggtttgtcataaatagctcttcttattttgagatgcgttccatcaatacctggtttattgagagtttttagcatgaagggctgttgaattttgttgaatgccttttctgcatctattgagttagggaggattccctctttttctattgtttggaatagtttcagaaggaatggtaccagctcccttttgtacctctggtagaattcggctgtgaatccatctggtcctggactttttatggttggtaggctattaattactgcctcaatttcagaacttgttattggtctattcaggaactcgacttcttcctggtttagtcttgggagggtgtatatgtccaggaatttatccatttcttctagattttctactttatttgcgtagagttgtttatagtattctctaatggtagtttgtatttctgtggtatcggtggtgatatcccctgtatcattttttattgcatttatttgattcttctctcttttcttctttattagtctggctagcagtctatctattttgttgatcttttcaaaaaaccagctcctggattcattgtttttttcgtggtctctatctccttcagtcctgctctaatcttagttatttcttgtcttctgctagcttttgaatttgtttgctcttgcttctctaggtcttttaattgtgatgttagggtgttgattttagatctttcctgctttctcttgtgggcatttagtgctataaatttccctctacacactgctttaattttgaaatggagttttgctcagtttcccaggctagagtgcggtggcatgatctcagctcactgcaacctctgccttctgggttcaagtgattcttgtgcctcagcctcccaagaaactgggactacaggcatgtgccaccacacccggctaatttttgtatttttagtagaaa

SEQ ID NO: 3209 - DNA, 2300 bp, Homo sapien
tcagtaaatggccctgccatctaataattgttctgatcaggcacatggttctctgctctccctcacccccatatccagtctctcatgttgttctgtcatatagacttctaaagtgtatctagaacctgtacacttcattttttggccactgccactaccctaggctaagccatcaccagctcttgcctgaattgctgtcatagcctctaatttgttctttacttcagctcttgccctttcctagtctattcttcacaaatcgattagattttttgcaaacacaaagccaatcatgctgttttcctacttaatactctccaattgtttcctatctcatgctgaagaacattcaaattcttcatcatgacttctaaggcctcatggtctggcctggccctctctcaaagaacatctcattctgctctctttaccaccacattctggtcacactggcctccctggagatttctacctggctcaagccatgcttctcacatgtaattcttctgcttggcactctgccaactcttccccgactacatctttgctgagcttttggtctcatctgaaatgtctcctcctcaaagaagctgttctatacaactccatctaactggagttccctaccctgctgtgcacaaatttttcttgatcacttcacccttttaagtagccttcatagacttatcactattgataattacttagttgttgtttactttatatcatttattttctccatcatattgttaattctgtaaaggcgcaggccatttctgtttgttccttgctgtatgtgatgcttcataggtatgtagcataggagatcctgaatacattttctgtcatccttaccctgactttatcttacctttttgggtttgttttccttatgttcttgttttcttactttgtattgaaatgagagaaaaactcacaacccccaggctctactcaaggttgggggccagaggaggtagagcttcctctgctcctgtctcttccacccgccatccactcactcgccattagtactgtgtgttgtgggcaaaagaaaagctttctactagtgtttcttcccagggaatgtgggattcatcctggaatgccaaaataaggatgaattgtctaaagagaaaaccagaatgcctttctggaccaaagattgaaattgctctgcctaataatgtaaacagtttattttcactgactgggggcagagtgttccttagcgagattaatatgatactagctgcttttttgtcttcctctggcaaaggctagagataacaaaaattggggttctagactctagggaggaaggacaacattcacagctccatttgtaggaggtgaggagggcccttgagaaaagtggggtgtgagcgagtataggacattcaggagagagatgatcagtaggggacaccctgggagaaagagattctgagctcttttcttttctccggagccctgacccttgagcagtggcacacagagtgtcttcctttattctctggtacagtagtcatgtttcttggcacagtgccttggaccttccatacatgctttcttccctccagagccttcgtctaagatgctggagagtagcttatagcctgggcatcaagtttgtcgattctccccaggacccttttctttataggtgccacatgtcatgatttatgcacaaacatgatttgcctgacagtgcagtctgggcctggaataattttaattaatgggaaaatggtcctcaatacaccgattagacctcttcaggtacaacaagataaaagcctgataatttggatggagtactcttcttaaatatctactctgtgcacggcagccaatgggaaagccaggctctctcccacctgatccaatgagtaattaagagagggctttttcttccctacctctcccctgcctccaccccgctccccaactaaagcttaacaggttggtggcataatgtggagacttttaaggggtgtcatcctaggagcttaggcaagagccagggtatcttctctccgctccccaagcactgttcaagtgggtttgaaaagcaggcaagtgagggaaggaagaagctagaagcaggcaagttgggtaacggctctcggcaaagttcgagaagtgcctatggccatgagtgagctgggcactcggaagcccagcgatggcactgtttctcatctgctcaatgtggtggagagtgagcttcaggcagggagggaaaaaggcgaccctacggagaagcaacttcagatcatcctggaggatgcacctct

SEQ ID NO: 3210 - DNA, 2300 bp, Homo sapien
gcagagaaaatgtcatttctataagtaaactggcctcttggcagagcccctgcagccagtcaatggaaacagaaatgaactagctaataatgtaaacagtccctcagctggtggccagtctttcgatgataaagtaattccattttgcagatagccctctctcccagcttttctccctgggctggagtctgggtctatgaggggaggtatggcctttgtaactctgggaaacggggtggtggggggtgcatgtggaattggagaccatgtcctaacctcctctggtctcccggcaaggcccctgcccactggtgtgctgttggtttagttggtggtgtgcggaacttgtcatttggctgctgacttggtaaaccctcagaagcttttcctggctgcaggtgctggacagttctctttgaaccacctgactggtcatttttgacccatccagcaatctcccggcctgactcgctactcctgggtcttgaacatgctccatggcaatcaagctctggaaagcctagccccagtgcctccctctgccaacaaagcttccctgccaagtccatgcagatgcaccccgagtggcgagtgggcgtgggggtgggtgaaggaggccagtgtttcctttgcaccccctgctagcttcttgtatgcttttctacctctccaggtttaagccaagagaaagaccaggttgtacctatctgaccccacacctctttttcctctttctcctgatttcttctcacaagttctgagccagaaggagttgggctctgtattagcccattttcacgctgctaataaagacatacctgagactgggtaatttataaagaaaaagaagtttaatggactcacagttccacatggctggggaggcctcaatcatggtggaaggcaaaagacacatcttacatggtgacaggcaaagagaatgagagccaagagaaaggggaaaccccttataaaaccatcagatctcgtgagacttattcactaccacgagaacagtatgggggaagctgccctcatgattcagttatctcccaccgggaccgtcccacaacacgtgggaattatgggagctacaattcaagatgaaatttgggtagggacatagccaaaccatatctgggtcttattttgctttccttcttccatcaagtctcagatccttgctgacataaatattctgtgagctgggtgtggtggctcatgcctgtaatcccagcactttgggaggctgaggcaggaaaatcacttgaacccaggtggcagaggttgaagtgagccaagattgagctactgtactccagcctgggagcaagactcccgtctcaaaaaaaatatatatatatgtgtgtgtatatatatattctgtaaatatttatttactcaacaaatatttgctgggcattactacatgctggatattgttctagatgctggaaatactgcaatgaataaaacagatgaataccctgtcttcaaggcacttacatcccagtggggagagatgaaaaataaatatttctttgtctctatctatctgttttatctctatcacgatcactatctatctatacgtcagatgtctctaatgagaaatgaagcaggctcaggctaaggcagatacagagagtgacagtgaatggcagtgatagtttgctttttgcattgacatggccccatgtgtaagtgattatttatgaatgagggactcgatgctagatggcactcatccagaggggcaggatcacacctgtgctgctctccactgtgtaccaagtaactagaaaagtaaatcacatgtagtaggggatcaaggattgttgaaaaaaataaatacatgagtaaaaaaatgaatgctaggtttcgcacatcagggctttgctcatttccagtgttttgccctttcttttctcactttacatggcattagcattttcaccacatgcaatgataaaatgtcctttgccagagacagcgcagtggtgattaagtgctggagtaagcaaagatggaaagggcctctgcctctcagagtgctgggattacaggcataagccatcgtgcctggtgggaaagggaaggaaaagagagggaattaaactggttttacagaagacaaagggttctgtttgcccatgtgtatcctacttttactaacacttcttgtctttgtaaatgcaagataacggctctcaaaatcaagtacaatccttttgccaaagccttcttggatgccaaggaaaggtaagtaaagaaattttagtgaaatcttctaatgaatg

SEQ ID NO: 3211 - DNA, 2300 bp, Homo sapien
tatgccaggctctgtttcaagcacaggaatgaaatggacaaatgccctgcccttacggagattctatactaatatgaaaagattgacaataaaacaagtaaagttcatggcatgggagacagtggagagtatttggattccagcctccttccttcctcagtgacaccctgagctctgcatttgtagagggtcctcctggtcaccagctacctgtccctgtgtcccttagcctgctattcttggcaacctcaacagttgctgccaggtggggagattatgtagcttaccaatagcagaaactgagcagtggctcactctacttcctcattctttcctgcggtcagcatcaaatcacatcttctgagcacctactgtgtaccgtgttcttctaggcagtgggataggaaagtgattaagacatagtttcagggccgggagcggtggttcacgcctgtaatcccagcactttgggaggctgaggcgggcggatcacaagatcaggagttcgagagtagcctggccaacatggcgaaaccccgtctctactaaaaatacaaaaactagccaggcgtggtcgttggcgcctgtaatcccagctacttgggaggctgaggcaggagaattgcttgaatccgggaggcagaggctgcagtgagccaagattgtgccactgcactctagcctgggcaacaagagcaagacgccatctcaaaaaaaaaaaaaaaaaaaaaagatatagcttcttccctggaggagctcggggttacacaaatacgtaaataatgaatcctaatgtaatgcagaaacatcacctgggaacttgttagaaatgtagactttcaggctctactcctgagtcagggtctgcattttaacaagatcaccaggggattcataagcgctctagaatttgagaaacagtctataaaacacataagtcagggtgccatgtgaatgaaggaaaaagagcagctagatatgcctggtggaggagcaaaggctgcccagaggggttaacatttaaatggagccttgaaagatgaatagaaaaggacagagtgggagtgggcaggggtaaaaggtggaggatgacatgtgccaaaggcagaggtgcagggcattccaggtagagagagtgggctgagcaaagatacagaaaggggaaagaccctaggttgtctgggaacagctttggagcagagtgtagggggagtggggacagatggaagatgtaagagttagggctggagagcttggaagtgccagatcgtaaaaagaagagacatggccaggtgtcttagtcccctttgtggcgctataacaaaatacttgagattgggtaatttataagcaatagacctttattttctcatagtcctggaggctggggagtttaagattaaggtgccagcatatggtaagggttttttggctgtatcataacattgcgaaaggcatcacatggatggtgggggaaagagggggagagggcaggaggctaaacccatccttttatcagaaacccattcctgcaatactgacattagcctattcctgagggtagagcccccatggcctagtcacctcttaaaggccccacctctcaacactcttgcattgggaattaagttcccaacacatgaaccttgggggacacattcaaaccatagcaccagagatagacgttggaatcttccttctctctctcccttctcccccttttcccttccttcctccctccctctgccttcttcctctctcttatttgtatactatttatgcaaatagagattcaaagaaatggaagacattcttcccccacccccataaaaactgtatatattcaaggtgtacaacatgacgttttgatatacatatgcatagtgaagtgattactgctgtcaagcaaattaacatgtccatctcctcacatagttactttttttcatgatgagagcacctgaaatctattctcttagcaaatttccagtacacagtacaatattattaactatagtcttcagattgtaagttagatctctagacttattcatcctacacaagtgcaactttatatcctttgaccaatatctcatttccccagcttcccacccctggtaaccactgttgtactctcagcttctatgtattcaactttcttagagtccacatataagtgagatcatattatgttcttctttttgtaaaaaggtatgtttttttcttaattttttttttttttaattgtagagatggtgtctctctgtgttgcccagagaggtctcaaattcctgggctca

SEQ ID NO: 3212 - DNA, 2300 bp, Homo sapien
tcatctgtctcccacccagggacttggacaaagtgctcagttgacattcattaaactgatcatcggtaccaagaaattacaaatagatgcgtaaaaatctggaaacagtctttctcagcaaccattccagaattacaaactttctctagcatgaccgtaggatctaaatgcagttccagtggaattaaatgtatgggttgttttgtgtctatagcatgactccttcctgtctgagaactttctggaacccaaattgctagtgcagctggaatcagggtgtctgacaagaggcagctgtcacttcacattttgcaaaatatttccacaaaaattgccccaaaatgcaaaaatctttcattaggaagagctgattcatggaatttataataggaatcctgtatggctgcataattcagtagaggaaaatagaaaagaataaacaagtattggtctctccaggccattccttttgaagccaagtcagggcacagagcactatggacactgcatgaccagcctggttgaaggcaatgttggagataaactttcccacacagaaacccttctcagccctgagtctctgtaaaaatgcacagctcttgcatgtacatagagacttctcttccccaggcagaggagtcaacgtgaaagccaaagccaaagcacactagcccttcagagatcaaaaaccctgtgacactctcagaatacctgtgtcctgacagatattcagcaaaatattttgtgacagtgtcaccataacctctttggaacacagggctgtaggtcccatccttcctgcctttctatgtacatctcatgtggaatctttctctctctagtacattcaacctccttctaacaactggtttcttccagttaattttttttaatagagatgaggtcttgctatgttgcccagactggtctcaaactcctggcctcaagcgatcctcccgcctctgcctcccaaagtgctggcattataggcataagccactgtgcccggcccctccagttgacttttaatgcctaaacttttcacttgagaaaaattagcttccctcaggcttcctttcgctggctcctccccttctccctgtactttacttgttaagattcctcagggtcaatcattagaactcaatgattctccctctacactatccctggaaattttcacccatacccacagcttccataaccaccaattcccacatgacccatagttttctgtgtcgaacccagatgccttccagccccatgcccatcagcccagctgcctacttatcatctccgttagatatctcaaaagcatctcagattaatcaggtccaaaaccaaatcctcatttccatctcccaatcctccagacaaagaaacaataaaaaaagacaagactcttctcctagtgtttcctaacttcctgaatgataccaaccaggtggataagcagaaaccagaacccatcatgggcatcatcttttccatgctattccccaaagccaatctagcaccaaatcatattaatttacctgctgaatacctttcagatccttcagctcttcatatgtttcccttcacaggcctttcacgtgacgttccatggcctagaaagctcctccttccctctcctggctacctggtcaatgatcaggtcaatgataacaggctacagaagcttttgataataaaggcaaagaatcccgaacaccactccagcactgataaatgactgtggagatctatatccctgaaatcatgctgaaaagaccctattttctttaggaaaatgtttcccagctcttaatcaattcactgaaaaccaattgccagagaggtacttccacagactcactgttaggcaagttgacttgcttccatgtttctccaagtgtgatcctgatccctgggtcatctatactagaaggtttattagaaacacaagctatcccagacccagagacccaggaacctgaatcttaactacccccaggtgattcagatgcaagctaaaatttgaaatcaagactgcagttctagagagtagaattccatgctttgcaactgtcttaagccagccttcatttgtctcctagcaacccttgagcaatgacaagtacctgccaaacactgttgtgaaaacctctctcctgggaaaacaaaagtattttgctttctaaattctataggaataaagctgctttagaaaaggataatttggccaccaaggtagttgggagagatagttttctctttggagctgagctgagggtgcttataagaccctctggccaccg

SEQ ID NO: 3213 - DNA, 2300 bp, Homo sapien
cccttagatcctctctaaacctatgtggacagattatccaatgtatattgctgaggttataggtaactatttaactggtggtttcaaccaggtatcttttgctgcctcgtctcaagtcctgcttaagcagcctagagagcaagttcggaatgttcccttatccctgcttgtctagaatttctcactcattcttaaaagatgagtaagtgtccatcataattccattttcttgagagtttcttatcagaattgtccacttttgtgtttattactccctgggcatataatttatacatcattcctttctttattcaacaagtatttattgtgccacctactactgctgacactagtgatctaacaattaccaaataaagcctttacctttatacaacctaaattgagtgaaggagaaaagcaactaacaaatttgagaacacacacataaaaatataaatggtcaactagtgataaattctatggagaaaaaataaaacagggtaaggaaacagagagtatgtcttggtattacttgatttagagtggtcaatggtagcctctctaagggggtgacattgagctgtagccaaatgaagtaagaaagcaagccttctgttgttaggtgtatttctctctgtaggacttgtatctccaagtagactgtaagcagtttgaaataagacctgaatcctttattttaatataataaccctagcccatgcactgggtatctagctaactgcccattgtaagtattcaaaaaatatttatgtgtttgaaaaattgtattatatatcagataatgcaattaatattatgcccgccaaacttcaataacacagaatcttcaatactgtattcttctagtgaaacagatagacatgatgaagatgaaatgccaagacgctcttgtctaattacctgcctgcaaacctaagcaaggttagttgaagacaacatgtgtcttgggagcaggctctgagacaaccagtggatgtggggaagggaagcaccatattaggaattactgtttcaccccagcaaaatggaaattcaaattattttgatgaagaaggacttagagaaacagataaagaagcaatgtgctcacaattgtgtagctagttagtagatgaacaggaacagtacctagatgtctaacccccatctcaacagagtgtccttgctctaacagggaatagtatttctgacaaaaacccttgcctgaaagggagagactaaaagaaatgttctccagatttagttatatcagcagtatcaagtcacagcagctggatataaaaccttatggctgctgacaatactcccttgccagttcagtctttctctctaaaaggaacgttgtcagtgtctttaggagacggccctccagcacctgtctggtgtctatagccataaggcacttaccttttcccagagatgcaggctaatttcaatgttggaaaacttttctgattggaaaatttaggaagttaagctaagcaattttcttaattgaatacataggcatacaccatggtgaaatcatattcttttataatagatattgaatagaaagaagaatttatattcaatacatggccgataaaactttaattgaaaacatatcacttggaaatgttaaataaatgatgtaatctgaactcattgtttctctgatgcctctgaaactacctttctcaggaacataaactaaaaggttgaatttaattttgccttacccaaagcactaaatatgaattctgttttcaaaaagatatatccaaaaggaatatagatttttaaaggtaatatgtgtgtcacttttcattcttctcaagcaaattattaaaatgtgaacatttggagttaaaagacacaatgagtgaagaaaattgtcaccgacagagcatatggtatttggtgtaacattatgcagaagccagagagagctatgaaccatgtttctctttcccatgtccacggaaatgccaaagtacactggagctatcgaggatgttgactttttcccgtaaatgtttaacttcttctggaaaccacagaaacttaagtgatttagagtgtgactttcatgaacagaaatagtctccataatctaatctccagaatgcactaaaccaggagaagatccacctggtaagtaaaaagtctgaatgaaaaaatatgttgttggccaggcgcggtggctcacacctgtaatcccagcactttgggaggctgaggcgggcggatcacgaggtcaggagatcgagaccatcctggctaacacggtgaaaccc

SEQ ID NO: 3214 - DNA, 2300 bp, Homo sapien
ggagaacacaatgagattcgttgcagaacagccatgagaacagaacaaagttctaagagagcataaaggggtggcacaacttaattttatcaaaaaaattcaggaaaacttatacagagaggaggagtttacaagtaactatgtagggagctgtcatgggtattccagttaaaggaaacatgtgaggagcataaaagaggctggcccattgggttggctgcacatgtatgtgtttgttaaggtttgggagtgtgtgagtgaatggtggaaggtgagtctgaaaggaaagcagtactagatcttgagcattcttatatatcacaatgaaagatttgaaatacatcctgtaggcattggaagttagcaaagaggttctcagtagggaaatggcatgattagattgaggctttacagtgattaccctggcaaagctgcagagaacagactgagaggaggccctggtctgggtaaccagttagtccactgtaattggcctaacatttgagcagtgtgggaagaaaggaggacacatctcaaagaactacctagaaggtatacttagtccagtttggttgagaatgacatgtaggtggatagcaatgagtctaagatgatccctatatatcagtatttggaaattagatggaagagaacacattgctccatgctaaggactaatatgaggagaagcagtttgaatagaagatgtgtccagtgttcaaggagtgattgtgcagtaaggtagagatcattaaagagccagtttgaagtttagaatgaagtctgggtgaaaaatcaaatgcgattagtgggaagtctcttagaggttaacctatactttttatgaaaacataggaatttattttcatattcctaatagcaaaggacctttaactacacatatatttaataaatacattttatagatacctatgtaaaataaagaacaaccaccacacaacaaactcagtggcagaaaagttccagtgcaatcagtatatttaaattctactgggagtattgcaaatcaaaattacattttgggagactatatggcaatatataataagagctataaagatgatcatatcatttttcccagtaatcctactcctggttattaaagggaagtaattcagtgtatattaatgaaatcgaccttatagttctgatctttataataagttataagaaaatggtttaatttgtatgtgtatatatttactcgaagtagaaatatgaaggctaaaaaaatgggaagatatttaaattggtgttaaaacagcatttaaaattaccacaattatgagaacacatgtatgccaatgcagattcactggaaaaatattgaaaatgaaaactgtcagatggtaagattataattttatttcttttttaatttgaaataaattggtacagcacagcttttcaaaagcttctataaatgtgtatgttaagttgtaataaagcaaacacatgcatgtagacatgcttaaacagttatttaattgtttcttgggtacctggggagatggggtgaagaaaggggggtgacttgaatgaaggtggaggagaaaaatgagaaccaagaaagcaaaggatcgagaagctcagtgtggcagcagcctctcttcccctcctgagagagtcaaagggtggcatcagggactcatgatccatggttgtggaagcctcatgtcacactggatgtcacatgaggtgggatggaacacagtgaccaccccacctcatttcctttacagcttccgtggtgggccatggcagtgaacagccttcaggcatgtctacggtggaagatctgaattcaggctggtggcaggagacaacacaaccacgttttcttttatgcatgcatttggtttaattgacacattaaccacagacaaaggggtaaaggccacaaggcgataggttagtatgaacagggaaagggacattttttttttttaagaaaaataaaagcatcagtattgcaaagactttccatgatcctatacccacctcgaaagccccctctcaccacaggaagtgcactgaccattggaggcataaaagagatcctcaaagagcccgatcctcactctccctgcacagctcagcgggacctcagccatgagacttctcatcctggccctccttggcatctgctctctcactgcatacattgtggaaggtaagtggagaagctgtctgtgagataaagaatagggaggcaaggcaggtgggcacacattttgggtttgactcgggttttgactggactaaactgctgtctccag

SEQ ID NO: 3215 - DNA, 2300 bp, Homo sapien
acaccatgagattcgttgcagaacagccatgagaacagaacaaagttctaagagagcataaaggggtggcacaacttaattttatcaaaaaaattcaggaaaacttatacagagaggaggagtttacaagtaactatgtagggagctgtcatgggtattccagttaaaggaaacatgtgaggagcataaaagaggctggcccattgggttggctgcacatgtatgtgtttgttaaggtttgggagtgtgtgagtgaatggtggaaggtgagtctgaaaggaaagcagtactagatcttgagcattcttatatatcacagtgaaagattagaaatacatcccataggcattggaattagtaaagaggttctcagtagggaaatggcatgattagattgaggctttacagtgattaccctggcaaagctgcagagaacagactgagaggaggccctggtctgggaaaccagttagtccactgcaattggcctatgatttgagcagtgtgggaagaaaggaggacacatctcaaagaactacttagaaggtatacttagtccagtttggttgagaaagacacgtgggtggatagcaatgagtctaacatgatccctatatatcagtatttggaaattagatggaagagaacacattgctccatgctaaggactaatatgaggagaagcagtttgaatagaagatgtgtccagtgttcaaggagtgattgtgcagtaaggtagagatcattaaagagccagtttgaagtttagaatgaagtctgggtgaaaaatcaaatgcgattagtgggaagtctcttagaggttaacctatactttttatcaaaacataggaatttattttcatattcctcatagcaatggacctttaactacacatgtatttaataaatacattttatagatacctatataacataaagaacaaccaccatacaacaaattcagtggcagaaaagttccattgcaatcagtatgtttaaattctactgggagcattgcaaactaaaattatattttggggagactatatggcaatatataataagagctgtaaagatgatcatatcattttacccagtaatcctactcctggttattaaagggaaataattcggtgtgtattaatgaaattgaccttacagttctgatctttataataagttataagaaaatggtttaatgtgtatgtgtatatatttacttgaagtagaaatatgaacgctaaaaaatgggaagatatttaagttggtgttaaaacagcatttaaaattaccacaattatgagaacacatgtatgccaatgcagattcactggaaaaatattgaaaatgaaaactgtcagatggtaagattataattttatttcttttttaatttgaaataagttggtacagcacagcttttcaaaagcttctataaatgtgtatgttaagttgtaataaagcaaacacatgcatgtagacatgcttaaacagttatttaattgtttcttgggtacctggggagatggggtgaagaaaggggggtgacttgaatgaaggtggaggagaaaaatgagaaccaagaaagcaaaggatcgagaagctcagtgtggcagcagcctctcttcccctcctgagagagtcaaagggtggcatcagggactcatgatccatggttgtggaagcctcatgtcacactggatgtcacatgaggtgggatggaacacagtgaccaccccacctcatttcctttacagcttccgtggtgggccatggcagtgaacagccttcaggcatgtctacggtggaagatctgaattcaggctggtggcaggagacaacacaaccacgttttcttttatgcatgcatttggtttaattgacacattaaccacagacaaaggggtaaaggccacaaggcgttaggttagtatgaacagggaaagggactttttttttttttttttttaagaaaaataaaagcatcagtattgcaaagactttccatgatcctacacccacctcgaaagccccctctcaccacaggaagtgcactgaccactggaggcataaaagaggtcctcaaagagcccgatcctcactctccttgcacagctcagcaggacctcagccatgagacttctcatcctggccctccttggcatctgctctctcactgcatacattgtggaaggtaagtggagaagctgtctgtgagataaagaacagggaggcaaggcaggtgggcacacattttgggtttgactcaggttatgactggactaacctgctttccccag

SEQ ID NO: 3216 - DNA, 2300 bp, Homo sapien
ttagattcctctgctgttgtcaactgaaatattcaaataattctcattcaagacccaagacaacttcttacaaacatgccacaacatctgaatgacgtaatgaatgaataagttagggaattccagtcgagggagaaaaataattacaaaaatggtgaaaacaatcattacactacactaataaccagtttgcctattctgtttgtaataaaaaacatacactagggcctgtatttattcagcccaggttaaagttaatggtgtggatttataaacaaccacttttccctctcaacccatttaatgtggacatgtttcaaggcctgacagtacagctctttcttaaaggtgccctgaggtacaaaacgaaccttcttcccaaagtataagctgccctggtggtgtcattaaggataaggaagaccgtttgctctgggtttctctgctcatgactatgtgtcttgggcctgcagcccactggcaaaaggcctgcttgtctgtaacatggatcccctgaggcaccgaagatgctcagtctcagctgagcagctccagcaatttgtctggatgtccatgatttgtcgtgatttgcatttcctactggggtgggcacaggtatgtgattcagtgatgagaccaaccacagaaaatgattctaaatgaactagattaattcagctatgagataaatttctcaaatactacttacatctcaatggaactcaagttttctcctaaataattttaactcttcaaaatgcctacaagagaacttcagcctcaaggaccctttcctaagtcaccttttcattcatctgtcaccgctcctccgttcttgtttgaacctagttgtcatcttaactctcctggtcatactccctgcccacttggtgcatatttgctgagtgttttcattatgcccagtgtcagcatatggtcatgaatagagcaaaagtgaaccttgctttcatggagtttgcagtctaatagaaacagcaaattgatcaaataattaacaaaaatatcttggtctcttccaccttcacacctttttgcctacattacctctcacatttgctttggcttttaaattaactcaccctccatggcccagtcaaaatctctttatccgtgacacaaaccttcactgaccaacccagtcagcccacaggctttctctgagccccatatgctatggaccataccagagtcactgaatgatctaagggcaggcctgcatgagccagcttacagcacaatgcagacatcaataactgatcatagcactccctgccgagccaggaagtaatgtcaaggtctcattcaacacagaaagtccacagccactaccaattaattggagttgatattatgaaagaaatgtactgtcatcctcagtccattccatttactaggcagttatcagtgaactctgactttcactgtcatcatatcctcatgcataggtatacctctacaactacaatgtaatacataagttgcagggactggatcttatgttccttctactagttctaattcagcaactgtgtgttgagcacagaccatgggaaagccctcttgtagatgctaaaggaaatatagagattaataagacatagttcctgctccaagaactcctgatctttttttgagggatgagaagtttacaaatatctacaattcagggaagaataaaatgaatgccaaaagaaaggcctcgaggtttggaaaagccataaaattagatctggttcaaaggacaaggaaggtttcttggagaaagtagcatctgagatggatgctgatgatggcagaaggaagaaagaggaggcagagtgttgctctccaggcgcaaagaagagcctaagcaaagccactggaagaggaaagttaggatccatcaagtattctgttttggccccaagaatacttagtacggcatcttattcagagtaggtacttgatatggtttggctgtgtccccacccaaatctcatcttgaattgtagttcccataatctccacatgtcagagggaagacccagtgggaggtaatttaatcatggaagagtttactctcatgctgttcttgtgataatgagtgagttctcacgagatctgaggattttataaagggcttttcccccttttgttaggcacttctccttgctgcagccatgtgaagaaggacatgtttgcttccccttctgccatgattgtaaatttcctgaggcctacccagccgtgcttaactgtgagtcaattaaacctcgttcctttataaattacccattctc

SEQ ID NO: 3217 - DNA, 2300 bp, Homo sapien
tatgatttagcaggcctggagaagagccactgtctacattttaacaaacttcacagaggctgtagatagaattggtctatgatcacaattctaagaaactttaagaacaatactgatgagaaatgggaaatactatgtgcttaagagatgcccaaaggtttcaaaaaatttgaaaagccaaatcatcaacggatgcatggaatgggtaatgagcacatgaaaagatgctcaaaatcatggatcattagagaaatgaaaatcacaaccacactgaaatatcactacaaacctatttgaatagctaaaattttttaatggcaattttctggtagtggtgggcaatggtatcaccactttggaaatcagctaggtagtttcttgctttcttttttttgtttttttgagacggagtctcgctctgtagcccaggctggagtgcagtggcacaatctcggctcactgcaagctccgcttctcgggttcacgccattctcctgtctcagcctcccgagtagctgggactacaggcgcccgccactaagcctggctaattttttgtatttttagtagaggcggggtttcaccatgttagccaggatggtctcgatctcctgacctcgtgatccgcccgcctcggcctcctaaagtgctgggattacaagcatgagccaccacacccggcctcagtagtttcttttaaagttaaacatacattaccttgtgaaccagcaatctcactcctaggtattgacccaaatgaaataaaaatttgttcacacaaaaacctatacatagatgtttatatcaactttataattacatttatgtaattcattatataaaatataatgaatataaaattcattacataaaaagtaatgaattttcaaaaactggaaacaacccaaatgtctttcaactagtaaatgtataaacaatctgtggtacatccatgctatggaatattactcaacaataacaagaaacaaaatactaacacatacaatgagatgttgaattttaaaatggatgaaccttaaaagcattatgctaagtgaaagatggacatgaaaggctacgtgtggtatgattccatttacttgacattctggaaaaggcaaaaccatagagacagaaagtaaatcagtggttaccaatggctgggtgtttgggaagatttgactgcaaagggatataaggggatgttttggattgatggaactgttctaagtcttgattagggtgctggctatgttactgtacattatgtattttaaaaggtgaattaattatatgtaaattataactcaatgaaaagaaaattcaatgtgagggcaaaaatactgaaggataaatagggggtttatttagattaaacccattacattttgagagcagagcacactttctagacttgactgggtccaatttcagcagcatggtagaatgcttaagtgtagaaatcatatccaacttatctccccatgggcccatagtacttccttatgcaacttatgagttctcagagtagccctgcaaactggtatacccgcgcttatactcaagggttaaaaagtgttggattgacaacttaaaaaaaaaaacaggcattcagccttacagaaatcctagatggctctgttacttcagtctatgatttcggtattttgaaatcactgtctgggtatttgtgtggcccggaaggctagtttggagaacaaatacaggggtttgctagtagcgggtagggtaggacagaaaggggtgaggtgctgaaaggtgagggacaaatatgctactaatcagtgtttttcaagtgaatatttctacagggtagagcagcagttggcttttataatctagatacaaagttgttctttctccagggagcttcttagacttacatgctgctggtatattcctagaattccaccttaaaacaagctgaatgtccttatggctgacatctcagcatggaaaagttttgcttaagcaatgacacactgcagttggatccttctcacccacatctggaagccacatgtcagcggcagctatataaaacggtcagaccagcaatcttagagtgacattgtttgccaaaatcccaggcagcatggacctcagtcttctctgggtacttctgcccctagtcaccatggcctggggccagtatggcgattatggatacccataccagcagtatcatgactacagcgatgatgggtgggtgaatttgaaccggcaaggcttcagctaccagtgtccccaggggcaggtgatagtggccgtgaggagca

SEQ ID NO: 3218 - DNA, 2300 bp, Homo sapien
atgttcttttttccttccaaaattttatacatgtggcttcctctgcccagcgtgacctttatccctttctcctactaacaaattctcatcatctttcaaaatccagttaagatattaactcttccattaagccttctctgccacaatattaacttcaatgatccttaagcaaaacctttcttctctagctaaatacatagaactataactcaaatattggtctaaaattaaaatgctaatgggagacttaaaagtgacagaattgagggggcctcatgacctttgaataggtcacattatccaatcaacttcattctaatatactcacgtacagacgggcagctttgctacaaccccaaaaagagatgactcaggaggcaaaggtagggcaccaaagttatgagctctagatccaggccgactgggattataaagacttaaatacagagcaaaatgaatatgctaacatgtatttatttcatataataaatgtatcccaaaatttaagataaataaaaaattaggctgggtgcagtggctcatgcctgtaatcccagcactttgggaggccgaggcaggcggatcaccaggtcaggagttcaagaccagcctggccaacatggtgaaaccccgtctctactaaaaatacaaaacttaactggacatagtggcacatgtctgtaatcccagctacttgggatgctgaggcaggagaattgcttgagcccatgaggcagaggttgcagtaagctgagatcacgccactgctgcactccagcctgggcaacagagcaagactccatcttgggaaaaaaaatcagctacatgaaaattttaatgtattttatgctgtgtgactctcttctttctaggtccttaggtgaaggaaagtaagaaagatggcaatacaggaaaggaactaatatttaaagaatactagtatctctctgtgccatttatatctacctcatttcatttaaccttcaaaagcatatgattatgtagatgctgtaatgttatttcaattttacagaggagtaaattgaggcacaataatgataagatatttagcctcggctgggcatggtggctcacgtttgtaatcctcacactttggaaggccaaggcaggtggattgcttggcccaggagttcaagagcagcctgggcaaaaaggagaaaccccatctcttttttttttttttttttttttgagacggagtctcgctctgtcgcccaggctggagtgcagtggcgggatctcggctcactgcaagctccacctcccgggttcacgccattctcctgcctcagcctcccaagtagctgggactacaggcgcccgccactacgcccggctgattttttgtatttttagtagagacagggtttcaccgttttagccgggatggtctcgatctcctgacctcgtgatccgcccgcctcggcctcccaaagtgctgggattacaggcgtgagccaccgcgcccggcccccatctcttaaaaaaatgcaaaaaattatccagttgtggtggctcacacctgtggtcccagctactcgggaggctgaggcgggaggatcacttgagcctgagaattagagactgcagtgagccaagatcgcaccactgcattccagcctgggtgacagaggaagaacctgtctcaaaataaaaaaataataataaaaaaataaaaaaatcaccctcatttccatggccagtaataaaaagagaaacagaaattttaatacaggaatgattactgtatttctttgtgggaattgtggtaagttggtatttcagaacaggcatgtaaccccttctgcccaatgacactggagggaaagtctactgctgggtaggggtggggctttagagaacggcttcatgttacacatccttcaccagagcattttcttctgaaaatcctttgtagcagattctattagcttcaggtaacaggcaattatgtgctttaagagagaacccctctcccaggaagtgaacgtgattggcacaccaactggggtaattcatctttccagggattaatttaagaaagggcatgtaagactgctttaaccaaagagacatgaggggaagtctgcttgaaaggaggtagtagtccagaaaaagattttgttttgctttatgaaaaggaagcaggaggagaaagtattattttttgtctttagatttaccatgagcatgtgatgcttaggctacggcagccatcttggtaccctgagaagagtcaccctaagagaagatgccagcattctaggaaaagcagggcg

SEQ ID NO: 3219 - DNA, 2300 bp, Homo sapien
atgaacaatgatacaggaacaatttgaatctctgaacacaattattatgtgttttatgcaatcataaccactcctataggagtttgcttgtttttgtaagtgttttcctcctgaaatgacctttactatcagttaggtttagcttagaatatgaattccatgtattcaagtattttgtagaaaaaatacctctgtcctctgtgatcatattagagctacctgatgacaaaaacagcatttgggtaacaccatgaaactgcatcactcactgtacttacttcatcagtatatcgtctgtaccaagcctggaaaccagtttacctctgccctggctttagggctgacttcatcggtgtgcaatctatgcagttacacggcgtccttagcttagtggaaccccctgcttggattaatgctcagttgtcacctttttgaaattcttaataaattttctggcaagtgccctgcattttcattttgcactggactctgcaaattatgtagcaggtcccgactccctgtctgtgtttgagcattttctctctccctttcacatcctccaatccggctttccaaaggcagagacatcacatacactcatcttagtgggacctgaaacatctgccaggcctttagaataaactagtaagtgaagtattcaaaataaatggatattcatacatactggcaaactaatggaatggaatgatcatgcataaatcattgactggtgccagccactgagctatgggtttatatactaattttgtttaactgccacctcaaacctgtgagagagtgctattattctgattttacaaatgggagaagggaggctcaggaaggtcagtaagtggcagagctcacacactgagttctgatgtgtctgagtccaaagcccattcccatttcactgcattcctaactgaggcctggaaaacttacccctgagatcacagcattgcctgagaggaaaaaggacttttcctatggttttcacactttcactttttgcactggatctttcagttgtctggttaacaactaggttacgtcattctatatggggctttcagatacagagcaactttcccaggaccacccattaaactagaagtgaagtgatatcgttgttctcactatgatggtagggtgaaggaagcagattggccatgccaaaactgatgtcctctgagatcccgaggcccaagccaacatttgacggcatacctcactcaacaacacttttacctgtgtaatagaaaacaacagccatttataactcgcttattcattttttttttccacaggcctctgcgcagcatctgctatgtgcaggcactgtgctaggccctgtggagacaataatgaaaaagatatagcccctgcttttcagatggtcacaaattggcagaagggtgcaaactcataactctctttattccaacattttgccagctctggttgtaaagttgaggagttaggagttggagtaaatttaggaaatgggtagaatattatttttgcagctcattggaattctcccttgttacagatcagggtcctgggttgggtggcatacctatgcctgtcattatttgcatccctggtttaacagctggctctggccaatcttatacgatcctctaccttagcaaacagaaacacagtttttgaaaattcacatgaagaagagttgaatagcaaataagttcagccttgaggctccacctattacctggctgttgagctttgtaaaaccattgattgtttaacagccagcagggcaagaaggccagaattatgctcagcaaatgcagaaacagagcacagttgtctgtgtgtgtttccatggtaacagtgataacagcttatatttatagactctctatctccaaggagctcaaagcactttacaaacacatcatctctcttctataggaaaaagagagaaggagagagagggggataggaagagaggtagagagagagaaagaaagggagagagggagggaggaggaagggagagagggaagcagggagggagagagaacaggagaagaaggaggaggtacagaaggacttggtgtgctattatgcacatttcacagatggcacagagtggggaagtcagtgacccaaggtggcaaggtaagccagtgacagatggtagattggatggacctagtggctcatataactcctggaacttttgctgctggccttgagcagatgtcagggctgagctgctgtctcctagtcatcttgctctgttcagtgtcatctaggtgatcagataa

SEQ ID NO: 3220 - DNA, 2300 bp, Homo sapien
agcaatcccaggactgggtggaaacctggaggttttcaggaaggctggaggaggctggcttaggatgagctgctgcattggctgtgcagacgtgaccctcaggacttcatctgaacctgtgaagagtttccatgcagggaaggggggatgagtagagctagggacctaaaatttgagaggggaagatattccccagtggaagacagtaaatcaaagactagagaccaagcatcagtctactgggtgtttgctacacctctgaagagctaaggtaggacacttgttttaggaaaaaagaaaatctgtcactggagactctctttatatattttgtcttaccatatgcttcttttggaaggggggttgggaatcaaggtacaggaacggagtgggcacaagtaagggcaccaccaactcccagaaccgcctcatcccttcccatgctaccctttccccactcatctctttttgctgattctgcctacaggttttccctcctgttacagtaatggacactcaacaacacatacccttcccagcaacctgtcctgctggaaaactactcgataaggtaacttctgcctgaaggggaccagggtcatcatacccgcaagtgcagcatcttcctgcagctctcatactaccaagctggggtttttccaacataaacattacaggtgctaaacgagaggtggcttcctttctcaataagctgttctctctctcggatgcccttgacagagccctgcagcctcccccactggggcttggtggataggtggtcgcttctcccccgaatttcaggaatgtttaggtttgcacaggtcctgcaggcgagcttggagaaggattagaaaaatgctcattcttaatcagttcgggcttgtctttatgccagcgaggttgaccttggggacagaagggtggccaggataaggacaagcatcctggtattggggaattctctgatatggggctgggacgtcaagatgggccatgatggcccctggggatagggcttctctgcagtggaagcagaagcatcccggtgttttctgctgtgtcactgtcctcagagggatgtataaagctgcttgggggctcataggagagggatgaaaccaagagtttggctttccagcaacagcggacaaagagtgggaaggggtactctatgccccaggtctgcaacatcttgccctatgcgctaggttttcccaaaggtcctttggctccaagaattttacagcagaacaaagggatcgatacccccaagggggcataaaagcatgccaatgagaatacccgccgccgaccgggcaccaagaaagtcctcggtggctgggtcacgtgcagatattgttgcctggggtctagactggcctgagtctcaattggtttctacgggacaactcactgcgggctaccgccctgggtgggtttggcaattgtcctgctcgaggtggttcaggccgcccacaaggggcacagccgggcagtcaggaaccggggctgccggctgggctggcctgcaaagaagagggaagggccggaactgcaaccgcagtggcggggagtgcgagggggcggcaggtgcaggagcgggaggcggggcggagctgggcagagtcctcgccagtccggcgtcccggagtgaccttcccccaccccgccagcgcccaggaggggtggacccacagcccagggaggccgaaagcgcgggcgggcaggcagaggcgtggaggctgggccaggactgccgggctggggtcctcgaggctccgggcgacccaggtgcggatcccccagccacggaaggggcggttcacgcccagccgggagctgggagggggctgcgcggcgctgcctgcgcgtccctcaccgccgcccccgcctcctcctcgccccgcgcccaacgccccgcgcccagcgatccaagcggcccctctagccccggcggctcctttgtgccggccccgaacccgccctctcgggccgagtccctgcccctggcgccggcgattggccaccgggccgctagagggcggggcgcacggccgccggggcgcggtatatagtaaaggtagggcgggcgcagccaattcctcggctcctggcgggagtgccggtggcgccccgcagtccgcttgtccgtccttccctctctgactctcctaccccgggcctgtctctgcagaggtcaggggaggcgggggcccagcacacgtccccagtggcagcgggagcggcagctacgggttcgcggagcccccgaccccccaagggctagaggagcgctc

SEQ ID NO: 3221 - DNA, 2300 bp, Homo sapien
agaagagggaggaatgtaggataactctgatttctagtttaggttataatatagtagtagcattatttaacttggtgaaaataggagaaaccaggaggaaagatagcaagttcagttttggtcatattaagtttgaaggacatttgagacagatgtgtccgggaagcaactgagttaggcattagtagatctgagaggaaaattgaaatttagaagcaaaatcaaaggtgttagtagaatccatgtgagtggacaaaatcacccaaggaaaatgtctagactaagaaatgaaagtaatcaaggagttaattccaaagaatgacattcaaaaaccaggcacagccagtaaaaggaattaatgactatgaacctcagttgtcacaaagagactaagtaatgtaaattttgagaagtaattactgtatttggtatttaaaaggccattagaaacttaagcaagaacaactttcttgaagccattaaagaagccagacagaagacttttgtctgtttgatataagtaaaaataatatcctttcaagaagtttactgatagataggaggactaggaaataactggataaacacaggatggaggacatggttttgctttatttaattttcataagatgtgtgacttgagcactgaagagaagaaactggagaggaaaaggctgaacgcacaggaaagaaaaaaacaactggaagcgaaatgtaacagatggaagcaaatgagatcaagagcaaagatggatggattatcctttaatatccctttctctacactagaaatacaagactaaaggctcggcaaaaatatagagcaatgtgtaggttgggggcatgaggttgaagaaatggcctgttatactccatcatgtttagaaaggagaaatgaagagggcaaaagacagggtttgtaaagggaaggtttgaaaatgtcttcacagagaatgggtcaggggaaaactggggtaaccaaaaggattgctgagtagtatgaagaaacaaggggtggtgggtgagggctctgtttctaaattcatagctataactatctaaagatctttctatcctccagtccgttatccataagtgcttaaaagatatggtagttaagtgaattaactagaaccctctcaaacataggggtgaattaaaataacctataggcttatttaaaatgcaaataccgagctccattcctttcattcagaatttccaggggtgaagcccaaacagtgaattccagaagctctccaagcaatcccaggagaaatttctgtttaaaaaaaaaagaagaagaaagaaaagaaaagagaaaagaaaagcaagcacagacctagaaggtaaccaactggatagaagagcgctgatccaacatacacctgttaatggccctcgtgggggcgtggggcagtgctctgccactcagaaaagcaaaaagactccaagatctagggagattcagatcagtgttgagacagtcacatacacaccaccccatactcttaataaagcgcgttaatgtgaatctgtgaacatgaaaaatgccatgatgaacaatgcaaacacataatgtttgttcaaaacaggttattagactcgatgccttaccctaaattttctgtttcattactctagagacttagtaacattagtggaattcagggtgctgtaagaaatacggagagcgaggagactgcaggaacagcccgtgggaagggggaaagagataacggggagaaggtcgggaggaccggacaactttaagtgcccatccgcccgaagacttggaaagctaagtaagtaggaccccagagccgttcttctggcatcccctggcactcaccattgtctcaggatctcagcactagaaaataggtatcgttgagacaggaagacaccaccaccaccaccatcatacggttactcaggcaacaaagccccgcccactgtcgcacgaggcgtgggacgccaccgccccacctcttcgtccttagtggctgggagtaatctcagctgcgttcatccaatcgacagacccgcccctccacgctgtcgcctggggctacgagacgccattattctgtttccggcagttttacttccgtttgtttaacagctggcccggaagtttaagtgaatatgcggcttgggctccaaaagttgctgtacggtattttattttaaagtagaaatctgtccgcttttcacttacggaggccttacagtgtgtgttctgtgttacttgagtttatacgcactgcagaatttgtttaccctgctcttttggaaac

SEQ ID NO: 3222 - DNA, 2300 bp, Homo sapien
atgccttccgaaggagcacagccttgttgacattttcatcttggacttctagcctccagaactgagagaatacattttgttgttcaagccatgcagtttgtggtactttgttacagcaaccccagcaaactaatacaacatgaaagagatctttgatacaccctagttgctttgtctatctacttaaatctttaaaatgtgtattcttatttaaatcgtaatcttctagtgtatagggaatatagctgttaaaaactttgcattaacattaaatgtttaagagtagtcacctaataaattctaactaatgatgttaaatttcacttgtacatctaaagtactgaaatataaacactgcactaaaaaataaacataaagggatctgaaataacaaatgattcccaagggggtccatgagatctagttatctggctcaaacgttccttcacatcgtcataaatgtcatgttttaaaaacaattataaaaaagccacttacctttggtttctaaatttttagtagtcattttttcaccttaaccactgaaaatgcactccaagacttctgctgaacaacctagaaatgtatgcatatgaaataattttaaaaatatcatataaacacatagagtacctccaatttaaaagttatgatattttaattgcttctgtatttagtacgcatgcatttagaaagagaaatgtcccttatatcccattctcacagaaggcattgttatgtctactaaaagtctcaaaaaaaaaaattaggggtggtttacttctaaatactccgtttcaccatcctcaccaatacactctaaattgtcagaagtatgtcctgaattttagccaagcaaagggaatgaagttactgtggtggttttgtcatccatatgacaagaggaattttaaagtaattactttcttaggagacataccgacacaatttgtatacacacacacacatatcaaaaaggagcttctgtttagatgtttaacaaacgacaaaaaatattactcaagataacataatttatacttttttggtaataaaaagttaaaattaaaatagtgtagctccaaaagtaaaaagagaaacatatcgagcccatgctttcagaaatgtatacattgtcttacagtacagactcagatttaccagagaacatataagaaggtgatgctactgcaatgatataaatatgacaaactgtacactagatgacaactggtttcactacaaaaaaagatcgttctcagtactagatacaactcagttcaattagtgaacccgacgactaactttcttaacagtcacaaacttttctacacttacactctactgctccgaaaagaggtatccaaaaaacccttcgtaagagtaacgatccctgaaactgcccttgatagctgctctgcgaaacgtacaggcacagcgagtgcctgctggcaaatgccaaatgaagcggagggggtgaagaagtaagtagggggagtgagcaggtatgaaagcgataggccgggaagcgacaagcctgtcaactttgctgtccggggaagtcgaaacctaagtttcatccctgtctgaaaaagtcttcccggaacaatctttccctaaatccaaagctactggccaccgagctccagccagacctccgtccctttccaacatccttagttatacctgcttgtcctcggatttacctctaagattcttattctccgtatttcagggggcttcacttgataggctcttcggatcggtatcaccaggttaacttctcacagacctcttccattcggaagccgacccgcccagtccctccgcatatccagcagctctctcactcctaaccacttccgattactcagggtttcgcttccggaatacgtttccaaaagagcagggtaaacaaattctgcagtgcgtataaactcaagtaacacagaacacacactgtaaggcctccgtaagtgaaaagcggacagatttctactttaaaataaaataccgtacagcaacttttggagcccaagccgcatattcacttaaacttccgggccagctgttaaacaaacggaagtaaaactgccggaaacagaataatggcgtctcgtagccccaggcgacagcgtggaggggcgggtctgtcgattggatgaacgcagctgagattactcccagccactaaggacgaagaggtggggcggtggcgtcccacgcctcgtgcgacagtgggcggggctttgttgcctgagtaaccgtatgatggtggtggtggtggtgtcttcctgtct

SEQ ID NO: 3223 - DNA, 2300 bp, Homo sapien
tgaaaaaatgctcaacatcactaatgatcagggaaatgcaaatcaaaacctcaatacgataccaccttactcctgcaagaatggtcataagcaaaaaataaaaaaaacaacagatgttggcatggatgtggtgaacagggaacacttttatactggtgatgggaatgtaaactagtacaatcactatggaaaacagtgtggagattctttaaagaactaaaagtagatctaccatttgatgcagcaatcccactaccgtgtatctacccagaggaaaagaagtcattatgtgaaaaagacacttgcacatgtttatcgcagcacaattcgcaattacaaaaataaagaaccaaaccaaatgcccatcaaccaacgagtggataaagaaaatgtggtacatatacataccatggaatactactcagtcatatgaaggaatgaaattgtggcatcgtagctacctggatggaaatggaggttatttcatcattattctaagtgaagtaactcaggaatggaaaaccaaacatcatatgttctcacttgtaagtgggagctaagctatgaggatgcaaaggcgtaaagatgatacagtggactttggggacttgggagaaagggtgggagcaggatgaggcataaaaaaactacatattggttaagaggcccaggtgggcagactgcctgagctcagttgttggagaacagcttgggcaacatggtgaaaacccatctctactaaaaatacaaaaacttagccaggtgtggtggcgtgcctgtagtttcagctactctgggggctaaggcacaagaatcgcttgaacccgggagatggaggttgaagtgagcccagatcgtgccacttcactccagcctgggtgacagagcgagactctgtctcaaaaacaaaacaaacaaacaaagaaacaaacaaaaaaactctacatattgggtacagtgtacactgctcaggtgatgggtgcaccaaaatctcagaaatcaccgctaaagaacttatccatgtaaccaaacaccacctgttcccccaaaacctgatacttaaaaaaaaagctgctatcacccattatttgaaaaatacaaatttaggaggatggtcagaggaaaaaactattaacctaggagttctgaaacctagggtctacttccagctttggtaagtaactctacaactctacatccattaaaggagatttgactaaaattccttcaacctttagcagtgaataaccttttttgggagcgtcttttttcaagcgctgaagcagtagcaacattaggtcattacaactacaccacatctaggaagtgcactcaatattacaattcattttaaccttccattttaaaagaccttaagtctataacttgaagaatatctaaaaatttaattttacattgcctctcttggagaaaaggtgctctccatcacatcaagtgatagaaatcctaataataaacaatttaaaaataatccgaacacactggattgtactgaggaaatatttttacttctcccagttcttatttatttctggctgggaatggatagttgttaaaatcatctcaactttcaccacaatctaaattcatcttgctttgcctttatacataaagataagcagaatttgagaaaattctagttgaccattttgacatgcctcaaagctagagcaaaaatcctattttctttggcaactctcttgggtaaagttttggttttgattaggaaaaaaagaagctgagggtcaaaaatatggtaactcattagcaatttgcttatctactaatgaaaactaaaaactacttttctacgttaactgtgaagcacataacatatagaaatatagttttagaagttgtcctaagaaattctaaatctgacgagagacagctacaagagggaaatttcacaaccaacacagcggcacttcgcgagtctctataacgttagtgatgcgtggattccttagtcgtccccttagaaacctcagcttcactggcccttcgcaagcaccgggatgggtgccgggaggggtcggtggtctgaggatattgcatgcgcctgcgcagatttttgtcgctctcgtagttagagaggcccggatggaggacgcagaggcacgctgttgccatggcagtgtggtcctggctgccgcggaggcaggtgccggggtctcctttgcctcaatgtgaagagcttagaaagaggaggagaggagaactcccccggccatctctgtgatcccagccgccgcattttacacaggcaagagggatat

SEQ ID NO: 3224 - DNA, 2300 bp, Homo sapien
cccaaattattgggattacaggcatgagccaccttgcccagccttattcttactgtatttttaaatgcagcctacaaaattggagttgtcatttttaaaaagcacatcagactgcggtggctcacggaatctcagcactttgggaggccaaggcgggtgggtcacctgagggcgggagatcgagatcagcctggccaacaaggcaaaaccccgtctctagaaaaaatacaaaaattagcccagctatttgggaggctgaatcgcttgaacctgggaggcggaggttgcagtgtgctgatatcataccactgcactcctgcgtgggatagagagactgtctcagaaaaaaaaaagcacatcagtgtaaaatattaagattaaaatgcctgttgatctctagtccactggatgccttattcaaggtactgttgtgcttaaatgatagaaatggtatgatatctatttgttttacctattatgtcatattccccataattaataccttatatttaacatactttaggaagggcatttattaacatcatctcctttgattcttgaaaaggaccttgtagaaatactagttcctctacttttttcagtaagtaatactacagaagggggttcaaaatgttaggtttgccactcaaagctgtgatacgttagcagagtcactctattgagcctcagttttctcatctgtaaatggtatgatacctcacagaattgtgaagaaatgagcaaacataagtgaaagcacctgtcacattgcaagtactgagcagggatttaagaaatgagtttccttccccttgctctccatttacaactaatttgtagctaccaatttcaacattgcactctcaaaagaaactttgaatgtttcaatcgaaatgaaaatgatcagaagctttctaaatcctccccttatttttagttcatattttggaaagcacctgtgaggatacagagatgaaaaagtcgtggttctttccctcaaggaccctaagatgtataattggaaaagataagtagaaaggataacagaggtacacaactgcaatacaagataggtatcataacaaaaggcttcggtctggaagagagaatgaggacactgggaaaatcaggagtggcttcctgaagatggcatttaagttgaccatgcaggatgggtaggattttaacagaaatgtggaaaggggaactgtgtagtggagaaagggccacaagtgaagatatgaatgccagaaagtgcaggagatgggtacagtcaacaaggaatatgtgtagaagagtaggatgagatagagttgggaagacagcgtgagtcattttgtaatgattattaactggagatggggatggggagtaatgactaagcttatttttaagaaatttaatctggcaaagatggatatgatgaattgtatgggaagatactacctaaaattgctagctggattgccattgcaattggctgggtgtagtaggtaaggaagcccttttatgacttaaggcagtggaaaaaacgaaaacaggactgatctgaggttgctaaattaacattctacaatgtgtgtttacgtttcaaaaagtagcttagaaagtttaaataacctgccaagattacacatctatgaagcggataaaccaggattctgattcccaccctacccggcaaattaatggtcactttggccccagttccactgtcaagtttgtaagatattaaccgcagtggggaagggttgggggagtaggccttgctcagaaagcagagctcagaaaacaatgccaggcagggcaagagcagccgtcagatgggtgtgctgagtatgtcccacgatgggtgggtaagtggcaacggagtgaggtgtcttggggtccaatttgtgcgcgtggagtgagacagaaaacctggagcccgatctcccggccagcgactccctccttctgggtgtgcggctgaagactggaagcaggttgccttgcctgctgcaagcccgccgtacctaccccttctccgcgtgcgcccctccctgtgcctgcgcattaccggctagccggcggcgggcgctgcagcccctacgtgattctgcggctcactcccctcggatggtctttccacccgagtttttcccgggaagaggctctcaagactagccagtgcaggaggaggagtcgaactctggatagcctgtttataaagccctaactgtgccgatgttgaccgttttctgaaactcctcctccaaaacccacgccaaaccacaagatgaaggaaattcacacatcag

SEQ ID NO: 3225 - DNA, 2300 bp, Homo sapien
tatgtaatgatccacaagactgagaaacggcccagccactccatcccacaactggcaggtcaatagggtaatttaaggccaggcaaaaagtcagtgatacttgctagaagtgaacaaatgtcagactctcaagtgaaaccctcaatacgtaagtcaatactgattcttaattctctctcaagtgcccttgaaaatgacggagcattgcaacaaacaaactgcaaacaacaaactatgagtaactatatctcgccagtgtgcaaatgattccggtagtgccatctcttgttctgacctgttatgcagggttactgagtggctactcaaaagaagtgactgactactacccacatagagaagagtaaggtttaaatgggaggagtattttacagcacctggggcaaggaggcagggtggaaggaacaggtgtaggaaaaaagaaaaagctctcaagtggccccttgactgatagtaggaaaaagaacatgagacctcagctttcaccctttgttgtattcaaggaagagggtgttgaatcggctttatttcggttttgtggaagtactttgggtttaatttctttctcagtttatatattgtctttcttctgcaaaaatcaagtgctggttttgaccatgcacttaaataggtcagcacatttctaaagtacactatgcgcttctgaagtactttatttgtaagccctcatctagggaaaaaatcaatcagcaagaaactcttgatgatggactacgtgctctcaattaccctgaacatcacagaaggccttcaaagacatcaccttgtatctgagaagcaaaactaacatctgtgaagcaacaattcgcaatacaagaaacactataattaaaagtcaattatgtttcaccatctgcctttatccctggaggttggtcttaaggtagagaggggcaggatatccttggacacaacctcacccaattaaaaatcaagacaaattaagatgttctgtacttctgtcctgtccttacttgattaagcccacccattctgccaaatgcaaacaaagtaaggtatggacaggaagcaggtgaaggaggtagagggaagatcctttcagaaaagcagtggttgcctactttcagtcaatgaatatttactaagccgtgtccaaagtacactttgctgttttcacttctttgtcaaaatattgccccctcgcccccagcaggaactgctggaccagtctgggcagtcacgctaagccacattacaacacgatcagcatactgcctgacgcacaaggcacggggcctctggacgcgtgttctgagcccttcgcaggagactcgtcctacagagccgaagaaaacagaaaatcatgaacacaaagaagagcacgaagccgacctccaactggcaaaatcagaaatctctgccgagaatggctcgagcgcttttctcggtcctctcttcctccgctgcccacccgcaggccggtcgcccgcccttcccgcgccccgcgtccgccgcgcgtacctccctctcggtcaggttcttgtccggccccagcaggtacggggtcaggaagggctcggacggcctgaggctggcgaagaagccgtaggcgcagagcagcgcggtcggcaagaaccagcattcgcgacggacccgagcggtccgcaggagcacagtggccgccgccgccgccgcccgccgagacaccgggccgggcacatccatccggggcgcgaggggaggggacccggcccggccccttccttctcctcctccgccaactggagtgagggtcaggcacttgtaaccgcgagtgacgccttctccctgtaaggccaggacgttctggactcgccgccgcctccggctacagaacccccagctttaccctacagacgcctctagggtcgctgcctgatcgcccagtttaagggagacccgtcctaaggcccaccctctgccaccgcctccactccgggaaccaatcacagcggacgccgggaatacttgcctgctcttccattggtcgtgggtcacacgacgtgaactggggcggtggcagcacgccaggcctctgacgtcccagggctcaagcgcggaggacatgtggaactccactccaaaagcggcggcttgcggcggagctctctctagtgaggcggccagctggcgttcgtggcacacttgctgtcggctccgctcatctgttgggaatgcgtcctgtgggcctagtcctccgctggaagaaacgcgctgttctccccaaccaccgtttatcattcttattcaccgtctccgga

SEQ ID NO: 3226 - DNA, 2300 bp, Homo sapien
acaattactgtttatacccaacctcattgcctatgtgatttataccaaggaaaagttacagaagcagtgatttacagattaacgtggttcaggtacccaagcctcagggaagggatggaaagctgtttttgttattgttgttttgttttttgagacgagtactcgcgagtctcgctctccgctcactgcaacctccgcctcctgggttcaagtggctctcctgcctctgcctcccaagtagctgggactacaggcgtgcatgccactatgcccggctaatttttgcatttttagtagagacgtgttttcgccatgttggcctggctggtctgagactcctgacctcaagtgatccgcccgtctcggcctcccaaagtgctgggattacaggagtgagccaccgtgaccagccagaaagctatttttaataagtaggcttctctttccgaggcctctctggcttgctttctctttctttcttctcttctactaaagcactgaatgtaaatacaaagcgattgtcaagaagaccacctgttttctctctgtagtcctgataagaagggttggagtttaggggactagacaattgaataatatcgattagcagtcctcaaacattttggtcttaggacccttgttagaggtgccccaaaaatctgttgggttttgtgggttatacttattgaaaattgccatatggtaataaattaaacctggaaagtcttacaaacacaagaatatacaagcacgtattctctcatcctataaagcgatgatgtcatcagacattatatagcctctggagtggaaaaggaaataaagacttagcatggttatgaaaatagatttgagctcgtggaacctctgaaagggtcccaaggacccccagggcttcctcgaccacactttgagactcattgagatatgtaaatactgccagttgtatttcttcacagattaatcaactcacagatttgggtgcattcatttgtgcagtcttagaaacaaatctttccctttaccagtatcttattccatctggtagactcatttctgctgctgatgcttgaaaaaagtgtcatttgctaccacaggaggaaaacggtgctagatggatcataacatacagaaaagcaagatagttccaaaatgtttccaagagcttctggcaggatctgtcattctacaaatactgcacaggaaaaattgctttaaatgctgcatctttgcagtagaaagattaggattgagccaggctgtgagtcaggcagaaaaaggcacacagagggggatgaaagaaagcactggagagtcttgtcatgctttgcccttgaaaactatgccaagacctcttttgtgtttttaaatgaagaaatccatcatgttttgtgattgctgtaatgactcaggatcttccaccttccttttaactataaaccgtagcgtagttaggtgtttgttttctttgtatcatgcttgcaaaaagtgacgaaataaagttaaaaccctttaactgggactccattacggttctgctgttcagtgaccagcttgttcattattctcacaatattatctactttcttcatttcagtctgtctcttagatcctgggcttctgatgtctttccatggcggatgaatacaatttaaaacacgaaagctgctggaggaaaggtttaacgttccccctccccaaggtgaaatctttgcctggcctcagtcactaagtctctcaggagcggaaactgaatggacattccggagacggtgaataagaatgataaacggtggttggggagaacagcgcgtttcttccagcggaggactaggcccacaggacgcattcccaacagatgagcggagccgacagcaagtgtgccacgaacgccagctggccgcctcactagagagagctccgccgcaagccgccgcttttggagtggagttccacatgtcctccgcgcttgagccctgggacgtcagaggcctggcgtgctgccaccgccccagttcacgtcgtgtgacccacgaccaatggaagagcaggcaagtattcccggcgtccgctgtgattggttcccggagtggaggcggtggcagagggtgggccttaggacgggtctcccttaaactgggcgatcaggcagcgaccctagaggcgtctgtagggtaaagctgggggttctgtagccggaggcggcggcgagtccagaacgtcctggccttacagggagaaggcgtcactcgcggttacaagtgcctgaccctcactccagttggcggaggaggagaagg

SEQ ID NO: 3227 - DNA, 2300 bp, Homo sapien
gttatatagtatttatctggaactgatgttaaaaaaaatagagagccaaaaattatagtagtcatcttgtctctgtaaaatgtaattaaataaatatgtcatgtacactgtatatacataagcaaacatgcaaataaaaaagcagcctactcaaaggttacaataatgttgcaacaattctggtagtaaccttgggatttagggacacagtgctttcaaaacgtttctctgatacactgccagtagcatctctgactgcttatttaaatgtcaatcagtaggctaggtgttctaggactttggtctcaaccctgtttcctgagtcagaatctacattttgtaaaagttcccctgggaattctgatggtctgccaactttgggagacactgataatattgtagataaagaagtgtaagcaactgttcagttagggagacaatagatacctgcatggaataacaaaaggtaattaacatgattatataatttgaatagtgttgtaatagttcataaaatggaaaagccaatttgagcccagaatctgggagataggcagaactctggactgtaaagaatggcccagcaaagaggaagaaaatgggcattctaagttggtgcaataatatcagcacaggagaaaagacagaatattggggggagtggggagggaggaagaggctgttgatgagcctgatatcattaacagagacctcatgtgaggtgccagattacaatttattgaatgtactgaatgcataaagcataagacagaaacctggagccatgcagatacagggaacccaggacaagtcattatgatgcctcagacaatataattcgcagattctctatcaatagcaaagtaagatttaaggtgctgtgaaacagtcagatccttcaagaaaaacaagaatacaaggggtcctggagacaggaaaatatgatcataataataaatttgtgattccttctttctctctttttctctttctttctttttctttctttcttttttttttttgatggagttttgctctcgttgcccaggctggagtaaaatggcatgatatcagctcactgcaaactccaccttccaggttcaagcaattctcttgcctcaatctctcgagtaggtgggattacaggtgtccaccacaacgcccggctaattttttatatttttagtagagaagggtttcaccatgttggccaggctggtcttgaactcctgacctcaggtgattcacccgccttggcctcccaaagtactgggattacaggcgtgagccactgcgcctagcctctgtgtgttaagtgctggaactatagtttacagtagcattttatcctcccaacataccctatcaggaaaaattattattgtcatccttatttcacagatgtcaaaactgaacagagaggtacagtaacttgcccaagacaacacagctagtaagtgaaactgaaatctggacaactgatttttttcagccaagctcttcaagcccgctgctatgctgcagcttagctggcgacaggcccttatcaaggcagaactgtgccttgatagaggccaggaaggcgattcagagcagtaggccttgtccatgtgtttgttccctgcttcttcaccacttgaaaatagtgtttcagtgcccagtaacagggcacaatactcttttcctcagattaaaaggggagccatctgcttaaggtggttgggtgccactgcactgcacagaaggttctccaagtgtgagcttggacccaggcaggcctcaggtcagtggtaacggacgactgcttccgtggtgttggcaggtggaaatggagggatacagctttgtccggctcatgaatccctgggcattgtcccgcctgctagagcctctgatctctgccccttcttcacctgcagtaaaacagtcactagtttggttgctctccctaatacctctggtcactgggagctgtgatctcaccaaacccctgccaggaaaagccccagaaaaagcggagggagtgagagccagaggctgctgctgccgtttgcaagaactgcaggggaggaggacgctgccacccacagcctctagagctcattgcagctgggacagcccggagtgtggttagcagctcggcaagcgctgcccaggtcctggggtggtggcagccagcgggagcaggaaaggaagcatgttcccaggctgcccacgcctctgggtcctggtggtcttgggcaccagctgggtaggctgggggagccaagggacagaagcggcacagctaaggcagttct

SEQ ID NO: 3228 - DNA, 2300 bp, Homo sapien
gatacatgaacacacacacaacaccacacagtcccatgcaccctacatcatccatcactggggtgtgacacaaacacacacacacacaactccacaccatcccatgcaccctacatcatccatcactggggcatgacacacgaacacacacacaaccccacacagtcccatgcaccctacatctcatcactggggtgtgacacacacacacacacacacacacacaactccacaccatcccatgcaccctacatcatccgtcactgtggcatgacacacacatacacacagaaccccacactgtcccatccaccctacattatccatcactgtggcatgacacacacacacacacacacacacacacacagaaccccacactgtcccatgcaccctacatcatccatcactggggcatgacacacgcatacatacacaactccacacagtcccatgcagcctacatcatccatcactgtggcatgacacatacacacacacacacacacacacacacacacacaaccccacaccgtcccatgcaccctacatcatccatcactggggcatgacacacgaacatacacacaaccgcacaccgtcccatgcacgctacatcatccatcactggggcatgacacacgaacacacacataacctcgcagcaaattgtcacagaccaaattgtggtctgaggcaatttgagatttctttacaggaaaggttttaggtagcagtctggctgggatagtgacaaaactgcaaatgcatagcaaatgcactgtttttatgttgatagtaatgttgagtggctttagaggggaactgatgtagcagctaggcttggtcatgtcgcatgctttatcatccaaaacagcaatgcagcatgggatttagaagcctggaggttaatgaaggttaaaaaaaaaaaaaaaaaaaagtacagtggaaagagctctttcttgtttcaaagtcaagctctgctactgtcattctgaacgtgttatttagatgccccaagcttcagtattttcatgtgcaacatgaggaagtcggacaagatgagcatcactagaacttagatgcccaaaaacattttttgttgtttttttgagacggagtcttgcactgtcgccccggatagagtgcagtggtgtgatctccgctcactgcaacctccgcctcccgggttcaagcgattctcctgcctcgacctcccaaggagctgggattacaagcacccgccaccacacctgtctaatttttttttaatgtacttttagtagagacagggtttcactatgttggccaggctggtcttgaattcctgacctcatgatccgcccacctcagcctcccaaagtgctgggattacaggcatgagccactgtgcctggccccaaaaacattttaaaaatattcatagatttgatgaaatcccaacagaagagagttcatgagaaataatagttgctatagatccaaggggaacaagtttactgcatatattaagaaatattaaatatatacatacatatgtatattaaacattgaatagtattgtagatgtgtacagaaatgaaaaagcaagaagataaaacaaagatccatagtacaaaatagatggcatagcataacacaatttgttgatgctctgcacctcaaagtataggttagacattatttgtgtgggtcaggaagttctcatgtgactttctgttattcttgggtatgacataccacttcttaaaaagattgttttataataataatgacagccatattaatgtgtttagctttcttccatacacattaaaaatgtatcttaaaataaaaacattggtggcacaaactactcaataaacatttgttgaatgaatgaagaaatgaactctgtccccagccttgctacagtgtccatccagggtagaacttagaagcagggcaatgagaagcaagaaggaagcagagggcttgaaccactcttccagtggaaattggcacaattatacttcaacataatgattgttaactagaattatttttggccatgttggtggtgtatggatactaaaagaaagttttctcttcttgtttcaggccaactgccaaatagccatcttgtaccagagattccagagagtggtctttggaatttcccaactcctttgcttcagtgccctgatctctggtaaactttatgctaacttttcacttaggcctaagtaattagggtagagcccagatctatgtgtgagaaatttaaggattgtagccagttggtttgaggcatgggaaaa

SEQ ID NO: 3229 - DNA, 2300 bp, Homo sapien
cacacatctatagtcccagctactcaggaggctgaggtgggagaattgcttgagcccaggaggtcaaggctggagcaagcagtaatcatgccactgcactccagcctgggccgcagagtgagaccctgtctcaaaaaaagaacctactagtctacataccacacttcctcatccccatctgagactatatatattttttctaacatgaggcaatgccaaaaagaggggctggtgagtgaaagtaagaacagaaagacatggaggcaagtcttatagaataatagccaacacttaaacttacacttaacagcgtgataggtattgttccaaacacattaaattcatttaatggtccttacatgtctatgtatttggtgattattatccttattattcacattgctgagtgtattattctgttctcatgatgctgatagagacatacccgagactggataacttattaaaaaaaaaaaggtttaatggactcacagttccacgtggatggggagtcctcacaatcatggtagaaagcaaaagacacgtcttacatggcagcagggaagagagagaaatgagaaccaaacaaaaggggtttccccttataaaaccatcagctctcatgcgacttattcactaccatgagaacagtatgggggaaaccacccccatgattcaatgatctaccaggtgcctcccacaacctgtgggaattatgggagctacaattccagatgagatttgggtggggacacagccaaaccacatcactgaggaaactgagttatagggagattagtaacgcccaacacagctggtaggtggtggagccaggcagtctgactctagggtctggactctgaactgcatcatgctgccaagaagttcctcattttttcctctctctaagtttcccttattcccctacagtcattccttcaacagcatttccttcaccatcttttctacttctactatataattaattttttcttcttggtcccaaattccaacgtgcaaatgcagccttatataccctaattcatctttacctttagactttcttccaatgtttctacttcattccattttaaatttatccatgagatgcctatttacaagctgtaaccatcatgaagtgaatgaagaataatacctactactgtacaatagaattccaagagtataaataggagttatggctttctgacttgaaactaaatacttgatacttgattttgctgtctgagatcaatctgaaaagtaataataatcactaacatttgttgagcatcaattgtgggccaagtgtcatttcaatcactctgtacatattaactcatttcatcctacaacaacccggtgaggcaagttctgttattctgttttacagttgaggaaacagaggcatagagagcttaagtagtttgcccagtagatagccagaagaggagccaggatgggtctcgggcagtttaacagcacagctgaagtcttaaccactatgccaacagctttttggtcctacacatcccatgggaagaggaaaataaaaaggtatctatttgtatacctttttatttctgatataagaagcagaattcctttcacatgacctatgtctatttaatacgtcattttgaaacttaccaataaaatttcccaagcgccagaaaactgttagtggctttttccatttctctctatttttttttgtgctactaattttgcttctttccctcagaaggctgccggaatagtaaacattcactgacatgtcataattactggaaaatgggcactggaaaatcacattgtaattaattcaaagcatgttttccaaatgtactactttaaattggagcttatatcataatccaaggaaacctttgtgtgtgtactgttcccacattgctcagcctgggatatccaggagtaattcaccttgcgcctgcctccagaccatcttccatggaagggggtgaccccttgcctcttggcaaccactatttctaagctgccaacattactcttgcattatcaacattctaacttcatgggaagggctgtggtgagtttctggaatgtgaataggaagttgtttttctaaacagcctgacactgaggggaggcagtgagactgtaagcagtctgggttgggcagaaggcagaaaaccagcagagtcacagaggagatggtgagtttatttttttctgcatgggaagtggttgaagtgagttggagtggtatggagtaaagtcaggcaggtaaaggttcagaaagtgaggaacagcgatag

SEQ ID NO: 3230 - DNA, 2300 bp, Homo sapien
tcctgatacaaaaaactgacagagacacaacaaaaaaagaaaatttctggccaatatccctgatgaacatcaatgcgaaaatcctcaataaaatactggcaaaccgaatccagcagcatatcaaaaagctacccaccacaatcaagtcaacttcatccctgagatgtgaggctggttcaacatacacaaatcaataaatgtaatccagcacataaacagaaccaatgacaaaaacaacatgattatctcaatagaggcagaaaaagccttcaataaaattaaacaccccttcattctaaaaactctcaataaactaggtattgatggaatgtatctcaaaataataagagctatttgtgacaaacccacagccaatagcatactgaatgggcaaaagctgtaagcattccctttgaaaaccgacacaagacaaggataccctctctcaccacttctatttaacatagtattagaagttctagccaggccagtcaggcaagagaatgaaataaagggtattcaaataggaagagaagaagtcaaattgtttctgtttgcagatgacataattgtgtatttagaaaccattgtctcagcccaaaatctccttaagctgataaacaaattcagcaaaatctcaggttacaaaatcaatgtgcaaaaattacaagcattgctatacaccaataatagacaaacagggagccgaatcatgagtgaactcctattcataattgctacaaagagaacaaaatccctaggaatacaacttacaagagatgtgaaggacctcttcaaggagaactacaaaccactgcccaaagaaataaaagtggacacaaacgaatgggaaaacattccatgctcatggataggaagaacaaatatcatgaaaatggccatacttcccaaagtaatttatagattcaatgctatccccatcaaactaccactgactttcttcacagaattagaaaaaactactttaaatttcattctggtaacaaaaaagagcccacatagccaagacaatcctaagcaaaaagaacaaagctggaggcatcacactgcctgacttcaaactatactacaaggatacagtaaccaaaacagcatggtactggtactgagaggtgacagcgtgctggcagtgctcacagccctcgctcactcttggcgcctcctctacctgggctcccactttggcggcacttgaggaaaccttcagcctgccgctgcactgtgggagcccctttctgggctggccaaggctggagccggctccctcagcttgcggagaggtgtggagggagaggcataggcaggaaccggggctgtgcgtggtgcttgtgggcctgcgcgagttccgggtaggcgtgggcttggtggaccccacacttggagcggccagccggccccaccagccctgggcagtgaggggcttagcacctgggccagcagctgctgtgctcaatttctcgccaggccttagctgccttcccacggggcagggcttgggacctgcagcccaccatgcctgagcctcccccaactccctgggctcctgtgcagcccgagcctccccagtgagcaccgccccctgctccacagcgcccagtcccatcaaccacccaagggctgaggagtgtgggtgcacagcatggtactggcaggcagctccacctgcagccctggtgtgggatccactgggtgaagccagctgggctcctgagtctggtggggatgtggagaacctttatgtctagctaagggattgtaaatacaccaatcggcactctgtatctagctcaaggtttgtaaacacaccaatcagcaccttgtgtctagctcagggtttgtgaatgcaccaatcgacactctgtatctagctactctggtggtgacttgaagaacctttgtgtcaacactctgtatctagctaatctggtggggacttggagaacttttgtgtccacctcagggattataaatgcaccaatcagcaccctgtcaaaacagaccacttgactctaccaatcagcaggatgtgggtggggccagataagagaataaaagcaggctgcatgagccagcagtggcaacccgctcgggtccccttccacactgtggaagctttgttctttcgctctttgcagtaaatcttgctgctgctcactctttgggtccacactgcctttatgagctgtaacactcaccgtgaaggtctgcagcttcactcttgaagccagcaagaccacgaacccactgggaggaaagaacaactccagatgtgccacctt

SEQ ID NO: 3231 - DNA, 2300 bp, Homo sapien
taaatatacaatcatgtcatctgcaaacagacacaatttgacttcctctcttctatttgaatacactttatttctttctcttgcctgattgccctggccagaacttccaatactatgttgaacaggagtggtgagagaggcatacttgtcttgtgccagtttttaaagggaacgctttcagtttttgcccattcagtatgctattggctgtgggtttgtcataaatagctcttattattttgagatacgttccatcaatacctagtttattgagagtttttagcatgaaggggtgttgaattttatccaaggccttttctgcatctattgagataatcacgtggtttttgtgattggttctgtttacgtaatggattctgtttattgatttgtgtatgttgaaccagccttgcattccagggatgaagccaacttgattgtggttgataagctttttgatgtgctgctggattcagtttgccgtattttattgagtattttcgcaatgatgttcatcagggatattggcctgaaattttctttttttgttgtgtctctgccaggttttagtatcaggatgatgctggcctcataaaatgagtgagggaggagttcctctttttctattctctggaatagtttcagaaggaatggtaccagcacctctttgtacctctggtagaatttggctgtgaatccatctggtcctgggctttttttagttggtaggctattaattgctgccttaatttcagaacttgttattagtctattcagggatttgacttcttcctggtttagtcttgggagggtgtatgtgtccaggaatttatccatttcttctagattttctagtttatttgtgtaaagatgtttatagtaatctctgatggtagtttgtatttctacgggatcagtggtaatatcccctttaccattttttattgtgtctattgattcttctttcttattagtctagctagtggtccatctattttgttaatcttttcaaaatgcagctcctggatttattgattttttgaaggctttttcgtgtctctacctcctatggttctgctctgatcttagttatttcttgtctttcgctagtttttgaatttgtttcttaacctctttgagactctttagaatggggataataatcatatctatagcagagagctgttataaagattaaacaatataataaatatggggcgctgagcttcagagtttttgttgttgttattattattttcctaaaaatgcaaatctgatttgcatttgactcattgactcacatcagtgggtcttcctttttattgtccttcatcatatgggtcctaatttcacatgcagtcttataaaaccatctcattttatagtccaagaatattaaaggtacttgtaggctcccaaacctacacggtgaaaagctagagagcatgggctctcttcaggggttaacttcaggaagtgccactaacaaggacgtccactaggtggtgagcaaggaaagacggaggtgaaggaaccgaaacgagtcaagtccactgcttagctctactgaagttttgcaaacatcataaatatgtctgaaatgcagttttgatttgtagtatttgcaatttccaagggccatttaccacaggtagccaagagttagtttagcatttatgaaaaagataggggagggtggtggaaaagaaggaggaggaggagagagagaaggaggaagaggagaacaagaaccaaacaaaaacaagaacaagaacaagtagaagaagaggagcaggaggaaaaagaagaggaagaagaacagcaacaacaatgagtgaaggaggaggagggtaaggaaagatgcataggagaatggaaggaaggatagaaaggagggaaggaagagagaatctagtcacattactttctgatcagcagttcatttttgtctcagtgggaggcaatagaggccagtctaggaaaggggtggggaaagaggaaagagaagtgcaggaggaaggggagggaaaaggggaggaggaggaggatgtgagactgggttagagaaatgaaagaaagcaaggctttctgttgacattcagtgcagtctacctgcagcacagcacactccctttgggcaaggacctgagacccttgtgctaagtcaagaggctcaatgggctgcagaagaactagagaaggaccaagcaaagccatggtgagcctttcagcctaaaagacgtttagatgctcagatagaaactcttggggttgtagaggcaggtggcaaggataggaat

SEQ ID NO: 3232 - DNA, 2300 bp, Homo sapien
aagtaaagtgggataaagaattggaataatgtcagtatctggatcatgtaagagagtggtaaggtggagggaataaattctatgctttttgataggggttgaattaaattcgttaattaagttatttttttctaatcagttgtcttttttggaatttttcttctcttttcttgttttttttttgggtcttgacatctttatgaacacagaaagaccagtgctaacaagtaaagagaaaaacgaggcttttaccactactcgttcaggtctgctgacagtacatttttagatagacctcctattttgaaaggctgtagatatagaatattagcttgacttgagctctgaaaacctacagaatatggaaattaaaatgatccccatttactgttaccatcatttagatagggtaagatgcagagatggggaatgtatacaatcacccagaagaaatgtcaaaatgaagagcaggaatataggataccacatacatctccttctgttgcatttggaaacaaatttcttttcttttctttttctttttttctttttttttgagatggagtcttgctctgtcgcccaggctggagtgcaatggtgtgatttcagctcactgcaacctctgcctcctgggttcaagcgattctcttgcatcaggctccccagtagctgggattacaggcatgcgccactacaccccggctaatttttgtatttttagtagagacagggtttcaccatattggccacgctggtctggaactcctgacctcaggtgatccacccacctcagcctcccaaagtgctgggattacaggcatgagccatcatgcctggcctagagacaagtttctttaaactgtattcttgttactataaaggtgaaaaaaagggaaattgaaaaaaactttaaaatcctgaaaataataatgaaggatataaaaattatcccaaatcctgccatccagagttagtcactgttaacattgtggaagaatttttattctttgcacattaacatttcaaaaattttaaacaaaattttgaccaattaaatatatatatatagttttccgttttattttttttcttttcttttctttttttttttttttttttaagacagagtttcactcgtttcccaggctggagtgcactggcgtgatcttggctcactgcaacctccacttcccgggttcaagcgattctcctgcctcagcctcccgagtagctgggattacaggcatgcgccaccatgcccagctaattttgtatttttagtagagatggcgtttctccatgttggtcaggctggtcttgaactcccggcctcaggtgatccgcctgcctcggcctcccaaagtggtgggattacaggcgtgagccactgtgcctggcctcctttttatttttttcactgaacaaaccatgaaactttcccagatgtaaatatctatttcccatttttctttttttaaaataaggcattattttaaccatttgagtgttagatattatttttagataatattttaatttaggcataactgccgtgcaaaatctgaagattaatatctaccttgtgagtcattcctctgtgagacagtgcatgttaaatatgttgaattggcaggtgaaaaaggaagaaaaaatgagtagtgattggttatccacagctatgaatgagaaattgaaggtagtagactatggatgacaaacctattcttggtttccttctgtttctgaaattctaattactaccacaactacatgagagacactactaacaagcaaagttttacaactttttaaagacatagactttatgttattataattaaaaatcatgcatttttgtcatattaataaaattgcatatacgatataaaggcatggacaaaggtgaagtagcttcaagagacagagtttctgacatcattgtaattttaagcatcgtggatattcccgggaaagtttttggatgccattggggatttcctctttactggatgtggacaatatcctcctattattcacaggaagcaatccctcctataaaagggcctcagccgaagtagtgttcagctgttcttggctgacttcacatcaaaactcctatactgacctgagacagaggcagcagtgatacccacctgagagatcctgtgtttgaacaactgcttcccaaaacggtaagtgcagaacgctttataagggcagcctcgggccatgaaacacagatatgcaaaaggccttctaataaaaaccacatctgtacaagctcttattgtattgtagct

SEQ ID NO: 3233 - DNA, 2300 bp, Homo sapien
caattattttgagtattctggtcttaaaaacatctctttcttctacaaacttctgaaagagatgaacacctccacctacaccaaaataatgtgctttgctggccaaaagtacacgtccatttttacttaacagtctaaggaaagtctggtgcaaattactataataatctgggttgtaaatggtttctgaggtgagaatgagatcatattttacaaaaagtttttcactacttagtacaagcttacaaaactcagaccactcaccagaaaaaaatcggcatttatatagttgtgttacttttggtttcctgcatcttttcacatctggctcatttacatcattttcttcatcttccaaagtggagttagctactacattaggtaaggttacttcatcaatcaccatactgttataatcttgaaagtgaatttctttggaccctcccttgaatgcagttatacctagtaaacctgatccacaaccaagatccaagacttttttcccagcaaatttcactttggcctttgtgaaataagccaggaggtcaaaggtacattcccagatttttaagcctccctcataaacacctgtaatcagatcagagtgagaagaaaagctttttgaaactatgttttctccagggaagttctctttcaacaagatggttttcactactgataacttaacatgctggaaacctggtaatgtttctatgactttattttctaacatcttctttaaatctttaggcatagcatgctctttggcagctctcaaggagggctgttttccatgtggctccaagttccttgaactgctggctgcactgagtggactgtctgtgtcttgagagggagctgcattttccattgacttatgttcccacaagtgatcctgaggcaagtcaaattgttctgcagaacattttctgtccctctcttctcctttttgactttctgagactgacagctcttttgaggaatccagggtcaaagctccatctctaatgggtgttaattcattttccagatggtcttctatagtgaaattaaactgaaaggtcatcctcttattaaatgcacacaatctttaaattcagattcttcaacttctggatagaatttgatgatacacacaaatctgcctcaattattcaattagttttgttgggcccaatttctctttagcagcttatacatggtaacaaatatttagagatatttccaaatgactttttagacgtctttggtcctctttccaagcagctctggaaagaaaaaaaaaaaaaaaagaaagaaaatgatgattaaagcaaaatggcacatttcactaaagtgtaatattaaacagccacccccacccctccctgtcccaccatacagctgctttttcttaaaaagttgtggggaagagagagagataagagatttggacactcatacacaccttaagggttccaaagtgggagaagaaaatcaactataaaaacaaacagaagaacaacagcaaccaccaccactaccacctggacaaacataaagtccaagatattcagacaggacagcctagctacttgctgtctttcagctgtcttgatttgtgtccaaccatattcaccccctaagcttccagaataacttcacttctgtcttttacagaagaggtgcagtattttattttggtaagtcagcgtccctttaaaaacatgcataggtatggcctggtgtgtgtaaattcatccaagacttcactccaaacatttagtcgagaacagcagccctaagtgtatagaagtgggggtaatttggcaataattagtaaagactaattcggtggcagagcaaacgcaaactagggcactgcagtagtttggagagacctgtagaaataagaagcaactttattgagaatcttctatctactgcgctagacactataccatctgcctcaattttcacagttctggcaagtgggatctttgttccctttatacaagatttacaatttgggggagaggcgggtcacccagtcccgcggctaggaacgcgcctctttcctctcccatcacgctgcaaggcttggagtcacttccggctgcaggtcccggaacaaatccgaccccagaagtggggacttctggccctcacctccccatttgaatgtaatgtttacagtgatccagacctggggatgcttgcttcccgacgtgtcctgggatcgcgcttctgaaaaagctcacctcacaacgcctcctccggacctaaatcgcgcaccagtgagtcgagtcctccaggggcta

SEQ ID NO: 3234 - DNA, 2300 bp, Homo sapien
tcttttcacatctggctcatttacatcattttcttcatcttccaaagtggagttagctactacattaggtaaggttacttcatcaatcaccatactgttataatcttgaaagtgaatttctttggaccctcccttgaatgcagttatacctagtaaacctgatccacaaccaagatccaagacttttttcccagcaaatttcactttggcctttgtgaaataagccaggaggtcaaaggtacattcccagatttttaagcctccctcataaacacctgtaatcagatcagagtgagaagaaaagctttttgaaactatgttttctccagggaagttctctttcaacaagatggttttcactactgataacttaacatgctggaaacctggtaatgtttctatgactttattttctaacatcttctttaaatctttaggcatagcatgctctttggcagctctcaaggagggctgttttccatgtggctccaagttccttgaactgctggctgcactgagtggactgtctgtgtcttgagagggagctgcattttccattgacttatgttcccacaagtgatcctgaggcaagtcaaattgttctgcagaacattttctgtccctctcttctcctttttgactttctgagactgacagctcttttgaggaatccagggtcaaagctccatctctaatgggtgttaattcattttccagatggtcttctatagtgaaattaaactgaaaggtcatcctcttattaaatgcacacaatctttaaattcagattcttcaacttctggatagaatttgatgatacacacaaatctgcctcaattattcaattagttttgttgggcccaatttctctttagcagcttatacatggtaacaaatatttagagatatttccaaatgactttttagacgtctttggtcctctttccaagcagctctggaaagaaaaaaaaaaaaaaaagaaagaaaatgatgattaaagcaaaatggcacatttcactaaagtgtaatattaaacagccacccccacccctccctgtcccaccatacagctgctttttcttaaaaagttgtggggaagagagagagataagagatttggacactcatacacaccttaagggttccaaagtgggagaagaaaatcaactataaaaacaaacagaagaacaacagcaaccaccaccactaccacctggacaaacataaagtccaagatattcagacaggacagcctagctacttgctgtctttcagctgtcttgatttgtgtccaaccatattcaccccctaagcttccagaataacttcacttctgtcttttacagaagaggtgcagtattttattttggtaagtcagcgtccctttaaaaacatgcataggtatggcctggtgtgtgtaaattcatccaagacttcactccaaacatttagtcgagaacagcagccctaagtgtatagaagtgggggtaatttggcaataattagtaaagactaattcggtggcagagcaaacgcaaactagggcactgcagtagtttggagagacctgtagaaataagaagcaactttattgagaatcttctatctactgcgctagacactataccatctgcctcaattttcacagttctggcaagtgggatctttgttccctttatacaagatttacaatttgggggagaggcgggtcacccagtcccgcggctaggaacgcgcctctttcctctcccatcacgctgcaaggcttggagtcacttccggctgcaggtcccggaacaaatccgaccccagaagtggggacttctggccctcacctccccatttgaatgtaatgtttacagtgatccagacctggggatgcttgcttcccgacgtgtcctgggatcgcgcttctgaaaaagctcacctcacaacgcctcctccggacctaaatcgcgcaccagtgagtcgagtcctccaggggctagagaagcccgactttctttccggccttgagggacccgggctcaccaagaaaccagccgccctcctctctatggttttggagccggcggagagcgcgcaagggttggcgggactgcgagtttccggtctgggctttggcgggtctggtttgaagctctcctgtttgacgaaagtatgtctcaggaaggtgcggtcccagctagcgcggttcccctggaagaattaagtagctggccagaggagctatgccgccgggaactgccgtccgtcctgccccgactcctcatatccttccttggttgtcacttctacct

SEQ ID NO: 3235 - DNA, 2300 bp, Homo sapien
tgtagttaattaactaggtatgagagaagggcaaggcttagatcacctggaaccttgaaggtaaagtggtttaaaaagggaaatgacgagatctatgtttttcccctcttaacttttttggaataatgaattatgagtagaaacaaggaaactattaatactccaagtgagaggtgataagggtttggaatcagagtggtagcaatgaggatggagataaacggattgattcaagacatagtttggaatcagaaacaatagaacttactgatcgggtgtgtgagacagagaggattcaaggtttcagtttgtgaaaccatttactcagatgaagaaaactagaggaagtttgggcttttttgaatatgtcgtttgaagtgcaaagctaggtgggaatgttgactttcaacttaatgaagtctctctataagcttgtggggaagaagaggaatcacgttccgtgtctctgttctcccaaagcctaacaccatgtctcacacacattatgcacgcagtttaagtgtttttgaatgttttgagggtggctatttgttttcaagttgaaactccttgaagacggcagttctgtacctacacaaaaactaaaaaagggggctttggcaccttctgagattttgctaatgcctaggtgaatgacttctatgtgattacatagggctttagctgcacaatatttgtgcagtattgagattctctcaagtgaaggttactttttttcttttgagtgtaattgtataaagctgggctcaaatgttgtgaaaaagatacatatacatatggtttaccatgaaaggctaggattccaggcacatttacaaccacaaaggcatgagaccaatcaagaatgtgctgcacccggacgaagaaggcgctaagcgcctcaaatccaacagttgaaagccaacaacaagcggaagaactctttcagaaagactccagcctgggtgagaggagtgagaacttgtcaaaaaaaaagaaagaaagaagaaaaagaggtctgagaggggaaggaggaaaatcatttttatttactgaacatcttttaaagatttcacaccacagaactatgccctttaattcttataacgctaagaaagcccttattcatattcaccaccctttttacgggagacaaaagctcagagtatctcgctttacctcaaactattaagagccagagctatcgtcataccgcaggtctcagtccttgcctcccccattatccactagcaaaagtatttacacttaattgcaagcaacgagtacagaaaaactgaaagaaggaatggaagaaaacgccacatccactgctaaaaccttgggtcagaacacgtccgcgaggctttccagggccaaagccttacttaaatctaccacggttgtcgcttcccctccagtccctcacttttcatcccactcactgacaaagaaaagagggggttcaggccgcggtaatataacccagcctggcggtgggtctgaagggacagaagagaaaggttcgcgacccgcccacacccttctctaggtagaagtgacaaccaaggaaggatatgaggagtcggggcaggacggacggcagttcccggcggcatagctcctctggccagctacttaattcttccaggggaaccgcgctagctgggaccgcaccttcctgagacatactttcgtcaaacaggagagcttcaaaccagacccgccaaagcccagaccggaaactcgcagtcccgccaacccttgcgcgctctccgccggctccaaaaccatagagaggagggcggctggtttcttggtgagcccgggtccctcaaggccggaaagaaagtcgggcttctctagcccctggaggactcgactcactggtgcgcgatttaggtccggaggaggcgttgtgaggtgagctttttcagaagcgcgatcccaggacacgtcgggaagcaagcatccccaggtctggatcactgtaaacattacattcaaatggggaggtgagggccagaagtccccacttctggggtcggatttgttccgggacctgcagccggaagtgactccaagccttgcagcgtgatgggagaggaaagaggcgcgttcctagccgcgggactgggtgacccgcctctcccccaaattgtaaatcttgtataaagggaacaaagatcccacttgccagaactgtgaaaattgaggcagatggtatagtgtctagcgcagtagatagaagattctcaataaagttgcttcttatttctacaggtctctccaaactactgcag

SEQ ID NO: 3236 - DNA, 2300 bp, Homo sapien
gcaacataatgtgtagaagtggaaaatatacaaagcaaacaagagcatttcttttaatggtaatgtgctttttagaaaactgaacaggccaatgtgatacaagtgtaagactgcgtttgggggaactgcctaagattgaaggctctgaaaaagcccctctaaggaagtgacatttgggccaagacataaacatgaaatatgcaaaaggctgagagaacaaatcaggctgagcaaaaagatcttgaggtaggtgagcctaatgtattcatgaacagagtgtagttaattaactaggtatgagagaagggcaaggcttagatcacctggaaccttgaaggtaaagtggtttaaaaagggaaatgacgagatctatgtttttcccctcttaacttttttggaataatgaattatgagtagaaacaaggaaactattaatactccaagtgagaggtgataagggtttggaatcagagtggtagcaatgaggatggagataaacggattgattcaagacatagtttggaatcagaaacaatagaacttactgatcgggtgtgtgagacagagaggattcaaggtttcagtttgtgaaaccatttactcagatgaagaaaactagaggaagtttgggcttttttgaatatgtcgtttgaagtgcaaagctaggtgggaatgttgactttcaacttaatgaagtctctctataagcttgtggggaagaagaggaatcacgttccgtgtctctgttctcccaaagcctaacaccatgtctcacacacattatgcacgcagtttaagtgtttttgaatgttttgagggtggctatttgttttcaagttgaaactccttgaagacggcagttctgtacctacacaaaaactaaaaaagggggctttggcaccttctgagattttgctaatgcctaggtgaatgacttctatgtgattacatagggctttagctgcacaatatttgtgcagtattgagattctctcaagtgaaggttactttttttcttttgagtgtaattgtataaagctgggctcaaatgttgtgaaaaagatacatatacatatggtttaccatgaaaggctaggattccaggcacatttacaaccacaaaggcatgagaccaatcaagaatgtgctgcacccggacgaagaaggcgctaagcgcctcaaatccaacagttgaaagccaacaacaagcggaagaactctttcagaaagactccagcctgggtgagaggagtgagaacttgtcaaaaaaaaagaaagaaagaagaaaaagaggtctgagaggggaaggaggaaaatcatttttatttactgaacatcttttaaagatttcacaccacagaactatgccctttaattcttataacgctaagaaagcccttattcatattcaccaccctttttacgggagacaaaagctcagagtatctcgctttacctcaaactattaagagccagagctatcgtcataccgcaggtctcagtccttgcctcccccattatccactagcaaaagtatttacacttaattgcaagcaacgagtacagaaaaactgaaagaaggaatggaagaaaacgccacatccactgctaaaaccttgggtcagaacacgtccgcgaggctttccagggccaaagccttacttaaatctaccacggttgtcgcttcccctccagtccctcacttttcatcccactcactgacaaagaaaagagggggttcaggccgcggtaatataacccagcctggcggtgggtctgaagggacagaagagaaaggttcgcgacccgcccacacccttctctaggtagaagtgacaaccaaggaaggatatgaggagtcggggcaggacggacggcagttcccggcggcatagctcctctggccagctacttaattcttccaggggaaccgcgctagctgggaccgcaccttcctgagacatactttcgtcaaacaggagagcttcaaaccagacccgccaaagcccagaccggaaactcgcagtcccgccaacccttgcgcgctctccgccggctccaaaaccatagagaggagggcggctggtttcttggtgagcccgggtccctcaaggccggaaagaaagtcgggcttctctagcccctggaggactcgactcactggtgcgcgatttaggtccggaggaggcgttgtgaggtgagctttttcagaagcgcgatcccaggacacgtcgggaagcaagcatccccaggtctggatcactgtaaacattacattcaaatggggaggtgagggccag

SEQ ID NO: 3237 - DNA, 2300 bp, Homo sapien
cattgcttaaatttcaaaagggttttattttttttttaggtttgttctgagtaatgaataccctattactatgatactagtatcttccttaattatcctactcattgtctcaacattctgacagttggattgagcatattcgtaagtaaaattgttttaactgtatgatgtactttgatgttaaggtccgagtccccacatacctcggtagatgtgttcttacagttttgtattcccttgaaatgtaactgttctctatgttacagcctttataaccttcagttacttgaaatgaacaaattcattcaaattccagcacttaaaagttttaaattacattttggataaataccaaagtgttttgttgatgatgtatgtataaacaaattgtaaatattaaacgttagttgttacgattagacctatataaaacatgatatgcagtctactgaatagctatcagcctctaacatgtttagtgtcatttagaaaatgctttctaaattgccaaaagctgattgtctaggtgataacaaatttaccatttggaggaagttgactttctcattttcatgtcttcatcagtcttacttgatgagattcattcttctagtcagaagagagtttagactgctcagtttactcatattttgagttagcttttctatttagagttcacttggttgtggaatattcatttataatttgaatctacgttgtgtaatgggacctaatttttttttcctttgtttttgttggagtctcgttttgtcacccaggttggagtgcagtggcgtgatctttgctcactgcaacctccaccttccaggttcaggtgattctcctgcctcagtctcccaagtagctgggattacaggcatgcttcaccacgcctggctaatttttgtatttttagtagagatggggtttcaccatgttggccaggctggtctcaaaactcctgagctcaagtgatcctcctgccttggcctccataagtgctgggattacaggcgtgagccgctgagcctggccccagagtttgttttgttttgttttcaagacaagatctcactctattgcccaggctggagagcagtagtgcgatcatagctcactgcagcctgaactcctgggttcaagctattctcctgcctccatcttctaaagtgctgtgattacaggtctgagccatgatgcttggcctgtgtttttgtttgtttgttttgggggacagggtcttgctttgtcaccaaaactggagtgtagtggtgcgaacatagctagctcactgcagcctccatctcccacgctcaagcaatcctctcacctcagccttccaagtagctgagaccgcaggtgcgtgctaccatgcgtggctaattttctatttatatatttattttttggtagacatgaggtcttgtcatgtttcccaggtggtctttaactcctgggctcagacagtcctcccgcctcagccacccaaagtgttgggattacaggcgtgagccaccatgcgtggcataattttttttaagtaaattatttttttatcttgagtatagaagtgattcatgttcattgtggaaaatatgaaacatatagaaaaacagaaaagattacaaaacatctaatctgaaatggttaagattttgatgagaacagtctcatctcatttccgtatattcctgccagcctatccatcattcttcgtacatgtttatctacattaaaattggtgttatattttggaaactttttgtttaactacattgtgaacatttttcatgttttaaaatgtcattttaatgatggcagatcctattcaatagatgtacacacacctatttaactggtccacaattgttggatatgtaggtcgtttcctttctctctttttttttttttttggctactacttaatagtttctctgtatagaatgtggtattttgaaagtgtatcaagctttagattggtagtattcttgcatttaataaagggcagtggcctttgttgactgacatgacaatatttttataaaatttgttatttgctttacagaaattttgaaaattattgtagaaatgtttttacctcatatgaaccacctgacattggaacagactttcttttcacaagtgttaccaaaggtataatactattacctgaaaatacatgttataaggaatctagcctcagtcttagatgatttattattaattatggctctctttttctaatatatcaaatatattcaaaataaaaataaggagtaagtagatctcatgtgagacta

SEQ ID NO: 3238 - DNA, 2300 bp, Homo sapien
cccaacaaaatctgttccttttgtaacttctttatttcagtttaagtggcagttcttcaaattgatcaggccaaaaaaccttgccctattaacatgttctgtcaatgttaccttcagtgcacacacgcacacgtacacgcacttctcatcacctgaactgctaccatctgatctgaccccctattattttcttgcctggattttgcaaaaaactttctatctttgcctcgcgctagtttgttctccacaaagtagccaaagtaaatgataaaatacataaatcagatgatgtgacttctctgctcaacccctcaaaatgactttcatcaatggaacttcttgtctttctttccttgttttatttttcttctttacagcattgaattaacctctgctatattatgtatttacttgtacacttgtctgttaactgtcccctttcattagaattgtaaactataaagacagtgactttgtatattctctttattactgtatcacccactcgtggaacagtgcatggcatgtatacataggcacttagtaaacatatgtcaaattaatttaaaaatagttgattgaaaaaataaattcttgcaatgatgctcagtagatgtaattcaagtctgtggaatttcattactatgttttatttgtatatgtcttttatttatttataatttaatcctcacagtaactcagaatcaatgtcacaaatgatgaaactgagtctcagggagggcaaatgaatgaaccaaagtcatgtaactaattgacagattggtgctttttccatcactctacaaaaacctcaagtgtttatcttaagtgcatactttaaaatgctgttatcctctgctagacagagttttctcatgtattgtcaagtttacaattaatgtggcaaaaaatatagaatacatatcttagttcacataagttttgattgaagttcagtttaaaatccagttactgagacattttcatgaaataatctttccattcttcagtgttagtatacagtttatttcttgtaaagctcttgcttctgagaaactgagtattaattcatagtaaattcagcattctgcctattttaaaacaactttttttttcttttttgagatggagtttcgctcttgctgtctaggctggagtgcaatggcgaaatctcggctcactgcaacctccacctcccaggttcaagcaattctcctgactccgcctcccaagtagctgggattacaggcatgtgccaccatgcttggctaattttgtatttttagtagagacgaggtttctccatgtttgtcaggctggtcttgaactcccaacctcgcttgcctcggcctcccaaagtgctgggattacaggcgtgagccaccacacccggcattttttttttttttttctgagatagagtttcactctgccgcccaggctggagtgcagtggcgcagtcttggctcacagcaacctctgccttctggtttcaagtgattctcctgcctcagcctcccgagtagctgggattacaggcatgcaccaccacaaccagctaatttttgtatttttagtagagacggggtttcaccatgttggcaaggctggtcttgaactcctgacctcaggtgatccacccgcctcaacctcccaaagtgctgggattacaggcatgagccaccacgctccgcccaaaaacaacttttaatagaaataagctagaatttatcagacatagtcttttcaatatatatttttacttttgatttaagatttagatttttatagtatttttaaggatattgtgaaaatgatatcagtgcctcaaagcaacaaagatttctctaagattatcaacttctcattttatagaattatggctatgtttagtttagagatcttgatccaattctggtatcaattcagtactttgaattttgttttataaaatgcacacttatttttaaaaacttagtttttaatatatttttactaccagaacatcagtttatagtacttactctacctaaaattagaagatagctattaatgaatgagttttttttctctcccttcccagcaagtttcctccaagcctttatgctaccaggatttctaaagcacaccaagaggaaatagcaggtgctttcctagtgacactggatccacttatcagtcagctgctcacatttcagcctttcatgcaggtggttttggacagtaaattaggtaagcttcaaaatagatttaatgataaatcatctattatgacatgttagagacactgatttccccta

SEQ ID NO: 3239 - DNA, 2300 bp, Homo sapien
gaagaggtggcaagatcaagtgctaagcataatcctccctactcagcaggaggttgtgacaatctggccagcactctatctccagaacagagggattagcattgttgcttttacccatggtcccacataaactttttatttgtagtcccagtagaaaggtgaatgttaccatagttgccatacttggcatttcttttagtactgttttttgcttctctgtcatttttaagaaagatacattgccaggtaggtaggaattcagtgaatttgttacaaagcagatttagttcttattctcagcaacatttttagattttgaaaatcttcaattttagatagctttagcctttatacatgtgtttcttatataacgatggttgtggatcggtaggcactttaaattttgttctaggcatgtgttttgagcagcattacatacccagtgtagaaggtgttgtatggaatttcaccgaagtggggaaaaattccaagtagagggtcaatgtgtaatgattattgagtttatatttgtccaaagaatacagattttaaacaaatttttaaaggcctacatagaattattggccgtatttgtagcagtttgctttctacattgccagagttagtaagaactctattttctaatttttatattatggtaaagccaccactgaaaactgactgccacagatttttcagacatacgttgtttggcctatataggtttagaaaacatttgattcaacattgaaaaatatggagatttccacaaaactattcaggctcttggttcctcacgataagtggcatgatctgacagttctgaaactgcagtcctggttggaactctgtgatagccactgtcttcagaatgcaagcctctcacagtaggtcccatgcacgcacagtaggtccctctgccaggctgccagtactgctggggcactgcacattacctgttgtcaccctgtgagtttgtatccctgttgtcaagaaagctgttcatattgtagaagatttggaaggtgcaggcaagtgtgtgtgtataaaattacctataatctgaccttccactggaaacctctgttaatacttcaacatatatttttcaagtctgtgtgtatgtatacatatatttcttttcaaaacaactttgaggcgtaattgatacagaataaatgaaaaaagtgtacagttttatgttttgacataatcacccgttaccatcatcatcatcaagataatgaatatatccatcctcccaaaagttcctcatacatcatgataatcctttcctctcccttgatccctctaactgtgccccttcactaggtgagcactgaagtattttgtcatagttgcatttgaattctgtgtatgtgtgggcttttgtttttttttagcaattgagattatttgagattcagttttgcggtttcccctttttacttaggatagctttgaagagtagtgcgatcgtactttttcttatgtttatcgtcatttgtgtttcttcaatgagttgtctgttttctttcccattattgtactggtgttttagtgttttacttggtttatatgagctcttcatttgttaatatgtttttcatcatattaacaatgtttttcaacatattaatattaaaaccatgattttcctcattataagtattctccaatttgtattgttttcctttataattttaagttattttctacatacagaagttttattgtttttgagtaatatttttacaacattttcctttgtgagtgaggatatacaagtgagttaggaagtatgaattaccttattctatttttgattgcctttccactctgaaagtttgtatgtggtggagtttggggagggacagtaactacctgtgactatttagtaatgtgcattttctctagagctgttagttgttaattaacaaccattgctggtaacttgcagagcgtttaccatttttactgtcaaatgtcctagttatgaggatcaaagaaactagtagtttggggtggctatgtctggatatctcttgttgatgttgcagatagggatttaatgtttgaaattgttttctgttttcttttagatctgcttggctttgaggaagagtggcagtactgcctcactgcataagggatgggatcagagaacagtgctttaaagagctatacactgagagaaccaccatttaccttaccctctggacttgctgtttatcccgctgtactgcaagatggcaaatttgcttcagtttttgtgtataagagagaaaatgaagacaagg

SEQ ID NO: 3240 - DNA, 2300 bp, Homo sapien
gttcaccttgccgtctgcctagatagagccaatttatcaagacggggaattgcaatagacaaagaattcatgcagagctggctgtgtggggggccagagttttattattactcaaatcagtctcctccagcagtcgagtttttaaagacaatttggtgggtggggaggggcagtaagtcagggagtgctgattggttgggtcggagatgaaactatggggcatcactgtcttcttgaactgagtcagttctgggtgggggtcacaagatcagatgggccagtttatcatctgggtgttgccagctgatccatcaagtgcagggtctgcaaaacatctgaagcactgatctcaggagcagtttagggagggtcagaatcttgtggcctccagctgcatgactcccaaaccataatttctaatcttgtggctaatgttggtagtctagaccccaggcaagaaggaggttggttttgggaaagggcttttattgtttttgttttaaactgtaaattataaactaatttccttccaaagttagttcagcctatgcccaggaatgaacaaggatagcatggaggttaaggacaagatggagttggttaaattggatctctttaactgccttagtcataattttgcaaaggcagtttcattgctacctgaatgattttcctaacttatccatcaatctcctggaagcctttctccttaaccaatgtcttcaactctgccagacatgtggcagcttcttcatcagcagatgtggcctctccagttatttttatgtttttcagtccaaacctattcctgaatctgtgtagccatcccttacttgcagtaaatagcttggtgtgcctaatttcaggggatccctttcttaagtcttcctataggctcaacactttctggcaaaacttactgcggtcagctgaaatacgttttctgttcatgtctcccacccacaaatgtaatgccttttccgtcttttgctgttgcacctcaaactacaaaagttacagccacagtgcatgataggtgcttagttaactagcacgaatctttttccttcttcacaatttcatggataatttgttcttatcatagattttggcaacctcagcatatgactctttttctttccttattaagtccagagctttcaccttttcatttaaaggaagcactttacagcttctcctcggcatatccaaattgtcagcacaattcctgtgctttgcggccattattaagtaaaataagggttacctgaacataagcaggtggtatctctcattatctctgctatactacgggtgcatctgttaaccaaagcagctactgagtgggtaatgagtggatactgtacacagcgcggctacctgcgacagatgattcgcgtcaagggtgggacagagtggatggcccgagatttaatcgggctactcagaatacaggcggtttgaaacttaagaattgtttatttctggagttttccatttaacatttctgaaccaaggtttgaccacaggtaactgacactgcagaaagcatggaggggggcaaaactactgcattaatattaaaattttcaaatattactttttgctaaatgaaatgtgattcaggaccttccctctcaaagatcaagcgagatcaccacgacctccgccagcagcggctctgcacgactccaccctcgcagcccagccaatcaaagctacaggttgagtgacgtcactctcctgaaagtcctcgctaattcccgtactccttttctccgccctgcacctctactgtttgctacaagtggccagcagccattttggatttgggcggaaatgaaattaaaactgtgctgttaaaagcctaaaaattcaagtcaagacaaacttaagcattcgaccaacacatctagaaagggggcatcttcgtggactaactagaccactggggcagtgagtgaaactcggtatcgtcgcggcgcccacacttaagatggcaccggcctgagactcagctgtgcggcctctctacctcggttcctggttagttggcctcattggtggcgtcggagggaggaaggtgggccttctgtcccgtttccggacccgtctctatggtgtaggagaaacccggcccccagaagattgtgggtgtagtggccacagccttacaggcaggcaggggtggttggtgtcaacaggggggccaacagggtaccagagccaagaccctcggcctcctcccccgccgccttcctgcaggtaacagggagccctgcgctgcgcccccagtcctt

SEQ ID NO: 3241 - DNA, 2300 bp, Homo sapien
gcatatctgcaaagtatatgtggggtataggggtcaaggggatgaagcaagcagcttgtacctgatggttcgatagggaggtggtcaccagaggcggtcatacaaggcagatgtctggactgaccacatagaggaagtgggaggaggcacagaactagagactgtccagggtgactaagccctgcttctagtttgagaaggttaaacctgtcctcagaatggatagtgaggcctttgatatgttctcccacctcttcatcaagcatattgacaaatcctttttcaccaacttgtcttgctataaccgcccagtaggttcaccttgccgtctgcctagatagagccaatttatcaagacggggaattgcaatagacaaagaattcatgcagagctggctgtgtggggggccagagttttattattactcaaatcagtctcctccagcagtcgagtttttaaagacaatttggtgggtggggaggggcagtaagtcagggagtgctgattggttgggtcggagatgaaactatggggcatcactgtcttcttgaactgagtcagttctgggtgggggtcacaagatcagatgggccagtttatcatctgggtgttgccagctgatccatcaagtgcagggtctgcaaaacatctgaagcactgatctcaggagcagtttagggagggtcagaatcttgtggcctccagctgcatgactcccaaaccataatttctaatcttgtggctaatgttggtagtctagaccccaggcaagaaggaggttggttttgggaaagggcttttattgtttttgttttaaactgtaaattataaactaatttccttccaaagttagttcagcctatgcccaggaatgaacaaggatagcatggaggttaaggacaagatggagttggttaaattggatctctttaactgccttagtcataattttgcaaaggcagtttcattgctacctgaatgattttcctaacttatccatcaatctcctggaagcctttctccttaaccaatgtcttcaactctgccagacatgtggcagcttcttcatcagcagatgtggcctctccagttatttttatgtttttcagtccaaacctattcctgaatctgtgtagccatcccttacttgcagtaaatagcttggtgtgcctaatttcaggggatccctttcttaagtcttcctataggctcaacactttctggcaaaacttactgcggtcagctgaaatacgttttctgttcatgtctcccacccacaaatgtaatgccttttccgtcttttgctgttgcacctcaaactacaaaagttacagccacagtgcatgataggtgcttagttaactagcacgaatctttttccttcttcacaatttcatggataatttgttcttatcatagattttggcaacctcagcatatgactctttttctttccttattaagtccagagctttcaccttttcatttaaaggaagcactttacagcttctcctcggcatatccaaattgtcagcacaattcctgtgctttgcggccattattaagtaaaataagggttacctgaacataagcaggtggtatctctcattatctctgctatactacgggtgcatctgttaaccaaagcagctactgagtgggtaatgagtggatactgtacacagcgcggctacctgcgacagatgattcgcgtcaagggtgggacagagtggatggcccgagatttaatcgggctactcagaatacaggcggtttgaaacttaagaattgtttatttctggagttttccatttaacatttctgaaccaaggtttgaccacaggtaactgacactgcagaaagcatggaggggggcaaaactactgcattaatattaaaattttcaaatattactttttgctaaatgaaatgtgattcaggaccttccctctcaaagatcaagcgagatcaccacgacctccgccagcagcggctctgcacgactccaccctcgcagcccagccaatcaaagctacaggttgagtgacgtcactctcctgaaagtcctcgctaattcccgtactccttttctccgccctgcacctctactgtttgctacaagtggccagcagccattttggatttgggcggaaatgaaattaaaactgtgctgttaaaagcctaaaaattcaagtcaagacaaacttaagcattcgaccaacacatctagaaagggggcatcttcgtggactaactagaccactggggcagtgagtgaaactcggtatcgtcgcggcgc

SEQ ID NO: 3242 - DNA, 2300 bp, Homo sapien
ctttccctaattactaatgacattgagcttttcatgtgcttcttggccatttgtctttattctttgggaaaaggagttctttgtaatagaaccttgtcagatacatgatttacagatactttgtcccattctgtgggttttctttgcactatcttggtatgtaaaactttcatatgcaaacatttttaattttggtgaagtctaatttattcttttgttgctcatgcttttggcatcgttatttaagaaaccactgctaaatccaaggtcatgaaggtttgtccctctgttttcttctaagagttttacagttttagcttttacatttaatatccttgatccatctcgagttagttattgtctatggtatatggcaagggtccatcttcattcttttatatgtgactatctagttgttctgacatcatttgtcagaacaaatgtcagaaaagaacaattgactgttcttttcctccatgaatggtttgggcaatttttttgaaaattaaatgaccaaaaatgttggggtttattcctgcactctcaattatatttcattgatctatctgtccgtgtgctagtacctcactgttttgattactgaagctttgtagtgagttttgaaatccagaagtgtgagtcctccaactttgttgttctttttcaaggttgtttcagctatttagggttccttatatttccatttgaattttagggttggctttttcatttctgcaaaaaaagctattgaaactttgggaatataatgaatctatagatcactttggggaatattgccatcttaacaatattaagtccttcagtccatgaacatgtgatttcttttcatttagttcatattaatttctttcagcaactttttgttttcagtatacagttgttccttggttacgtttactcctgagtattttattctttttgatgctattggaaatgaagttttctaaatttccttttcatatttttcagctccaatatgtagaaaaacagtggatttttttggtgtgttctgatctattctccaactttgctgaatttattagctctagccagttttttgtgccatttttagaattttctatatataagattatgtcttctgcagatagaaataattttacttcttctttttcaatctggatgcctttttatttttttttcccatgcctcattgctctggctagaatttccagtactatgttgaatagaagtcaggaaagtggataaacattcttgtcttgttcctgatcttagggggaaagctttcattctttcaccattgagtatgatattggctgtagatttttcatatatgccctttattatgttaagggacttttcttctattcctaatttatcaagtacttttatcatgaaaagatgttgggttttgtcagatgcttttttctgcatcgattgagataatcatgtactttttttcttcattccattaatgtggtgtattgtattgaaatgcccatgtggccatgttgcgtggtccttttaatatactcctgtattctgtttgctagtattttgaggattttcacatcgacattcataaagggtattggtctaaaggttttcctgtagtgtctttgtcttgctttggtatcagggtaatggtggcctcatggaatgaattaggaagtgtttcctctactgttatatcttttggaagagtttgaggggtatttatgttaatttgtctttaaatgcttggtagaattcaccagtgaagccatctggtactggacttgttgaaaggtttatgattactgattcaatcaccttacttctaattctgttcagattttctgtgtcttttgagtcagttttggtagtttgtgtgtttctaggaattattctttttcatgtaggttatccaatttgttggtgttcatattattctcttgtaattttttaatcatcaaaagagcagcagtaatgtcccactttcatttctgattttagtaatttgagtctcttcttttcttttttagtcagtctaactaaaagttttccaaaaatgtttgttgatcttttcaaagaactaacctttggtttcattttctctattctttttctagtctctgttgctgctttttattatttccttctgctagcttggggttttgtttgctcttctttttctagccccttaaggtgtaaaattaggttattaattcaaaatcttttatttatttttttaaatagagcgtcagtatagagtgtcttattgtggatctgtttgagtttatctttgaatttcattgagc

SEQ ID NO: 3243 - DNA, 2300 bp, Homo sapien
agaaatatgcggggtaaaactttgcctcactttaaattattttaaagtaaattaatagggcttatttgaatccattgtttattggtgcttgcaaaatagtaactatcattatttttctccattcctaccaggtattttctgttaagaagagcttttccttgttaaaaggaggtgaaatctggtttatttccaaaagcattagattaaatccttctttcttttaattaccagctttcagagtaaagatctgatgcagtagttgcctccagtggaagtggggttcttttttccctgtttttctatgttgttgagtatcattatggatttcttttttttatttatttaatgtcttaaatcaatcccagtaattccatttgattcccaaattgcctcaaattcaccagtgtcctttttacataatcttatcttcttagtctctgactatgtccttactgtcaagcataaaatgttccaggctcatcttgtacttttcctgccacagacagacagtttatctagttcagtcccagtttcagctatctatttattgctctggtttccagctctctctttctttctggcctctgggcattttctttaggtttttttgttgttgttgttgctattgttttttcaagctcaggtttgcattttttcaacaccaaaatttttattcagtgacaactatgggctgaatgcaaaagtgaacgaaataagttctctgagctcaaggagctaacttacattccaaaaatccttgttatattatctatgcattttaatgtatattttggtcttccaattttacgtattgtgaagattttaaagtaatctagcctgctatattaccattaaaggtgttataaatgataatttgtaaaattttacattagtttgcagaattaatatttagaaaaacaaaaaataggaagtccaatgaggaaggaattgcagtactctaggtataaagtgattagactattggtagaagtaagaatgtagaaaaaaactggactacctgaatatcttgaaggaagaaaagatagaattttgtaacactttagtaagagggcatgatacagaggaaggagtcaaaattagctgcaaattttcttccctttcagaatgaaagaatgactataacatctacagaaatagtgtagctggtgtgaatgggtgggaagataaaaatatattttgttgggtaaggactgtatttctatatttaatataccatgcagtgccttaacatggtgttttacacataacggataatcaataattgcatcaatgtactacatttgaaaaaagcagcagagcaactacgtgcacgtctcaaagcaactgggaaaacaggactagaagacagtgaataagtgacaagattataggtgagcagggggagtagaggtgctttctttgcatccctagagcctggtttggtgtttggcacacagccagccctcaattcacatttaccaaataaatgaacctatatcatttgcatagacataatagctgaacccatgggaatagatcttaaaccagagaacatgcagttaaaaaagaacccttctttcctatgccctgcactgctaacaattgcctgcctcagaagaagcaattctaaacataccttgagttcaggataattggtggagttggaatttcaggaactgttttttgttgctgttgtttgtttgtttgtttgtttgttttggttgggggaggtgtattctagatttaagacatcaaagtgacagacttgccgccttcaaagttatatccattttgtacaacggtcagattatctccataagttagagcttgtaagtgcaatcagggccattcaggcccccaaatagaaacctcccttattagctggactgctgtatagcattcgctaactaaaaggttatcggattcccctctctcctttcaagctgacctgacagccctttctattcccatcctcaagggggcggtgactacggagccactccttatacacggacgctcaaaactgcaccaaaacttccctgctcggctccccggtgcgtcaaactctgaggccaccgcctcagactgagcctgcgcatacaagaggtgcagagcaagcgcatgcgtcgtgacggcccggcttaggcgactctgggcgggtctgggccgctccagtgttttggggcacagaagctgtgggaggagctggaggcttcaccgtggtaaccacagcgccgctgctgccccgccttgcaggcctcaggactgtcatcgcctctgggtgtgagggtactttggcc

SEQ ID NO: 3244 - DNA, 2300 bp, Homo sapien
ccacaatttcagatcctgttattggtctattcagagattcaacttcttcctggtttagtcttgggagagtgtatgtgttgaggaatttttccatttattctagattttctagtttatttgcgtagaggtgtttgtagtattctctgatggtagtttgtatttctgtgggatcggtggtgatatcccctttatcattttttattgtgtctatttgattcttctctctttttttctttattagtcttgctagcggtctattttgttgatcctttcaaaaaaccagctcctggattcattaattttttggagggttttttgtgtctctatttccttcagttctgctctaattttagttatttcttgccttgtgctagcttttgaatgtgtttgctcttgcttttctagttcttttaattgtgatgttagggtgtcaattttggatctttcctgctttctcttgtgggcatttagtgctataaatttccctctacacactgctttgaatgtgtcccagagattctggtatgttgtgtctttgttctcattggtttcaaagaacatctttatttctgccttcatttcgttatgtacccagtagtcattcaggagcaggttgttcagtttccatgtagtggagtggttttgagtgagtttcttaatcctgagttctagtttgattgcactgtggtctgagagatagtttgttataatttctgttcttttacatttgctgaggagagctttacttccaactatgtggtcaattttggaataggtgtggtgtggtgctgaaaaaaatgtatattctgttgatttggggtggagagttctgtagatgtctattaggtttgcttggtgcagagctgagttcaattcctgggtatccttgctgattttctctctcgttgatctgtctaatgttgacagtggggtgttaaagtctcccattattaatgcgtgggagtctaagtctctttgtaggtcactcaggacttgctttatgaatctgggtgctcctgtattggatgcatatatatttaggatagttagctcttcttgttgcattgatccctttaccattatgtaatgcccttctttgtctcttttgatctttgttggtttaaagtctgttttgtcagagactaggattacaacccctgctttttttgctttccattttcttggtaaatattcctccatccctttgttttgagcctaaatgtgtctttgcatgtgagatgggtctcctgaatatagcacactgatgggtcttgacaccttatccaatttgccagtctgtgtcttttaattgaggcatttagcccatttacatttaaggttaatattgttatctgtgaatttgatcctgtcattatgacgctagctggttatttcatgtgttaaaagctgctttaaattttgtatttttactttttactgatacataatattttatattttaagggaggtggatgtgatattttgttacatgcataggttgtataatgatcaagtcgggatagttgaggtatttatcactttgattatttattatttctatgtgttgggaataattcaagctactcttttctagctattttgaaatacataatacactgttgtaactatagtcactctactctgctgttgaacaatagaagttgtaccttttatctaactgtatgtttgtacctgttaacctacctctcttcatccctgcttcacccacccacccttctcagcctctagtatctatcatctgtttttaaaagtcctgcccattttttctttctctcctacccctttttccttccttctttccatcaataaagatgtaataagtatcttctctctggtagatactgtaccagatgcttccatatttgttttcatcagcccaggtgtttttggtttgttttgttttcctattaaagcttcactgtcaatgatgatggcaaagagccctgaataaagcaccataacagtcgtttcatgaagttctcttataaaggctcacactttataagaaaagtactattgcaacgcttcttgggggattctccaagtattctttgaggccttcatgatctcccttttcagtgcaccaagtcccctccaaggagagaccctgggtaatgatgatctttggtgtcaactaagattcttaagaactggatcctcgtgattcctatgtgacctgaaggtaagccagcaactcaatttatctcatatttggtttcttaaactaatactttatgaatacttgccacatgctgcaaaataaataaagcacatatatg

SEQ ID NO: 3245 - DNA, 2300 bp, Homo sapien
agtacttaaagcttagcctcagttacctcatatgtgaaatgtgtctagtaatgcctttttttttttttaatggaatcttgctctgtcacccaggctagagtgcagtggcacaatctcggctcactgtaacctccgcctcctgggttcaagcgattctcctgcctcagcctcccaggtagcttggattacaggcatgtgccaccatacctggctatttttgtatttttagtagaggtggggtttcaccgtgttgggcagtctggtctcgaactcctgacctcaggttatccgcccgccttggcctcccgaagtactggaattacaggtctgagccactgcgcctggccagtaatgcctaattctatagaactttttgaataagtacaaaaaggtcctcacatatttcatttccttgtatcttaattaaacactattgcctaccagaaacatagaaacattcaatattctgatgttcttggacctagactgtccgggtaacttaaagtctgttctccctcttccaaaagaagttaccgccttctcagtaaggatggcctgacaggggccttggtgatagccagacttcatcactgagtattttcagagagaccacagagtcaactgttcaggaaactataagaaaggatgccatctctatgtagaaagctaactcagatgatctcattcattcaacagatagttttggagtacttactgtatgcctgtcaactgtgccagatgctatgaagattacaaactagtgaatgacaaagattttaaagttaaattaatacaaaattacaactaaataaagtattatgaaggaaagaaataagagctgagatcctgagttcttttccaaatctaacctatatgattcaatgtctacattttcatgaaagtagaacattgacccacaaattgcaaatggaaattccaacatcctttgtaaatgtgttcaactctacttatttaatcttttgttctattcttcctgatagcccatctagtcaaagtcttcctctggtggcacaatcagcatcccggcgtctacgcagatgttgtttcttttacctggagcttactccattccacaacctaaaatgttgttcatcacccagagcctagttcccccacttgtaaaatgagctggtgagactaaatggtctttaaaatttcttagttctagaatactttggttcatttaaccttgccagtgaaggaagagggaagattttgttcccttcatttttacttctaaattgcattttctgtgcttggtcatcatgatgtattgtttttagcttttcctcgtatcagaactccaaacagaagaagctggaatgtagggcatgcattacatgaaaagtgaaatgttttgaaagggctttgaagtgttgaataggaatattgtattaagaacattccactaaatggaagaaacctggaaactggacaagctgtggatgtgcagatggtattactaaccatcagtcaaatagagaacacaggctatttgtatagatcgatatgtcatgtgtctctatacattgggaggtaccaagaagttgtcagcagttgttatttctgtatgtattgcctccaaggagaataatcaaattgcctgtgttatacagcctagaaatttcagtttagtctgtaccaatatgaatgaatctatttaagatgtcttgtatgagaaaggatgcttttataaatgcaaacggacataaatgggtttgtttgtggatgggtcagtgaggggaggtgggagcagagaggaagatcccctagcttaatagttctttaaaaaatcttctttattctaatattagacagtctacgaactataattatccagtgtgctccatatcaccccacgacattttacgattagaatgtgggtgaattgctctgcctcagccaacactaatattaaagaacagcagagagtcctttaggtaagtctaagcatgaatcagtcagctattggagtatttcagaggggtgttatttctcagagataagggaacaaagaggtcttaatatccggctcagccaaggcaggaaattgcctacttcctgagccagtgtggtagaggctgtgggatgggagccagatatattggagggaggaggcaagtaagtgctggagacctcaggattttattgtagggcacatggactttgtatgagaatgtcaaaaactcattttgtctttagcacaggaagatgcttggcaaagagttaatgacactaaagaattcttacaaatgttatggatgggtgttaattttcac

SEQ ID NO: 3246 - DNA, 2300 bp, Homo sapien
gcaagggagaacccactcctggaagcccttttataaaggcattaaacccgcccatgcagatggagcccttgtgacataatcgcctcttaaaggctgtaccttccaaaaccattttgttggcaattaaattttaacatgtgttttggaagggacaaacagtcaaatcatagcttctggctcatgtagtttcctcacttatatgtgctgatcaccttgagggagactgtctgctggtctccatgattcttcttctatgcagctcactcctttctgatacctcgtcatacaaattctagtttccttgctcttcttgcagtctgagcttcacctcctcaagtaggagtcctctaggatttgtccagtccctcccctgccacatgctgtggcctgaggactctcaaggcagtcaactggggaaatcataggtcttgcctcaatttttttctcatctcttagagatcactgtccttggttgcctgatatcctgtctcttgaaaactattgttattctatttatttgtttattttgggtttagaaggaaacataaattaagtccctgttacttactctgtttttgtcaaaagggcaagtcccagcaaagtttcaactattattccattttgtagatgaggaaactgaggcaccaagagattaagttagttgtccaagctttcacagcttgttagtcatagagctagaattcaaatattagctcttgaatacttgagcagtataacttcagaatttacaattttaactactactatctactttcatattacttctaagcttgctaagaactgggcaaacatttcattaaatgtttatgtagctcatatgagcagaatgtggatgactaatggtccttaactccacatccccatgatatttgcattttcaaaagaatatgcttatttattcagtatgcttgtttatcacatactattaaatatatgatagaaatatgtattctaacaaagaaaaatgagaaatatttatgaagtgtagcagaagctgtttttagttattaactcttccagtttccctctaccttggaattttctggcttggttttcctaagttattcttaatttttgccaatttctcttaatccattctcagactattaccaatggattaaaagtttcccttttttaaacctttgtatccattcatcaaagactgggaaaatggtggttatttgtatgtaaatcacttaaaaatgaagagctacaagtaatttaacagcttgcattttcctttgggaagcattcagagatcttttccaatagctttcggattccaatttgttcttttttgttagaacttttgtctgtccctgagtgcataactattaggtaggcaggagagatatgtgggaaagtacttttttttttttttttttttttactgctgcattacaggtaactagaaacagtgctggagatggtggctgaatattgttgaatgaatgagtggatggatggatgaatcaagctggtggccagctagaggagcctaagggagactagactagactgggcaaacatacgctgtagacagcatattcagactgaagtgaatacccagcacccaggcaattgagtcttgactatattgtgttctggctttgggatatggttatgttctacttacatttgaatacagttgcattttgatttcatctaaaataaggaaatcatactgatgactcagaagatacaagaaaattgagtttctcctgtcttttacttatgctgtcttcactggaacattttaaatatgtatttcaatgaagaggcaattccatttaagtgaactagtatttcaagcatttttaaaaaacaaaaacacataaaaagcattaactagaactgccaggcaaaatagccctcctgtttaatagtttccatcagtcctcagtttaattaccacattattctgccagctttctccagaaataattgactgaatgaagtcatttcatttgatatttacaaacactagacttgtaaagggggtatctgtcaattcccccttggcttggaaatgactaaggctgacctggcagtacacaactgctattttgggctcagcatattttcatagtcaccaactcagtaagatgatgggaaagaaagagaggcaggtaaaacttttggcatttgtgctcagttttctaattttgtaatttttgctgtgaaaaaatgagggagtaaaaccctgatttgctctaagacacaaacaggttggaagtgatgtttttgtgtgtggttgttagaatatcctgttaaattct

SEQ ID NO: 3247 - DNA, 2300 bp, Homo sapien
tgaaaaaattaccttaaatctggattaaaacaactgaaactttaggaccaataaaaccaatctgtagagacactttcttaactcaaggaagagaagacttctgcagaacaaagaactttgaagataaattcccacttaaatattacacaacatttgaagaaactagccaccatgagggagagccaacagaaacaacaaacaggagatttagaacctagcaaactggaaattataacttttatacagacggattttattatcttttaccacgtgtcactttcgctttggttctcattaagggccaatgcaaaaccttttaaaatatcctaatttacatctttattaagattacggataatttttgaaattcccccagagtgaactaaagaacatttatgtataaaattcaacatggggcacacaaggtggtttactgttattagatgaactagatggcggttgcctgcaactaggaaactgaattaactaccagattgccactgatccccatctactactttggagctagataatctataacttgaatatacgtagtctatattcagtctatattcagaaactggtggtaactgtctcctccaggcattttgattgtttaatattataaaaaatgagtacatatttaaaatgacgcatctgcagcatccccaaatttcagaaaccactttaagttttaaaagctcggatttacatgggaaattccaaacatccttcactttttatcacttactaaatctgaagtactcatttcaacttttcttgacgtgttttattttgtactttactcctttctttcattttgtttaaaaatatcaacacactaaagccaaagtattttaaaatgtaagccaagatgaggtgttttgttgttcttactgcaaaaatagtgaaagagaaccatgaaaaatagtataactaggtctctcttgaatcatccttatctatgtgtattttgacaacgcttgcatcttttaatctttgcaaccatatttcaaatgaggaaatgggatctcaggttagtgttcaaggcagaacccgaattacggtattaggattccaggcaggatcctaagaaatgctttcccatcccccagcaccgacgttttacaatgtcttctctgaaaaacagatttaaaggggagactaagaaatcccggccgggcgcagtggctcacgcttgtaatcccaacactttggaagcccgaggcgggcggataccctaaggtcaggagttcgagaccagcctggctaacatggtgaaaccccgtgtctactaaaaatacagaaaattagccgggtgtggtggccggcgcctgtaatcccagctactcgggaggctgaggcgggagaatcgcttgaacccgggaggcggaggttgcagtgagccgagatcgtgctattgcactccagcttgtgcaacaagagcgaaactatgtctcaaaaaaaaaaaaaaaaaaaagtaagaaaaaaagaaaaagaaatcccttaagaggaaagttacatattataattattcacaaaggaaacaacccaaagcaaaagaaatctgagagccgctccggcctgcgagagacctggttatgcctgttcccttttcatcaattataccccaccccttttaaatgtttcttcatcatcaaaatcctaaatctgatcatttcctgagttaatctgaaggaggcctccagcgctgtgcacactcccagcaaaacacaaggattttagggcacactaagagccacagagagcaccgctcccgccccacaggtacaggaccccaaaggcacttagatctcccgtttccgccaccgacttgttgctccttcccaaatacctgtttatctccacccttatccccatcgccatttccccccttagctcctgaagcgattaaccagcaacagtgagaaacaatgagagagagagagagtagaggtaagccagaggaaacgaatgtctgcgtggcaaggtttccttaggcagtttgtcaggcactgctgaaggcagcctggaaggaagccggaccctgaggccggggagagagggccttgtgtttggagcccgatgcactgattggccgcggccggggaaaaacccggatgagctgggcagcagtgttggcagtcgcggctgcgagatttgggcacttttgggggtgccggtggcccgggccgatggcgcaaggttgggcaggattctctgaggaggaactgaggagactaaagcagactaaaggttacaagatgggtttacagtggtttaattcttgggtcttaagg

SEQ ID NO: 3248 - DNA, 2300 bp, Homo sapien
ataaaggatatggagtatatatcacaaactggtagcccattagcttaatttaacccaaaaatgtatgtggcttttcagctttgcctcctttctttccccttctttcttttttccctcctttcttcctgcctgccttcctttctttcccttcttccctccctccctctttcattcctttctttcttctttgtctctctttcttttatccaatctttacatttcttttagttaataatggtgataatcattgtgttatttgctaagccagctatacctgttgcctttgtttgggggtaggtccatgtactaggttagccattgcattgtgagcagaagtgttatgtcactactgggtcagcagttaattgctatagcaagaccttcctgacctctctcttctccttgtgttgtggtggccagcaacactgaatactgactgtacagtcagcctagagccttgagagactaatcagcagaacctctctgttagcctttagttggcacttggcattaatgaaaaataaacctttgtggtttaaaaccactaagatttgcccctacagcgtaatctagattttcctgattgaaacagttccctacatttaaaaatcaagatattttacataaaagtctaaattgtaatcataaaaatcaaaatatctggctatggtgacctaaattttttaatgatagcaattgactaaaggtgactcggaatttgccccctttacactagacttacgcttctcagttcaccacagtctccttgatatttgcagcccctaatacagagtgtgggaagcaatatgttctgtgtttaagtggcctgatttgcttattgtttattgtttaaaattagcattttcagtcttataggtaggttctgtaaaaatgcaaaataaaatagaagttactacctgaatttcagaggaactattaataattcagctaatgagttcaacagggagataagcaggctaagtgacattttttgatggtgtgaataaagatcagagccaagaatgtgttcctgttgcaagatacaggatactttgtgtttctggctaaagtcaacaataacatttgcttttgatagtacttcagtcttttaaaaaatattttctgtacatatctcatttaattcttacaccaacttcatgcattaagtagagcaggttaattttcaaccagcttgatagatgaggaaactaaggtattgaataaataattgacttacctgaggtcactgagctgggcagaagcaaagctggaattgtgactctagagcttttaactatactttgggaaattcaaataataagcttgttttgcttcaaaagtcaatatgccaaatttgaaagtcccatttgagttgttcatttacaagaactgataacttcacttcccaggcatttaagagagaatgctatttatagatcttatgaaatatagtatgaatgtgggtcagattctccaattgtctgccctaagatgttaacactggcatggacagtccaaaaagtataatagaagtgttattatttataactttaaagatatttccccccagttgttttatcttctattgctttactgaggctactattaaaatcagtttgaatgcattgattagagcctgactaggcttcggggagtacaaccttggattgttctgtaggatgaaagacaacaatttaaggttaactagcattcctagaaataagagacttcactcaattacatgcctgttatagcatctgaatatgtatcacatatgtaccaaattgccctaaaagctgttaaaatttaagagagggtaatcccatttgaaaatgcaaccaccattttgtttcagtagagcagacagaaccataaatcaaatttaaaaccagataattcagtcacctccctgatttggtcaaaattagttgctttcttttgacaactatgaaatcaagttgaaaaagaaacttcactttgtgacctaaggcctaactcactgatggactttctctgaagataaattaagagatggggcagtttctgttaaatattaacattatgatctgaaaactattgaaactctacaggaagatggctgtttttcccctagactttcaagatagagaatggggtaggagaaccactagaattatcaacgtttaatgttaattttttattttcttagaggaattataattatttgctgcccacacaaaggaattttcctctattttcttttacatagatccatttgaaccacagcgacgtctccccgcgaagaaaagtcgacaacaact

SEQ ID NO: 3249 - DNA, 2300 bp, Homo sapien
taatttttgcatttttttgtagagacagggttttgctatgttgctcagactggtctcgaactcctctttcagcactttgaatatgacatttcactgccttcaggcctccaatgtttctactgagaaatgagtcttcactcgtattgacgctgctctgtacataatgagtcacttttgctactttcaagatttcctgtttgtctttcaatagcttgtatctatatggatttttaaaatttatgctacttggagtttaataagcttcaatgtttttcatcaaatttgggaattttctggccattaattccttaaatatattttcggtatcattatctctctactgtcctgcaggaaatcttactgcatatatgttggtatgcttgatcatgcctcatgtgtttttgagattgaatattttcctttaatcattttctttctgttgttatgggataaattttattgattaatttttagattcatcaatttatttcttctgctatctcaactctgctgttaaacccctctagtggatttttaaattttttcagttatactctttaactcaaaatttctcatttggtcttttttttaagcttattgaaaatcttcatttgtcaattcattgttgacatactttgctttagttctttaaagatagtttacttaagtactctgaacatatttatagcatattatttgaagcatttgcttcctaaattcaaattctggagacagggcattctgagatagtttctgttggttgcttatatttttcctgaatgggtcacacttttgtatttctttgtacatattatcattgtttgtagcaactctagatgctgatatttttgccctgaaggttgttgctgttgttcccttttgtttgtttattctttgtttaataaattacccaggctaaatttgtgaaatctgactcccctatagtgtgtggtcacaaatatctctggccagtttagtttttttgtttgtttgtgtgttttcttttagttcttattttgactttcaagaccgaactcctaggggttgtccctgcacttgtgtagcctcaggcaatgattagacagaagtcatgctcaaatacctcaagccagtaagtcttctgacctctgcaaattaatctgttggtaagggagcacctttaaaattcagtatattttgaagtctgtcccaggttttacttttcaccaagtcctttctggcctcctaaatgcaggtacacattgtcagggtcagccaggagcacataaataatttggcccctctccagtcttcacggcacatgtgtaaagctaggaaaaatattgtgccaattatgactgaaatctcaagcctgtggagccaagttattggccctcccctactgtcccacatccctgaagtcacttattctgacaatgccattggggtaggtaccacccacttctccaggctgccagaaagagtgctagttccatggcttgcccatccctggcagagccttcatgctcactgagctgggggaacaggataggaggagccccacgccagagtgctatgaattcccactttctttacctgaaattcagctttttcaagactgaacacttctcagattgttatatgcctttggccaatttccataaaccaaaatggttgtttttgtcaattttctccagcttaggttgcttctctcagagaggatttgtcactctcctcacttggccgtaactagaagtcaatcatatttactttacaaaaagtcttaacatttattcacataatttccattattgatgctcttcatccctttatttagatccagatttccatctggactagtttcttgtaatgtgggtctgatggtgataaattctttcagattttgtgtctgaaaatgtctttatttcacttttgattttgaaagatattttgactgaataaagaattctgtgtttgacaggtttattttttcctttcagtacagtcatgcactgcataacaatgtttcagtcaacaacagactgcatataagatggtggtcccatagattataatgaagctgaaaaactatcatctagtgatgatgtcatagtgaaacacattactcgtgtttgtggtgctgctggtgtaagcaaatctgctttataaactttataaagtaaaaagattatagaaagctaaggctaatttattattgaagaaagataagtattttaaaatactcacccagagaaacttccagtcctgcaagcttcatttatggtaagtgctctctacagatgtgctattttaaaaatctt

SEQ ID NO: 3250 - DNA, 2300 bp, Homo sapien
ttactgagtcgtcatacagtaactcatttctaatgagactgttaaagctgttaccaaattccaacaggtcatgaaaaaactgctcagcacctctctgtcttctgtcaggttagggctccgcagacggacgacagaggattatccgtagacttagatgggggttcctccgcccctctctgtcctcctgccaccacagccaggctggacgcagaaccgcacggaagcctccccaactcctgcctctgggagtgctcctgcctgcttcaaggaatctgggcagcgggaccctctgggtttagcgtcctcgcctggggaagcaactttggccttaccgtagaagttacaaaattggcgggggtagggagaaagattataatatatatttggagtcctttcttccagtttaataaacacgtacttttctcattgccctagtcctggtatgcctaatggcggggaaagcctcaaataaactcggtgccctctggatctccccaacctgcctttagtccttgcgagaggcgtgagagaacttcctattatcatcccttttgttatttttattacattatttaataggctccctctacggaaccaaaaatagccttaatatgcttactttctccctgtactccgccccaaactgttagaacagcagaaaatttttttttgggggggggcggtttgggggaaggcagaaggagaagaaaatttgattgtgatggtggtggattttttccaaatttccccacagctgttatcaaaacatgcaaatgagattttccaacaggatcttaaacaaatctggaggagttaatgccgaagcaaaataatcagcacgtttgaagtgactgtgagtttcagtttgtcttttctccccgtgatattattgcaggggaatgataattagacctttagaaatccaaaggggctctcttgctctcttccctctctcatttctcttctctctttctctctctctctctctcccttcctccctccctccctccctctctccctccctctctcttgttccctccctctccctttctctctaactctgatgttggcaaagggggttttcttaatcagactgttttttggtcccagggaaaggaggaagaaggagattgtgatggagaaagggggtctgtgaaacgtcaggcacagcacaaaggctttgccacgtaattacaggctcctattaagtcgagatctgccctcccaggggtctccaattttcttgtattccctacaaagcctcctctgcatgccagtttgtgccttttgaagtgccagagagcttcttgatccaactgagaaggaaaaaggagcccagcaagaagagggggagagagagaaggggaaaggggggaacccaccagcaccctccgtcggactcttgaagccttttttttttaattcttaatttttttttttactctttacaaaaagtaaagtgagaatcctgctctctaatacatctgcaagacatcaccctctcctcctgaaactttagtcactcctgagaatccacaggagtgcagagaggggggaacacgttttcttgaagatgttttaaagctggaacaagccttcttctgttggtgcttgaactcttgcctgggaataacttttttaacctttaaaaaaaccattcactttgattcttctctcccaccccttcttctctcttcttctgtttgcctaactcccccgccctgctggcctccgctttcctctctcccccttgttattatttttagtctgtgcgtgtggacacttttggagagttggaagggatttttttctcctgacttgaacatagggtgactttttaatattgtattttactgtggattatctctttggaccgcgccggacttggcctcaggaaatcaaccaatgctgcggaaggcggctggtgcacaacgctctgctctacagaagggggtcccccaccctcttttccaattttttttttttggccttcctctccttccctccctcttcctccctctctctctctctctctccactacccccctctttcttccccactcggctcctctcccccctcgcgcccacagcgtttggtgttgattcgagcgggaagaggggggtgggtgggatcggtgggggagaccatgacctccagctacgggcacgttctggagcggcaaccggcgctgggcggccgcttggacagcccgggcaacctcgacaccctgcaggcgaaaaagaacttctccgtcagtcacctgctagacctggaggaagccggggacatggtggcggca

SEQ ID NO: 3251 - DNA, 2300 bp, Homo sapien
ccgtctcaaaaaagaaaaagaaaattaccaactgagaattctatatttgaccaaactatccttcaaaaaaaaagaaagaaagaaagaaagaaagaaagaaagaaagaaaagagaaagaaaggaaggaagggaaagaaagaaaggaaaaattaagtattcacaaataaagtaagattgtttttctagcagatctgccctaccagaaatactgaagatattgtctcacgctgaaataaaagaatactagctagtcactcaagtctacacagagagcacactcataaactacagaggtagaataaaattatttggttttgttctcctattatgtttaaaagaaaacagcttaaagcaataattataaaactgggttggtgggattataatgtttaaatatatgtatgtataacatgaatatatataatgtgcatggcaataatagcagaaaaaatgaaggaggaaaccaggtatactggagcaaaacctttgtatgttattgaaactaaattgatattaattcaaactacattgttttaggctaatgttataattgtgaccctagaacaaacaaagtttgaaaattcacacttcttgatttcaaaacttactacaaagacacagaaatcaccacagtgtgctaccagtataggaaaaacatatagattaatgggataaaattgagttcagaaataaaccattttagtcaattcattttttacaaagatgtggagacaatcaggaaaagaatcatctttttaacaaattgtactgagacaagtgaatatccagatgcaaaaaataagataaaattagacctctacctcacactatatactaaaactaattcagaatgaaccaaagacctaaatgtaaggcaaaaactacaaaactcttagaaaagttctaaatctaatctctgtgaagttgggccagggaatgcaggcaatgtctttttctttttttttagttatgataccaaaaacacaagcaataaaagaaaaagaatggcaaatttaaatttcacttaaatttaaaacttttgtgcttcaagagacactgtcaagaaaatgtaaaggcagcccatagaaaaggaggaatatttgcaaattatgtatctgataagagactagcatctagaacatattaaaaaatcacaactcagtaataaaaatccaaacagtctaatcataaaaagtcacatattgtataaatctatttacataaaatgtccagaaggcagacagaagattagtggttgccaggtacttgggggagagggagggtgaatgtctgctaacaggtacagggtttctttggagcttgttctaaatgaaaatgttctaaaattagatagtaatgatggttgtatacctctgtaaatatatttaaaatgattgaattatatactttaagataaattttatggtatgtgaattatattttaataactctattataaaaagtgctacaataaacatccttcatgtctctcagtgcatcagttgtatacatgtttatacactctatggacctagaactggaaattctgggttgtagattttcagttttgctagaacttgacaagtttctctacaaactagttatatccatttataatcccaccagtcgtgtgagaaagttcaactttcttttatctttgccaatatttgaaattatctttttttaatttttacttgtattttagtactttttaacttattagctgggaaataatattttaatggtttgtattttcataacttcaagtgagattaaaaatcttttaaaatatttattggccattcagttttccttttctgtgaattttctattcttatcctttgcccagcttctactggactgttggtctgaagaactatctttcagtgcttgtaacatagaaaccagaaacttacccacccctcaataatgacaggtgagcattagtagccacttgggcatgccaggacattctaccacattcattccagaatggaatctttgaaacatatggttgccatgacgagtgtcaacatttcaaagaatttgcttggttgataactacctagagtattttacctttggctaagaggtaatatactagagtttctcttcactactttgtctcaccgtgattacagagaagttacaaatatgtaagtgaattcctattaatatttctgtcattcaaaagcttgtctttttttctaatcctgactacttttcttaatttttgttctgttaagaaaaagaaccatgaatacattagaaaattacgttatggcccaggtatggtggct

SEQ ID NO: 3252 - DNA, 2300 bp, Homo sapien
tttatcattattgaagttaacaattgacaagcccattagagaaaacattttacataattttacatcactgacttagagcccacacatacatgacaaagatagctaaaaacatatgaaaaaatatatctttggaaataaacacagcattcctctggctatgaaactaaaaaagtttgagacactttttaaacttgtagcagaagatgcaacagactgtcagcttcatttagcactgcctgcactaattgttgttcactcgattctttacgagatattagcttcagaatatggaccctaaagaatccacatctttggaatgttccatcatagctttgatgatcaagtctgagtctccaaaagccactctcattttatagaaatctttcaactgttatgcatcatcagacatgacaacaggtgtcacaagagatatatgccttgcctccagcaaatcaattagaagaaaacaaaaatttctttaaaatacaaagaaaatatagagcaagagaacagaatataagtcttccactcatatcctccaacagcaacaataatctagcaaccatccagggatgaaagtttcttcttagcagttttgtgatttggaggggacaacagagtagagaatgcccactgccccaaccagagcctgggcatttgagattctgaagatttaaaaaggggctctgcagaaagctgtggcaagcaaaggataggctagagagagacaggactaataaatgtgtcgacttcagatacattcttgtgaaggacagcaaagaataggtggccttttcacctcctagagagataaaacatcggaggccaaggtagaattgggtgtgtcctgccaatctttaaatgaataaggctataggagtagtattgcttcctgaagtagtcacaatcttttctttgcattattttaattctatttatgtagcattaaaaactgaaaagaagttctatgtaaaatgagagcagagaaaatcatgttgtctgaattgcagccctagaaaatttcatgaacctatgacttgtttttaatttttatctacaagtcacatttgctcatttttaactacatgccacattttatatgtacctatgtatacatgtatttatgtgtacataccctttaatcctctaatccttgttaaaaaaaaaatagccagacaggaattaatagtgtagttatccctattttattaatgagtaaatcaacgattggaaaggttaagtgatttgcccaaggccacagagctatagaagtgatttggaatctctcatactcacacttcagagatgaagattactgtcttcaaaaggcatgaagggtaattcctcaaaattagacatataccagtttacactaagtatcacttgcttaatgaaggagttaactagacaaaatgagtgagatgttataattctaagtgacatcaaaatatagttgataggaaaactttttttgaaattctactatatttcatgactgggagttaggtgcagtttattttgtctaactgccaacataattttacctggtactaattttacctggttcctggtactaatagatcaatttgtggaattttgatcttttctgtgaccacacactgtactcagaaacaagtaaatataagcttgagaaatacaggcctttgaccccaaaattccaagacaggacatgaaaagagagagcagagaaaagtcatcctccttattgggctatctcaattaagtagctaagtttctacagtatttggaggactactatgagctacccacaaaagaactaggaataaggaaaacaaggtaaactttcaaataacacataataaaatggagtacagaactgcaaagtcacctgggagaaactacttgactcccaggccaagggtccaagagtataaccagcagcttgtgtttaccataatcaaaggaaaagtagaaactgggtggccatgggagactggcctacagtcccatccatcacagagggttggcgtgtgctcacccattcaaggaccaataaatgagtatctctttaagagcagctcctcccatttttcaacaatcttcctaatatgtaggctcactagaacattttctctttcaaactgcccagacggttggacaggacgtagacacacagaagaaaagaagacaaagaacgggtaggaaaattaaaaaggtaggaggctgaggcgggtggatcacctgaggtcaggagcttgagaccagcctgaccaacatggtgaaaccaaatctctaccaaagatacaaaaattagccag

SEQ ID NO: 3253 - DNA, 2300 bp, Homo sapien
aagctgacattttacaaatctcttaatttcttaatacactgaggtgtatgcaggaaattaagagatttgtaaaatgttgaagggatattagtaattacttaatccaatttgcttatcttacaggggaaggatctaaattcctgcaagaattatcccaaaatatacagccaaagagatgaatcactgagtttttaactataatattagataacagtatgaatatttttaaaatttataagaagacagaactggctttcatttaatatcatacgtattacaagaattggaaagctaaaaaaccacatttctaagactctcttgcagttagggattggatgcaattagttttgccagtgagacagacatctaggctcagaaggcaaagggaagcaaaagctaaattttcgtgacaatgctgatgggcaaatgtattccaacaggtgtgcttatatcagctgaactccatgttccaccttttagccccccaatttgtatgttgcaggcatctgtggtgattgaagcagtttcctgccctctggatagtagctctagtggtgtgacctctccagtcctgcagcaacctcctagttcctgctctttcagctctttgaccttttgcaagcacctaattccctgtagtatatacctttcttcatgatatatagtgttttttatctcctgcactaaatcatgagcatatgcatataaatcataatatgaaatcttaaaaacagaagtacttttgctgaggcattaagcatataatcagtcagcaggtccccaaacatctaattcctgaatatctcatatatcctgtctccattatccattcctctaatgctactctaatttaagtcctcagtctctctggcctagattgttgaaataacatcctgggtttttggtctccttgattctagtcaccatcctctctagcctccaggtgaatctgatcttgtctgatgttgtcacttccttgttcaaaattctcgaatggacaaccgtaatccagaaggtagtatccaaacctgtgattgtggcacttcagtatccttcataacctatgtcctgcatgtttaacccatattttgctattcccatcacttatggtccagcaaaactgaactaattgtagttcccccatcacgtgttcttacttttctatgcattttcacatatttttctctctgccttttttctatttcttgtcccttatctgtctggaaaacatctattcttccttcaagactcagctgtcttctcacactccttgaagcctctctttcctcctccaagtggacctagatttttcttcctacatgctagcactacactgaaccatacttccactgtgacatttatcatctccctcaacactagacttcatggttccagatggaaagcactgtgtcttctcacctttgaatcccccaaaagactattataatgcatgacatatagtaggctgtcagtacagtgaaaggaatggccagaggaaggaaaggagggaaacagaagcagaaaggacaggtatagaagccggagggagccagagacaaggttcagagaccacaattctgtcttttgagttcactagttttacaagctcatctataagcgttagttcagcaactcagatcaggccctaagtttccagaaatttgagctacttttcactgttggcacaacaaaacgtttcattatagtccaggtgcatagcctttgtttatatattctatatttccaaagcaaacataaatgaaagaatcattgttcccctaatctcccaggagtttcaccttacagctccagtggccatggcagtcactgttttatattttttgtaacaagaaccaaagacttcattcttgcctttttcctacccctttctttttacttcacccatgcctcccctgttcttctcttatccttaccacactcagtccttctctttcagattttactatggctctataccattaaaaatacaagaaaaaaaaggaattttactttaagaataactcctcccccttccccagttttcacatcaaaagacattgttaaatgccattctcttccacatttcgagaactgctgattctctggggagagaaaggtgattgcttaagaggtgaagtcccttagagcattcaaaatgaggagtgattctgtacagaggatatcatgcagcaggctggatgtctagttccaattcctttatttgttacctctgagaccttgaagaagtagtttctagtctcagcataccaaagcgtcatctgcaattgagagcattggat

SEQ ID NO: 3254 - DNA, 2300 bp, Homo sapien
gatacaccatttgccagccaaggctaactctataaagcaagctggttcttctcagctggtgctggtacctagaagatgcctgctcctcagctgatgcatgccaccatgaacacagatgtatgtttagttgacacaaaaggccattaatatccccacatcagttatccctggaggataactaagccatctgcctccatcatcttttaagggttcagtcagtttaaaactttgcttctatacctaggtattttcttttctctgtatgttggtcaggtacaattatttttaacagggcttccatcaatatcataactacctagagaagacattgcaaagataaaattggagaattgttaacaggctgttaacaaaatgtgtacccaactgccaatgaagtggcttgatttttttctttttttaaaatttttcttttgtatccttttattttatttacttattttttagagacacggtctcgctctgttacccaggctggcgtacaatggcacaatcatagcccactgcagtctcgacctccagggcctcaagcaatcctcccacctcagccttccaagtagctgagactacaagtgcatgctgccatgcctgactgattttttgttttttgcagagatgaagtctcactatgttgcccagtctgaccttgaactcctagcaataccctaccctggcctcccaaactgctgggattacaggcatgagccactgtgcctggccttttttcattttaactgagaaatgtgttcagctcttttgttccttagtcattgatcatcacttttgttatatctgttagtcttgtcatagagttgctgcacttattacacagagaaggccttttatcacgaccaatttattttaggaaatttcagggaaaacgtttttctagaacaccttatttgacattataaaacaactcttcactcttgcactccagacctccctttccagttttctttttctccatagtggtcatcaccacttgttttattttattgatgggctgtctggctccctcaactacaaagtaaactccacaaaggcagagagttttgcctcttttattcattgctgtacctgcatcacttagaaagtttctggcacctaggaagtgttcagtaaatatttattgaataagtttatgtaaaacgtctcagactccttagagaaactggtcttttggggttggagaataaagttctttacctcatcagttagactctatctaaggtacacgagggcttgctagtctcctaagttagtctgctaataaatgttaaccctaataactgaaattattagcagaggtaattatccagttctatatcaaggcaaaaagacagcagtggatagaaagatcttagaagtcccactaggttcatccaagccaccatacacataggcagaaaaatcaaaataagatatgagcctggacagggtgagcaatctgggaaaagatgaacacagtatgctaggacccagaaatcatcaagtctatgaaaactaagccagaacacaaatgtgaattccataagatcaggaacataatctgtcttgttcatccaggcatggtaatctgccagaaatagtgcttaactgcaagaactgaatatttgttagataattaaaccatcaactaaatgagattcatgcaaccatgaaaaatgctgctataggtacacaatattgatatactagaaagttaaaaaatcaagttggaaattagactattccatttctgtttgtgtgtatgtatctacaaataggtggaaggatataccaaaatgtcaacagcagttacctctgggtggtgaggagtaatcttaaccttgttatttatccctatatgttcatttgtgaatgaatatttattacatcattataaaaaggatttttaaactatctgtatgtttaagagtatatgttgctactatgtaagagtatatgctgttactgtaaagacattgcattactactgttgacctcagagcacgagcctcttgcctaattctaggactcctaactaagtctttggagtttcagctggaagaatgctggaggaatacggaactcctcccatttctcacagccacctccaactcttaaaaacgcttccaactgcctcccagcacacaaccaagggagaaaactattctgtcaaagagacggtgccaaaaggcaaaaacaaaggtaaggatgatcgctggggaaagaagctgaaaaggaaaagctcagaactctagctggaaatttggctcacatccctagtatgttactgc

SEQ ID NO: 3255 - DNA, 2300 bp, Homo sapien
ttcagtccaccaacctctcatggaatttattctctgtacctgtgggagtcatttcagtgttatgaaccagcaatcaagacaccttatctggtccaacaatgacagcatcatcatcatcatcattatcatcattacaatcatacacagtatttactatatatacacaaatctcttgacatagattatctcatctaatccccaccacaactatctgatgcagatgttattatgcctgttttatttattttttagaattttttattttatttatttcaatagcttttgggggagcaggtggtgttttgttacctggataagttctttaatggtgatttgtgggttttggtgcacccatcatctgagcagtgtacactatacccaatgtgtagtcttttatgcatcaccccccactccaacacttacccccaagtccccaaagtccattgtatcatttttatgcctttgtattctcatagcctagctccaacttatgagtgagaacatagaatgttcagttttccactcccaagttacttcacttaggataatggtctgcaactccatccaggttgctgtgaatgccattatttcatccctttttatggctgagtagtattccatggtatgtatataccacgaattatttatccactcattgattgatgggcattttggctggtttcattttttgcaattgcaaattgtgctgctataaacaagtgtgttcaagtatcttttttgtataatgactccttttcctcattttcaagacagcatcagctgcggtagtatagggagaatgcaagattgccctaaggtctcctggataagtattcgtgtttctcaggctaatagtcaaaactattacaaagttcagctggaagtttccttctccctgtggtccttcctcaatttcactggcagccctcctcaaggacccctgtgagataaagtcagaaatgacttccctgggcaccaagagtacctacagggctcttcccactgcttctacttttatatttcgttttgctctctaaattcatcccagctctaggtaaggttaaatccttctcctgtgatctggatttttaggttccctagtgggtttgcgtgtttggaggcagattttttcccccactcacactttgggcactcacagtttttcagctgtctcatggagtttgcagcggcaagccacttctttcaaaggtcctgtgaattcttttggttttcctggtatgttcatgcagtacttcttggaggaaaatttcactgtgtgagtctccacatgctgttctgtctgtctgcgtggaaactgcaagttagtcctgcctcctatccaccattttccaacaatctgtcgttaaccatttcaaagtatagaattcagtggcatttagtacattcataatgctgtgtaaccacaacctctatccagtttcaaaacactttcatcacacccaaaagaaaactccatactcattagcaatccttccccattcccttctttccccagcccctggcagccactcgatcatgcctattttaaattgaggaaactaaagctgagaaaagttatacaatttttccaacatgactctgataatagctggtgaacgcaatactcgaacccaggacttgtgattcccaagatcagactcctcccatatacctgtcttttatttcccaagtgcttgggcaatcagctgcacttaaaaagcctttacaaattgagtttactaatgtgagtaatatatgattttttaaaaataataattgtccctaaaggtgaaatggatcaaagcccttaaaagtgaatctgtggtgtagtaactgttaacataattgtcttattttattctcatccccttaaagaataaaactgatgaacaagtgaggatgctggtgtaactccctaacttagtttatagtctgtaagcagaagagtgagtctaaagtacatatcaccagacagtgtttctcctagcatttcgctgttgcattaatcaacaagttaaaatataaacaacggctaaccttgggtttcaaatttaacattccttatctcttagaccaggtttatccactgtgctggggactcccaagccagcactggctcatactgattcattttgatctctgctaataccagagtcctgcgtggcagagccattggcaccagaaattacaagtacgtaaagtaagtaaccagatataatctctgatttctttggatgaggaaagtggggtctggagttttcctgttttgttattgtgctccagggaagaaccaccttatc

SEQ ID NO: 3256 - DNA, 2300 bp, Homo sapien
aggataaacactactagcctttctccaggcccccctctactggcctcctctctagtttcaggggagataggaaaattgcctcaccctctttctcatcccagctcatggaaatggctcctcaccctcccctaacacaaagaacctgctttctttcctgctgtcctgctgtgggcactaatgtcatgctatggtcagacctgctgtctttatagagccagcatgcttctgtgcacaactgccaatatcatatgtatatatgcaatactctttcctttttcctggaattgtttttctcataaaagtggatattctttatcaaatggctactatgtcatacaaaaatgagtagcatttggccgggcacagtggctcacgcctgtaatcccagcactttgggaggctgaggcaggctgatcacgaggttaggagatcaagaccatcctggctaacatggtgaaaccccgtctctactaaaaatacaaaaaattagccaggcatggtggcgggcgcctgtagtcccagctattcaggaggctgaggcaggagaatggtgtgaacctaggaggcagagcttgcagtgagccgagatctcaccactgcactccagcctgggcaacagtgcaagactccatctcaaaaaaaaaaaaaaaaaaaaaagagtagcattctatcccatcttgcgagtgagtaaactgaggctcaaaaggggtaagtcattttcctatatcaccaagttgactcatgatagaataggattctgaaacacatgtgtctacccccaatacccatacttcacaactgcctctctaaatgtggggtcaccttactcctgttgggcccagagaggggaaaattatacaaggtttttgattttatagtgtccttcagggcctaaaacatgaattcccctagaaggaatctactggttcttccccagtaaattatatccagttgctatgggaagcaaccagccctgcaacacttttacatgttgcttgaaaaaagaggacctttttatttcattaaaaaaaattgagcattttagtctctacagttaagactaaaatattgaatattttagtctctacagttgagctgcttctctcaggttcctaatccaaaacaaaaaaagatgcatatccagctttgagaagagaattcacctgtgaaataaaaaatagcaaatttttagaaaaattatgtctttgggggcactgcacttaacaaacttagggagataaaactgtcacaaaaatatattgggggaaaagctaacatcacataatttagtgacaaatgtgtgtgctactgaccagaaatgctataggaattaaaagaacagaggctcattgatgtgaaaggcagataccaattcttggaaatgcttttaaagtttcaataacttacagctactgagcacttactatgtgccaggagctattctgagacgccttacattattaactcacttgattctcacagaacacttcaaggaagctactattgttttctttatatttgtgatgcacagaagggttaatctgtccaagattacactgtcgtaactgatagagccgcgctttatctcaggcagcctggatccagagcctggttgcttaatcaatgcactctgttgcctctcggtgttcttacacatgtgtgttattaacacatggcctggtgccagaagattctctggcccatcccagtggtgactgtgccatgtgccctggaggtgaatcagtatccaattgagaagggagggatggctttgcatgcctacctttctaccacaaaccctccctggcagccaccctctctctctcccactggtgaccatcactggtgacctgtgaaagggacacaccaacagcacagctggggccctggcattgtgccaggggcaggatcacacagggcagtgccgcggtagcacccgtggtgccacaggtgtggtggctcctggtcccaactccaccccaccagctgctgtgtggtgttgtgtcaggtcaccacaccaatcggagcttcagttttgtatgtgataaagagattgtgtctgacaaggtgaccttttcctagtctgctgatctatgcagttctagggccacagaatggagactagaggcagcagctcagtctgaagtgcaagactttatccagtaaaaggtccaattccagcagctctgccagaagctacagccttgacaactgtacgaacatttggcactggtgctgcatgaggggcgggaacataccaagcacagggttaaccagtgacctgaacattttccttctca

SEQ ID NO: 3257 - DNA, 2300 bp, Homo sapien
tttaagctctttgtcaatttgtttcctccaggatcgaggccatcaagctacagatggttttgcaaattaaaccccaaatgagctcaactaacaacttctaccaaggaccccctggatcgacccactggccctttgatacctagagagtttccctctggaggatactacaattcagggtctcttcttcacccctatccagcaggaagtagctagagcagtcattgcgcaattctcaaaagcagttggggtgtcctgtttaaagggggtattgagaggtgaagccagctggacttcctgggtcgagtagagacttggagaacttttctgtcttacaagaggattgtaaaatgcaccaatcagtgctctgtagctagcaagaagtttgtaaaatgcaccaatcagttctctgtaaaatggaccaatcagtgctctgtaaaatggaccaatcagcgctctgtaaaatggatcaatcagcaggattctaaaagtaaccaatcgtggggagaattgagaaaagggcattctgataagacagaaacaggacatgggaggggacaaataagagaaagctggccaccccagccagcggcagcaactggctcgggtccccttccactctgtggaagctttgttctttcgctcttcacaataaatcttgctgctgctcactctttgggtctgtgccatcttttaagaactgtaacactcaccacaaaggtccgcagctccattcttgaagtcagggagaccaggaacccaccggaaggaactaactctggacacaatatttttttttctttttttaaatttttttctttatttcttctaaaaaaaagtgggatgcatgtgcagaacgtgcaggtttgttgcataggtacacgtgtgccatggtgatttgctgcacctattgacctgttctcctctaagttccctctcctcaccccctaccctacaacaggccctacaacattcccctctctgtgtccatgtgttctcattgttcaactcccacttatgagtgagaacatgcagtgtttggttttctgttcctgtgttagtttgctgaggatgatggcttccagcttcatccatgtccctgcaaaggacatgatcttatttctttttatggctgcataatattccatgatatttttcaaaagaaaatatttgctgccaacagaagattttatattaaaatctgtatttgcagcttttactgaaaagaacctaaggccttgccatattgggctcattttctcaaatagcaacatttagctgaactgaatagacagagaaagtactttccagtcagatcatatctggcccactttcctcgtgtatgttaccctcctcactcctgtaggcatttgcatgtgtagtcacaagcaaatgtggtttagaaattgttcagtgaaccatgttggaaaatgtccctaaacacaagtcctaaagatggtctgttatattatcttacaagcacacagtggaaggaaaaacagttaagttttctatttctgccacagcttctataattattacctttcttgtgccctaggttaatatctaaaaatagctttatgctttctcaaacacatttcaccagctccctctgctgatccaatctgaaggacaaaacagcttaaattccttgtaagtcctgaactttaaaatcacatttctggggttggagaactccaagcatgaaagaacttgatgaggtaatggtcatctaaataactttctcctttggacagctcctatggtaatccaagcaagagtcagggtgtagaagtttgtttccaaaagtagaactcctgtttcgctgagaaagctgtaatttggggtgatttggcgccctctacagactataatggcaaaagcgacgctatcatgtgcttcccatagctttagggctttgccagaactatgacgttgaggagggtggggtaaaggggcaggaagcgtttatgttctgccaatccaacagctgtattctaactcaccattccgccctcccttaagatcacggaagtatcacgcttgcctcttacacaactttttttccttagtctgtatactttctgctgtcactagcataacagaaaagacgaatggcttttgttttaaactgagggcacttttacaaaagtcatctttccatttatttttctttcagaaaaaagaatttgggttttgagcttttttaaaaaaaaaagacaaacactttccttgactttgagaaataatttaagtcaaagaatctgctctatgctaaccaaggtaagtgtcctggatttttt

SEQ ID NO: 3258 - DNA, 2300 bp, Homo sapien
ttactttgtaactacagcaaggctgtcatgtgtgaatgaataaagagcttttattgaccaaaaaaaaaaaaaatgtaagtgatggaaagtattaaatcatcatatgggccaggcacagtggctcatgcctgtaatcccaaaattttgggaggctgaggcaggaggattgcttgagcccaggagttcaagaccagcatgggcaacatagtgagacccccatctctataaaaaaaaattaaattggaaaaatttaaaaagataatagtgcatcttaaattgatggcatcttagattcaattaaatgtggtatttttaaaaggatcactccggttgcagtgttgaataaagccagtacaggaggtaaggaggaagggagaaaatgagaaaagcagaggatgattcaggatgctattgcagtagagaaatgatggtaactgggatcaaagttgtagcatagtagaaaggagagattgtctgattctaaatgtatttttaaagggcagttgataatggacagcaagaaatgaggagtgaaggaaagagaagactccaggattagttcaagatttatgaccaggacaactagaagaagggaattgccattttctaaactttcaagttcttagccacaacttggccactaaaaatctgagtaactttagaaaagtcattacccttctctgaacctcaactttcacatttgtacatgacagatttaaaccagatcagaagttctcaaactgtgttaggtacaggtgccttacgatgcttctcaggagatgggagaaaattcaggcaaactggattacaggctgtgtatagtagcagtccatgtaaagttgcatttaaaagcaggaattaaaagtatttaaaataactatatgccaggtgcagtgtcatgcacctgtcccagctacttgggaggctgaggtaggaggatcacttgagttcagaaatttgaaaccagtgtagacaacataacaagactctatcgctataaaaaataaaataattaattaaaaacatatagctaccacagtttgttaatgaaaatatactataaaagatgtaaagtgtaacttcaatagcataaaatgggataagggagaagtaaaagtatacagtttttgtatgtgcttgaagttaagctgttattaacttaaattagaatgttataactataagatactttatgtaagccccatagtaaccacaaagaaaaaatctctagtagatacacaaaagataaagaaaaagaaatcaaagcgtaccactacaaaaattcaacgaatcacaaaggaagacagcaagattggaagaaaggaactacaaaacagtcagtaaacaattaacaaaatggcaatcataatttcttacctgtcaaaaattactttaaatgtaaatggattgctcggtgcgatggctcatgcctgtgatcccagcactttgggaggccaagtcaggcggatcacttgaggtcgggagttcgagaccagcctgaccaacatggagaaaccccatctctacaaaaaatacaaaattagccatgcatggaggcacatgcctgtaatcccagctacttgggaggctgaggcaggagaattgcttgaaccagggaggcggaggttgtggtgagccgagatggtgccattgcactccagcccgggcaacaagagtgaaactctgtctcaaaaaaaaaaaaaaaaaaaatgtaaatggattaaattctccagtcaaaagagaatgccttaaaaaaaaagttctggccgggcacggtggctcacgcctgtaatcccagcactttgggaggccgaggcgggcggatcacgaggtcaggagatcgagaccacggtgaaaccccgtctctactaaaaatacaaaaaattagccgggcgcagtggcgggcgcctgtagtcccagctactcgggaggctgaggcaggagaatggcgtgaacccggaaggcggagcttgcagtgagcggagatcgcgccacagcactcccgcctgggcgacagaacgagactctgtctcaaaaaaaaaaaaaaaaaaaaaagttcaaccatatgctgcctatataattcaatcataaagacacatttagactaaaagcaaagacatagaaacagatatttaatgtaaatggaaaacaaaagagagcaggagtggcaatatttataacagacaaaatagatcttaagtaaaaaaactgtaaaaatggataaaaattgtcattatatagtgataaaggggtcaagtaatcaaaaggatatgacaactttatttcagacatttagagag

SEQ ID NO: 3259 - DNA, 2300 bp, Homo sapien
tgctggcataccggaggctttctgtttctggcaaaaattaaaagaaaaaaagaaaaaaaaagtattggctttgcagttgttgagtgttcaggtgtataaattaaagctcttagaaattaataatttaatacatgtctttttttttttttttttttttttgagacagagtctcgctctctcgctctgttgcccaggctggagtgcagtggcaggatctgtgctcactgcaagctccgcctcctgggttcacgccattctcctgcttcagcctcctgagtagctgggactacaggcgcccgccaccacgcccggctaatttttttttgtattttttagtagagactgggtttcaccgtgttagccaggatggtctcgatctcctgaccttgtgatccgcccgcctcggcctcccaaagtgctgggattacaggcgtgagccaccgcgcccggccatacgtgtcagtcttatgaccttggttaatgtaatttcatctgattgctgaagttgttctccattgctcaagacagatgatttggctgggcgtggtggctcatgccggtaattccggcactttgggaggccaatgcgggaggcttgcttgagctcaggagttcgaaaccagcccagtcaacatagcaagacctcgtctctactggcaaaaaaaaaaaaaaaaaaaaaaaaaagccaggttttgtggcaagcacctgtagtcccacctacctgggaggctgagacaggtggattgcttgagcctgggaggttgaggcttcagtgacctgtgattatgccactacactccagcctgggcagcaaagtgagaccctgcctccaaaaaaacaaagaaagatgtttctgtgaccaggacactatagaccagatcctagaaggttgtagaaattcactaaagtaatgcttccttgtcctcttgtggatgatcagtaggctttcccctggcaatgaccctatatcaataaaaaaactttttcttttcttcttttctattttttcgagaaagagtctcgctgcagcctcaacctcctgtgctcaagtgatccttttgcctccagcctcccaggtagctaggactataagcatgtgccactatgcctagctagctttttttctttttaatttttttgcagaggtagggtctcactatgttgcccagattggtcttgaactcctggtctcaagcaatccttttgccttgacctaccaaagtattagtattacaggcatgagccaccaagcaagtccagacttttctacttcaaattaatattagtggggagggaggtgttcataatttacctctctttattatttcatttattctaacattgctacagtgacaattccatggacatacaccagctactggcggggaagatcgttcagaccagaagtggtaagaaatccttgaattttaaatatgtcataggtagttcacaaagaggacaaaagataccatttactaaacattcgccatctgttctgacataatattatcatcattgtagtctcccacttccagatacactcatctgcctatgttacacttgcctagtaaaagccagcatgggtgaatcttactattcaacggagctgaacactgtgatggagagatcatataaataaactgaatggcttatctcacatccataattagaaacttaaaaagtgctctcagcagcccatgctactctgttcctcacactagttttactttcactctctgtgataacttttcaatacaccaagacttctcagcttgccccaaattcactgagacatactggcgaactgctggttcaaccatttacacatccacccaccagacataagagtgctcatttcactgaggcttattatcaacttgtaaacgtggtcaattcaagacttcttagaaaggtctcaggtccaagctttgtcctgaaaagataattctgattgcagaaactccctccgtccagcaggaagcgccagcaccctctgtcggggttgggccgccacggaggcttcacgtgatccggccgtctctgcgcaggagtgtggtcttgcggagatttgacctacgtacttagcgtcatgacgtagtacgtaggggctggctagccgccatcttgcttctttttctcgctcgctcgctccccctcggaaagctgcgaaagtgctttggcggtttgtccatccgcagcttcggcttttccagtctggtggcccttccggccacccctttaaccccagctttccctcccccttctttcgatcagagatcggcggagaccctcgaagtgcg

SEQ ID NO: 3260 - DNA, 2300 bp, Homo sapien
aattagccgggcatggtggcagacgcccgtagtcccaactacttgggaggcagaagcaggaggatcacttgaacccaagaggcagaggtttcagtgagctgagattgcattactgtacttaagtagcctgggcaacagagttagactctgtctcaaaaaaaaaatctctacctaatgcctggtgaagcatgtcatgtcatctttttagtcttggttgtgaaacaggtactattcccagccctttatgaacttcaggcactgttcccctctgatcctctcaggtctttctttgctggcttgttaacaatattaattcttccaatctgtgaatgtgggctatctttctatttatttcgatttcttgtatcaatattttatagttttcagtgtatgggtattttgctcccttggttagattactcctaagaactttattctttttgatgctctagtaaatgggattgttttcttgatttccttttcatctaggttgttatttgtgaaaagaaatgcaactgattttttgtatgttgattttgtatcctgttgctttactgagttcatttattagtttcaacagtttttgtgaaattttagagttttctacttaaaagatcatgtcatctgcaaacagggatagttttacttcccttctgatttgtgataccttttattcctttttttggtctgattgttgttgctagtccttccagcactgtgttgaatagaaatggtaaaagtggacattctagctgtgtactagatttcaggaaaaagccttcaggtttttcccattgattttgatgttagctgtgggatttttgtaaatgacctttattatgttgaggaattttcctctgtacctgttttgttgagagtttttatcatgaaaggatgttaaactttgtcacgtggttttctgcatttattgagatgatcatttggtttttacttttcattctgttaaactgtggtatatcacattgatttgcatatattaaaccaatcttgcattctagggataaatcaaacttggtttaatgtgttattgagaaggattggtattgtcttgattttaagtagggaagttaaggttcattttatgattcttttaagcttgagtgttctgcgatggctagagttaaatcggatgttctataaccctgtggttaaattgtgtattactactttgtgttccttcataagaatatggagaagctgaacttgacattttattttgatttttgtttagttgtaacgttggacattttaatacgcttgcttactaacatttctctagtgaattgtctgttcaaagctttactctttgggctgctttgatttgttgagttcttataacatatttacattttgtcaagtgttgattattttcttcactgaccatcaatttaattttttttttctttttctttttccttttttttgagacagagtcttgctctgtcgcccaggctggagtgcagtggcatgatctctgctcaccgcaagctccgccttccaggttgaagccattctcctgcctcagcctcccgagtagctgggactacaggcacctgccaccatgcctggctaattttttgtatttttagtagagacgggtttcaccgtgttagccaggatggtctcgatctcctgacctcacgatccacctgcctcagccccccaaagtgctgggattacaggccaaagccaccgtgcccggcccaatttgattttttaaccattatttttctcttatgctggacagaatgtttagtaggcttgcttcttaaagttttgccatgaaatagatgcctctgttctagttaaaagtgaaacttcattcaaaacaaagaaatgtaaacaggcagtgtggggatatattcctcaggagtactgagctgaaggtaatcagttagtagttgaagccaaaggagctaatgagatttcctagacaagagtttagataagaagggaagtggggataggatgaagagcactagaggaaagattgaccttaaatggaatgagaagaaagataaactttctgtattgcagtgattctcaaactactttcagttagaatcacctgaagaatttttttttttaaaaaagagttgatgcccagtttcccccctgcccccagatttgtatacagcaagagttgagaatcactgcttagaatatatctgcttataataagtcggtaggtcttaacatttttgtaagtcttagtcaatctggaagacttgctatagagtgctgggccccttcctcagagtttgattcagtaggtctgg

SEQ ID NO: 3261 - DNA, 2300 bp, Homo sapien
aggtcaatccagacacaacattcccttaacccaaagcctaatccaaagcaagtgttctatctctattcaattctgtgatgcctgagagaggtgaggcagctgccaaagaaaagtttgaacctagcagtggttggttcaggaagtttaaggaaagcaaccacctctatcacattaaagtgcaaggcaaagcagcaagttatccagaagatccaaaactgagataatggatgaaggtggctacattaaataataaatttttaacgtagatgaagcagccttctgttggaaggagatgccatctgggcctttcatggctagagagaagtcaatgcctgacttaaaaggacaggctaactctcttgttaggggctaatgtatctgatgacttgaagctgaagcccctgctcatttaccatgtttgaaatcctagagcccttaaaaattatgctaaatctgttctgcctgtactctagaaatggaacaacaaagcctagatgacatcacatctgtttacaaaatggcataccaagtttgtttttttttttttttttttttttttttttttgagacagtttcactcttgtcacctaggctggagtgcagtggctcaatctcagctcactgcaacctccgcctcccggattcaagcaattcccctgcctcagcctcctgagtatctgggactacaggcacacgtcaccatgcctggctaattttgtatttttcatagagacggggttttgccatgttggccaggctggtctcgaacccctgacttcaggtgatccacccacctcggcctcccaaagtgctgggattacaggtgtgagccaccatgcctggcccatacctattatttttaagcccactgttgagacctactgctcagggggaaaaatgctcaaaagctttccttcaaaatataagcttgttgacagggcacctagtcaccctagagttgtgatgaagatatacaggaagatttatgttgttttcatgccttccaacatggcatccattctgcagcccatggatcaaggagtattttgactttcaagacttgttatttaagaaatacattttctaaggctgcaacctccatacacagtgattcttctgatggatctgggcaaagaaatttgaaaaccatgtggaaaggatttaccattctagactcctttaagaacattagtgattcatgggaggatgtcagaatatcaacattaacaggggtttggaagaagttgattgtaaccctcatggatgacttggaggaattcaagacatcagtggaggaaataactctgacgcaaagaaagttgttttttgtgatggaatctcctggtgaagatgctgtggacattgttgaaatgacagcaaaggatctagaatattacataaacttagttgattaaacaatgggatttgactccagttttgaaagaagttctaccatatgggtaaacagtatcacatgctacagagaattcatgaaaggaatagtcagttgatgttacagacttcattgttgtcttattttaagtaactgccacagccatgctagctttcagcaaacaccatcctagtcagttagcagccatcaacatctccactggcaagattccaccagcaaaaaaagtacaattcaaaggctaagatgatgattagcttcctttttagcggtagtttttttaaaattaaaaagtatacatcttttttaagacatgatgctattacctattagactgtagtataatgtaaacataacttttgatatgcacttggaaaccagaaaattagtgtgatttgctttattgcaatacttgctttattgcagtggtctggaactgaacccacaatgtttctggggtatgcctgtatgttgatacataataatctttgtaagtctgatttgaaaagtgattgttttattccctggctagtaatagctacacagtaggagattaaggaaagggttaaatgggttagagattattagactctaaatcttaatcatgttttttatggcttcttctttccagtaggtcccattagtccaccacagccaccttcagtcagtgcatggaataagcccttaacatcgtttggatcagctccttcatcagaggtaagaataggcttttaacagcataggtgtgctggattttccctaatacttcagtgtggccgggtgtggtggcttacacctgtaatcctagcgtggtgggagggttacttgagtccgggagtttgagaccagcctgggcaacatagtgagacccgcctgggcaatgtaggaa

SEQ ID NO: 3262 - DNA, 2300 bp, Homo sapien
tgggtcattgtgtgaacatcatagagtctacttacacaaacctagatggtatagcctatggcttctaggctacaaacctatacagcttattactacactgaataccgtaggcagttgtaacacaatgataagtatttgtgtttctaagcatagaaaaggtacagtaaaaatacgatattataattttatggaaccacccttgtatatgtggtccatcattggctaaacatcaccattatatggcacatgactgtatttgaaggtgactatttaaatattaaaagtaaatctgaattgcatgcgttgttcatactcttgacattatatccgggtagatataacattaaccttatgtagtaattgaccatgctaggtttaggaatgccaaaaatgacatggagtagtgattcaattattaaaacaagctttagttgaattttgaccctagttttgctttttatgtttgtcttttcatgaaaagattaattgttgtaacaaagccctaggtcacctaatctgcttgtctgtttctacaactgttccccatacctgctatgcttcagcctcactgacctttttttgttcttgacctttaccctaggtatgtggtctccctaaactctttccactgatcttgtcttctagattcaatgtcagtgtgtcctcctcaggggctttctctgtctaccagtctagtagctggtctcttaaccctattttgcttttgcagattccttatctgacttttcagttctttatttgcttcacctgctagaatgcaaattgtgcaattagactgattagcacatctgattagcacaaagaagatgctcaacaaattagctgggttggtttgtttgtttttgagacaggtctcgctttgtcacccaggctggagtgcagtggcgcaacctaggctcactgcaacgtccacctcccgggttcaagcgattctcctgcatcagcctcctgagtagctgcgattacaggcacatgccaccaagccctgctagtttttgtatttttagtagagacagagtttcaccatgttggtcaggctggtctcaaactcctgacctcatcatccgcccacctaggcctcccagagtgctgggattacaggcatgagccaccatacccggcccaaattaactgtttaattggtggattgattgcttagatgtttgctctatgttaccaatcacaaagtttttattatatttcttaaatttcattttcaaagcagacttctgagaagcaggtgacacttattactgtcttttatttccagtgtattcatctgtttgttggtagtggtgtctttgtgtgttgcttttacgtttgttttaaatgaggaaacaacttgaagctgtgctttgcccatgatcacactcatgagagccaggactttaaaaacttaagtcttgtgctagtttcatcttatcagttgttttctagtacagacaaacaacagttaagagaaaattatcctaaaatataattaatgtcggtctcagttaatatgtagattgtcttaaaccttctattgtacttaaactgtatagtgcttcataaatcagtcacatctgaactatactttgcaagcaagttttaaaatattcttttactagggagcgaagaatggtcaagaaagtggactcgaaattggaactgacacaattcagtttggtgctccagcctcaaatggaaatgaaaatgaagttgttcctgtgctttcggaaaaatctgctgacaaaatacctgaacctaaagaacagcggcagaagcagccacgagcaggacctatcaaagcccagaaggtaaatatactttataatccagataaaattttatgaaggccactgacatgaagagcaaataatacttttaaaagtgaacttaattttaatgaatatctttgatcatggtgcaatgatgaaagatactcatctatcataaacatagttttatcataaacatttgactttagcttccagatttgagtccagtagaaaacaaagaacacaaacctggtcccattggaaaggaacgttcattaaaaaatagaaaagtaaaagatgcccaacaggtggagccagaaggacaagagaaaccaagcccagctacagtcagaagcacagatcctgtcacgacaaaggagactaaagcagtctcagaaatgtctactgaaataggaacaatgatctcggtatcatctgcagaatatggtactaatgcaaaggtaagccacatgtagggattaccagttcaacagatgcaagccatgtctaaaatgaacg

SEQ ID NO: 3263 - DNA, 2300 bp, Homo sapien
aaccctaatacaggaggacagggcttaccttcattccattatatgaaggtgaggactgaactctgatttttatgctgcccaaattcctatctaaggtgtctggggcatcgtgtcctacaaatcataaattctcatcagatgggttttatttaacattaatcgtgacttactctccaacctgactctggcataatattatgagacaagaaagaaaatcaaaatattttaccccaaaacatgtttctttgccatattttgaaatggtcatgcaaagctgttctttttgggggcaaatttgcatctgtaaagaatctcaattaacatagctagatatttttcttccagaccctcccaatcctaaagagattaactgagatctgaataggaaacatttgtcatctattgtctctaagggcagccactataagactttgaaagaactttggcctccaccatcttttatcttaacctgaacattccctttccatcaatcccaggtccttagaaaactcaaccaattgtaaaaaagaaaaattttaaattcacctgtagcctggaagctccccctccactgcactttgagttgtcctgtctttctgggcaaaccaatgtatttctttctttttctttctttttttttttttttttgagacggagtctcgttctgttgccaagctggagtgcagtggcgatcttggctcactgcaacctctgactcccgggttcaagcgattctcctgcctcagcctcccgagtagctgggattacaggcgagtgccaccacgccgggctaatttttgtatttttagtagagacggggtttcaccttgttggccaggatggtctcgatctcctgacctcgtgatctgcccgcctcggcctcccaaagtgctgggattacaggcacgagccaccgtgcccggcctaccaatgtatttcttaaatgtatttgactgatgtctcatgcctctctaaaatgtataaaaccaagctgcaccccgaccaacttgggcacgtgttctcaggacctcctgagggctttgtcacaggtcatggtcactcatatttggttcagaatctcttcaaatattttacagagtttgactgttttcgttgacaaagggaaatagctgtatttatctacgtatatatagaccttgtgtagaccttgtttttaatcccagcttcattacaccttatcttcccaagcagcaaatttcttctatggtgggtttttttttttttttttttgagacgtagtctcactctgtcaaccaggctagagtgcagtggcgcgatctcggctcactgcaagctccgcctcccgggttcacgccattctcctgcctcagcctcctgagtagctgggactacaggcacccgccaccacgcctggctaattttttgtatttttagtagagacggggtttcgccgtgttagccaggatggtctcaatctcctgacctcgtgatccgcccgcctcggcctcctaaagtgttgggattgcaggcatgagccaccgcgcctggcctctgttgtggttttattatcatgtaaagaaatagactgccgccttgaattcctggcctcagcctggtgggaggatcacttgaggccaggagttcaaggcagcagtgagctatgatctcaccactgcacttcagcctgggtgacagagtgagaccctgtctcaataattacaatagtaataatacattttaaaaattaaaaaaatgcaagaaaggcaaaattaaggattgtttgcaaacattttctcaaccctcacaactgccctagaagatactattactcctcttttacaagtaagaaaaccaaggcttctagaggttaaattacttgcccgagatcactcagatcaaaagtgggagttgcacaatcaactcctttaatttcagagctgaaacacctgccagcatagaagaagtgctgtgaattatcaggaagaggtgggatcagtgattattgatggcactgggaggaggggcgtacgtgaattagctttttaaaaagtagtcaataaagagactaggtcacaatgtgtttactagcatctgagatagcgcttccccattgctcacatgacagaaagctcttcccctgctctgcccccaagacccatcctctccctgcgacatctgtggagatttctcaaggacacggctccaggggtaatttgtttcagctgctgctttctaagggcgcaaatcaatcttattaacccaagttcctgagagagactgactacaggaggttaaaagactaaaggggaggaagttga

SEQ ID NO: 3264 - DNA, 2300 bp, Homo sapien
gcagaagctgggtgctccatcagtcctcactgatcacgtcagactccaggaccgagagccacaatgcttcaggaaagctcaatgaacccaacagccacattttccttccctaagcatagacaatggcatttgccaataaccaaaaagaatgcagagactaactggtggtagcttttgcctggcattcaaaaactgggccagagcaagtggaaaatgccagagattgttaaacttttcaccctgaccagcaccccacgcagctcagcagtgactgctgacagcacggagtgacctgcagcgcaggggaggagaagaaaaagagagggatagtgtatgagcaagaaagacagattcattcaagggcagtgggaattgaccacagggattatagtccacgtgatcctgggttctaggaggcagggctatattgtggggggaaaaaatcagttcaagggaagtcgggagacctgatttctaatactatatttttcctttacaagctgagtaattctgagcaagtcacaaggtagtaactgaggctgtaagattacttagtttctccttattaggaactctttttctctgtggagttagcagcacaagggcaatcccgtttcttttaacaggaagaaaacattcctaagagtaaagccaaacagattcaagcctaggtcttgctgactatatgattggttttttgaaaaatcatttcagcgatgtttactatctgattcagaaaatgagactagtaccctttggtcagctgtaaacaaacacccatttgtaaatgtctcaagttcaggcttaactgcagaaccaatcaaataagaatagaatctttagagcaaactgtgtttctccactctggaggtgagtctgccagggcagtttggaaatatttacttcacaagtattgacactgttgttggtattaacaacataaagttgctcaaaggcaatcattatttcaagtggcttaaagttacttctgacagttttggtatatttattggctattgccatttgctttttgttttttctctttgggtttattaatgtaaagcagggattattaacctacagtccagaaagcctgtgaatttgaatgaggaaaaaattacatttttgtttttaccaccttctaactaaatttaacattttattccattgcgaatagagccataaactcaaagtggtaataacagtacctgtgattttgtcattaccaatagaaatcacagacattttatactatattacagttgttgcagatacgttgtaagtgaaatatttatactcaaaactactttgaaattagacctcctgctggatcttgtttttaacatattaataaaacatgtttaaaattttgatattttgataatcatatttcattatcatttgtttcctttgtaatctatattttatatatttgaaaacatctttctgagaagagttccccagatttcaccaatgaggttcttggcatgcacacacacagagtaagaactgatttagaggctaacattgacattggtgcctgagatgcaagactgaaattagaaagttctcccaaagatacacagttgttttaaagctaggggtgaggggggaaatctgccgcttctataggaatgctctccctggagcctggtagggtgctgtccttgtgttctggctggctgttatttttctctgtccctgctacgtcttaaaggacttgtttggatctccagttcctagcatagtgcctggcacagtgcaggttctcaatgagtttgcagagtgaatggaaatataaactagaaatatatccttgttgaaatcagcacaccagtagtcctggtgtaagtgtgtgtacgtgtgtgtgtgtgtgtgtgtgtgtgtaaaaccaggtggagatataggaactattattggggtatgggtgcataaattgggatgttctttttaaaaagaaactccaaacagacttctggaaggttattttctaagaatcttgctggcagcgtgaaggcaacccccctgtgcacagccccacccagcctcacgtggccacctctgtcttcccccatgaagggctggctccccagtatatataaacctctctggagctcgggcatgagccagcaaggccacccatccaggcacctctcagcacagcagagctttccagaggaagcctcaccaagcctctgcaatgaggttcttctgtgcacgttgctgcagctttgggcctgagatgccagctgtccagctgctgcttctggcctgcctggtgtgggatgtgggggccagga

SEQ ID NO: 3265 - DNA, 2300 bp, Homo sapien
aaaaatatggtattataacttatgggaccagtgttgtaaaagtgctttgtcattaaccaaaatgttatgcagtacatgtctgtagtcgctagtaatccaatgcactttaaacagtgtttagtatgaggaccatggatttgctttatttctccttttaaatatttcattgttgtgacttatttcgtaaagtaatttaaaataatttttgtggttagagcaacagaggagaataagacacttaaaataattaaacatgtccatgtttgtatactctggaggtaactcctgaatgagagtagatagctgaggacagttattacaattttaagtttaggttaagtctttattgaacagcctgaaatttggttaaaacaggcccccatcatctaatataaaggatgaacaaacaatcgaaaaacagaaaacaattttttcctttttgcttcctggtgggtacttcaaaatattcccaggtgtccccagttgtcttatatcctgtttaagaaaaatctgatgagcagtgaagaattctacccattgagcatcagtatctcttagaatatgccctacatttccattttggaaactaggtatgtttcataagcctttaccttacctgagcaaaaggtatgttaaaaagtatgttaaggtacctcctttgttagccttcatgtatgaaatatatggcaaaagtaggctacagcggtgtctatgtgctgcctcaatagcctgttgaaaagaaaaactgattatttttagtgaagctgtttaactaaattctgtacttaacgggcatgctgacagtacatttaacttgcttatgagttacaagtcagaagcagggctaaaagtaagctatctttaaatattactttaatttatatcatattgtctttcattatctgagtactgaagcccacaaatggaagaacattgctacaaagtcttaaatttaaattttatagttgaataattctctgagaatttgctattctttattatgtctaatgaaagttttaaaaattgtaagcattctcaaaagaaggataaataattgtgtatcttttttaaactagtgttcagaatcaagtggatgaagttattgatgtcatgcaagaaaatattacaaaggtaattgagagaggggagagactagatgaactacaggacaaatcaggtacagatcttcatgtatttcttgatattactaatctgtttgctagtttttgtcttctacttgtctagccaacgtttacaaatcttggcttaggaaattggcatttggttcttaagtatatgattttaatggtttaattttaactcctttactttgagtcatcttattgtttcattattttttaattgttcagtggagaatgaagaatttaaaatttcattgttgaagagtgaagagtagagctgttttttcttttgccctgtgatattgatgaactttgtgtttctcatgatctcagggcctaaagacctactcacttttcaacacttgtttcaaacttatctgctatttttattttatgttttatttggtaacttagtcacctttctttactttcagtcattacacctataacctatacctatacctatacctatacctggcacgtacttgccactcaaatattgtttggtgaatggctgaatacctgattaatctttgacagactttagaaaaaaaaaaaacacctcgcttagtcacatttaaaatgtatattgttttcctttaaaatcagtcacttttgatatcttctaagaagctaacttctcaacatgtaattttttttctagaggtgtgccaagtatttgaatttttaaagagtatttttcttactagatttcctaagtttatttataagcattaaggccctaaaaagacttttcttaattttataataaaaaagaagtgagcaaactgatctgcaagctgttttttgctttttgttttcatttttttaataatgtagaatgccagagtttgtgggtggaaaaaagggagaatgctgttttcatgcttaaaagggaataaatttgcagaagtagaaattaatattttcttatctttgtgtgactagataaaagaatcctgttatgtcgtttaatccttctctccatcctctatgtgatatagaaagcttatcggataatgcaacagcttttagcaacagatccaaacaacttcgaaggcaaatgtggtggcgtggatgcaaagtaagtaaatcagaagctactggatagactggtcagcatctgaagtggtattcaaacacatgaagaaaaaaggg

SEQ ID NO: 3266 - DNA, 2300 bp, Homo sapien
ggaaaagaaaattagaggactaacatctgaataactgaagctcactaaaaagaaaatggaggaaataagtaactcaagttgcttggagttctgactctaagctcagtgctattataatcttttaggcttactggtatatttgattcatgttaactgtaaaatgacattttctaagtttcacaaatattggggttagtcaaagggactttgttcaggtgattaagggtggggcttgcattacccctctcctaagcgatcattccaaaatgactggcaggactaaagaattatgtttaaaaaacaaaaaaacccaaagaatggattatctgtaaaagctatgcaatgacgtgcctgttagagctcactgaccacaccttaagttgtctaagagatgaggctataactagctaaactctaattggctaaggcaccaaagccagaaaatagcccataacatgcaaatatacagacataaaatcaactgtaagtgctgggcacagctgctcatgcctgtaatcccagctacttgggaggcagaggcaggaagatcactttagctcaggagttcagagctgctgtgcgctatgattgtgtcactgcactccagcctgggggaagaagtgagacttcatctcaaaaaaaaaaaaaagatcagctgtagaagaaaaaataatgtcagggttacctgtggagtctgggggtagacccactatcacacctagacagggatacaaaccatgagaggcttctcttctaagtgggccgtttcagtccaagttgctgacttggacagcaacttggactgaataaacacaggcaactgagtttagcattaagctttcagaaccttcaactgacaactcaacggctgtttctaaatctcagaacatttaaatcagaatctaggtagcacgtgggcacctacgtagttttaaaagctttccaagtgattcaactccaagtgaatcagagtggagcatcgttgccttagtcatggcatctttcaaattcgttagtacatttttacataaaaataaacatcaaacaaaagaagaacaactttttggtaagagggtgtctattctttcctttcctttagtgtccgcagatctttcctcctgctgttttcttgtctactcttgttcttgaacaccccctcttatttttatgtctttagaaagtgcctggcacagtatttcagacagttaaaatactgtatcaacaaaggacccatagatactgtattaattttaaaagatgtgtagtgaatatgattcaatgagtaaaataatccagctggggcgtgggaggaacggataataaaacaaataagagaacggaaaaacaaaattaggaattgtttctggtagacagctactgcgggcgtggagatctaaacatgataccaaattgggcggagggggagggagtgaggaaggaatgggcagagtggcggaatggcctggcgagggcgatttcctgaaggctttcaggttacaactaagggataccgggaaaagaacaccgagccctcgtcccgtatctatctaaactagccgtgttaactttaagtcaatctcctctctgaaccagatattcctcctatctaaagggaggagcctggccttaacatctctttccaagtctagctctaattctgtaaacaggggatcaaacagatctcctttcttcagaaaaggccccagacgaacccgaagcaggtcctcgagctgcgagccactctccacttgccactcaacgtagtcagccagagggacggatgtgccaccaagcaccaccttctttctaacgcctcatcaccccagccacgcactccggcgcggcgcccagtcccgagcggttctcggaagtttcccactcctcccctaatcgccctccacgcacgccggatcacgaccggaacgtggacaaccagtggttgttcctcccctaaagcacagcataaatttggagagatgcatctaaactgcgtgtgggttcgggctcttttaggtgaatagggctcggcggatcgacttcctcgattatctccgtgccctggacccgccccctccgcctggcgccaggccgccgagcgccgatcggctcgatgagcggaggcgctgctgcggcgctgcggccgacgccgggtccgcaccaactgtctccccctcccagcttcttacctcggcttcctactccttcccccgcccgcccagcaccgccagcccgggagagctgccgggagttccccgggagcctcaggtactggcgctggcctgttcgcagcgggaggggct

SEQ ID NO: 3267 - DNA, 2300 bp, Homo sapien
ttagacaattaaaatatttgttgaactgaattgaataaagctttggggggcacagagcagctgctatggtttttgtttgtttttgttgttgtcgtttttgagagggagtctccttctgttggccaggatggagtgcggtggcgcaatctcttggctcactgcaacctccgcctcccgggttcaagcgattctcctgcctcagcctcctgagtagctgggaccacaggcacacacaaccacgctcggctaatttttgtatttttattagagacatggtttcaccatgttggccaggctgatctcaaactcctgatctcaagtgatccgcccgcctcggcctaccaaagtggtaggattacaggcgtgagccaccgcgcctggctgctatgctgttttgcttctttggtatcgtgtagcacattcagtacaagtgatgtcctccgctctcaataagtgcttcctaaagaactcacatttcacccattcagaaccttgcatggtgtagtagctgaagttactacttcaaggactccttctctttatcttgggtagagaggaacaatgtgaactcagcaaagggatcatgaaaacagattttctcttatgttacttgtagaaagcttttagatttatcattgaaaattgcgaattttgaaccatatccattttgacttaattgtattttaaaacagtggttctcaaaaaagtgtggttccgggaccaacatcatcagcatcgtgggaacttgttagaaacacaaatccttgggcctcaccactgaactaatgacttagaacaggggttggactggggaattctgtgttttaacaagtcctccaggtgattctgacgcatgccagtttgagaatcacttttttaaaccaatgtttaagtccaatctaacctacttaactattaacagtctacctggctatctacctgtggtagtgtagtatgtaacagcccacagcacacatgctcaattccaagcctatctgctctccgcaatcagtatattcctcctgcaatttatcatggtatgaaaggcccagtgatacacatatttggtcattttcaaatagtgcctgccagcatagtggctcacaccagtcatcccagcactttggtagggtgaggcgagatgatcatttgagctcaggagtttgagaacagcccggacaacatggcgaaaccccatttctacaaaaaaaaaaaaaaaattagccagcggtagtggcgtgctacttgggaggctgaggtgggaggatcccctgacccctggaaagtggagactgcagtgagccatgactgcaccactgcactccagtctgggcgacagagacagaccctgtctgaaaaaaaagtgcccttcacagaagcttcctcagggtattagcatgagcatgtgaaagtacagtatgtttatcaaacacataaaataagcagttataaataacgtcagaataacacaaggaggccaattatcaaaatgaaaggctagttttgcatgctgtgctttgcggagagaaggaagagggagttttcatgttattacacttttgatagcagaatcctatattttggtgcagaggtggcaaaataaggcggggggtgctggtgcgcagaagctgacaaggttagaatgtgcagcgtttttacgacggactggctttactcatttcctgcctcacttctctcctatctgtataggtttttcttttcgtcctcctctaccagtacgctcccgcctgccgcgctccgcccttgtgcggcgcacgatcggagtcagtgattaagccggctccaagacaaagcggaggccgagcccaggaagcaagcgcgctctccgccccgcctggagggagggcccaaccacagcacagccgcgctcactcctcacccggacgtgacctagttctcacagaggcccggcctcttccgccacaactccggcccgcggtcccgccccgttccgtgaatggtcggccggcctcaggtcaaaaaagcgtttaggtgtctgcgacggagcctccggagaaaggcaagcacgtcgcagccaatgaggtgatagaaacgcaaagcagcgaccaatgactagctgagttgggctgggccggccgacgaatcacgaggcttcgcacccggatatggttatgggctcggaaatctagttcgggaaaagtgtgaggggctcttcacgtggggaaggaacagcaggcgcggaggagggggcaagcgtgtgtgagattcagtggtccatgcgtgcgtttgtcgtgtaagggtcattcctggggtttgga

SEQ ID NO: 3268 - DNA, 2300 bp, Homo sapien
tggttatgggctcggaaatctagttcgggaaaagtgtgaggggctcttcacgtggggaaggaacagcaggcgcggaggagggggcaagcgtgtgtgagattcagtggtccatgcgtgcgtttgtcgtgtaagggtcattcctggggtttggagtgggggaacaaatcaatgtggctgtttttccgtggaaagaattcccactgcagtgtcccggagcctgcgtgtggtgggcaagctcctcaaatggtatctcacagggaataggggagtcttgaaaacgcagcttcggcagtaggaacatgaacctcttacctaaaagttccagggagtttggctccgttgactattgggagaagttcttccagcagcgaggaaagaaagctttcgagtggtatggaacctacctggaactgtgcggggtgctacataaatatatcaagcccagggaaaaggtgaggagcgcgggttggtagcccttcgtacgtgctccggaaggtgggaactggtaacaggaatcttgcacttggtggacagtgacaggcgggaggaccctagttggacgcatatttcagcatttcctgcattgttcctgctaaaagacaaactagaatattctttcaggccgggcgcagtggctcacacctgtaatccgaacactttgggagaccgaggtgggaggatcgcttgagccctggagttaaagaccagcctggggaacatgagacctcgtctctacaaaaaatgaaaaaattagccgggcgtggtggcgcgcatctgtatttccagctactcgggaggcttaggcgggaggatcgcttgagcccaggaggtcgaggctgcagtgagccatgatcacgccactgcactccagcctgggtgacagagtgagaccctgtctaaaaaaaaaaacatttctttaaaggttttcagataatagacctcccaccccagctcattcttggattaataaccctacttgaagagtgacttcccatcttgaaagtatgttcttctgtcactgtgcattcctgtgcaacctgcagcaggtgtgactttgtgtatgaatttgtttttcaaatagtcgttgagtgcgccccaagtttcaggcactgctcagtccttaaactataagagcattaagacgtaaaccctgcacatgttccagaagtgaaacgtgataagtacaacaatgggtttggtataggtgagattgtactggaggtagggaaggaggaaggtagaaaacttaacatttgtggggaagctttatgtgccaagccttatgttgggtgctgtgtatgtgcatgtgcaatctttgaattctcatcataaattcaggtgagtggccatgcatacattttacagatgaggaaactgaggccccgagagccacttttttttttttttttgcccaagatcatgtccaggtggtcatgtggggatttaaactcaggcctgtctggctccagagcatatgcacatctctttgtaccatgcttttccaaagatggcaatatcagaatttctaagtttgaatgggagattgctccctggagagggagacaacaatctgaattttaagttcggcttcagaagatagccaaatatcatgagatggaatccgtgatggaagtaagatttgaatcctcacaaagtgtactttattgtctaaaggagccaaaggcatgagtagagtgaggaaatagggttattcctggcctaggatttcaactgtaactctatatttggattctctgacttcctattaattcctgagtaataagtgcatgatttagagaaaagaacagttatgattaatttgtttctgcaacacaaagcccattctcatataacctgtattgtagctgaatgtggttttcactagcaagtatatgtggtgtttcaagatagagtctagcatcaactctacaatgtcgctctttctctggcagtagcgtctccaccttctgaaaatgtgactcagccaaggtgagacttgattccttgaagtacctgaagtacagtcctttgctttgattacctccctcttgtctgtgaattttttctccaggtgctggtgattgggtgtggcaactcagaactgagtgagcaactgtatgatgtgggctatcgggatatagtgaacatcgacatcagtgaggttgtcatcaagcaaatgaaggaatgtaatgccacccgacggccccagatgagcttcttgaagatggacatgacgcagatggagtttcctgatgcctcgttccaggtggtgttggacaagggcaccctggatgctgtcc

SEQ ID NO: 3269 - DNA, 2300 bp, Homo sapien
tgtcatcaagcaaatgaaggaatgtaatgccacccgacggccccagatgagcttcttgaagatggacatgacgcagatggagtttcctgatgcctcgttccaggtggtgttggacaagggcaccctggatgctgtcctgacagatgaggaagagaagaccttacaacaggtggacaggatgctggctgaggttggccgtgtcctgcaggtgggcggtcgctatctctgcatctccctggctcaggctcacatcctgaagaaagcagtgggccacttctcccgggaggggtggatggtgagggtgcaccaagtggccaacagccaggaccaggtgttggaagcagagcctcagttctccttgcctgtctttgccttcatcatgaccaagttcaggccagtccctggctctgcccttcagatctttgagctgtgtgctcaggagcagcgcaagcctgtgcggctggagagtgccgagcggctggccgaggcggtgcaggagcgacagcagtatgcctggctgtgcagccagctgcgccgcaaggccaggctggggagtgtgtctctggacttgtgcgatggggacacgggggagccacgctacaccctccacgtggtggacagccccactgtgaaaccatcgcgggacaatcattttgcgattttcatcagtgagttgggattgctccctctcttccctggaggggctggcttacaggggctggggcttgggctggggctggggctgaggctgggctggggctttggtgggattctggactgttttttgtcttgcaggggtttgtacttccagaggattagactacccaaggcatgatgaaaggagagtaatagctctctagcaacctacttggagttgagacctattccttttcatctgccattgcaaaggcttgatgaagtgtgagaatggggttggtagggaagagagagaatagagataaatttaggaggtcacatatgatatagagatgctagttactttgtagcatggagtaatggaagtaatgctggactagcaagtctaagacataggttctagtcccagctgtagcctgtgagctgcaggacctggggaagttgctgtgcttctctgcaaaatttggagaggcagcatagggtagcagctaaaaaagtgagctctggaaccagactgtttgggtttcagttttggctcagtcatttcctgatggtgtgacattagacaggttacttttctttctctgccttgatgggattgtaactctggtgtagttgtgagaagtataaaagctcttagaaatggtacctggccttggaagtgctgtgtaaatgttagccattattactgaaagcagtaagttatatcagatttatcttaataaggataaaaaagatagtaggaggaagtgctttcaaaagtggaacattgtagacaaatgcaaagtgtttatggtcttggtgttacggtaatttgtttcctggtgactgagctagtttttcaagtattctataattctgtctgtccatgtgtggaaataaatagtgcagtgaatacaagcgtgggtagagtctggggctagactgcctgggtttgagtcccagcttcaccatttacttattgtgcgaagttgggcaaatagtgtaacttctgtttctcagtttcctcatatgtaaaaatgggaataatactactacctgcatcttggactgttggaggattccattaatatatatttgtcaacagcttggagtcatgcctggcatggcttatttgtgttggcattactgctgtttttcttgtggtaggtgtctgcctccttcccctacggacatgcccacacttcttctccacccttggtcctgccttatgtctgatgggctgctttgccctagatgttgtgaactagagaattgttagctcctcagtgggtcacagttggggaagatgctggtcttggacagggactggctccctgccgtttgggccatattggttgtgggcttgatcactttccaggactccctgtaaccaagttcttttttctagtccctcagggccgggagaccgagtggctctttggcatggatgagggccggaaacagctggcggccagtgctggcttcaggaggttgattacagtggcccttcaccgaggtcagcagtatgaaagcatggaccacatccaagctgagctgtcggctagagtcatggagctggccccagctgggatgcccacccagcagcaggtaacaaagctttcgtacggctttcatgggtctctgaagtcatgttagcagcc

SEQ ID NO: 3270 - DNA, 2300 bp, Homo sapien
taggtgtctgcctccttcccctacggacatgcccacacttcttctccacccttggtcctgccttatgtctgatgggctgctttgccctagatgttgtgaactagagaattgttagctcctcagtgggtcacagttggggaagatgctggtcttggacagggactggctccctgccgtttgggccatattggttgtgggcttgatcactttccaggactccctgtaaccaagttcttttttctagtccctcagggccgggagaccgagtggctctttggcatggatgagggccggaaacagctggcggccagtgctggcttcaggaggttgattacagtggcccttcaccgaggtcagcagtatgaaagcatggaccacatccaagctgagctgtcggctagagtcatggagctggccccagctgggatgcccacccagcagcaggtaacaaagctttcgtacggctttcatgggtctctgaagtcatgttagcagccagggaggcagagggagccttggcaggagctaggactagagtctgtgactcttcatctaatcctggaggggtatcagcagctaagggttaaatggcagggaaactgtcctttgccccaggcaatgagaggaaagtgagcacagtagcgtctgtgtctgggggagcctctcagagtccatagacatggcaggatggaaatgctctactcattgcgggcttcagttcttcctaatttgagttgctctgactgtggatttctccttccacactggactttcttggtcattttgcttcttagaactatcattatctgagggtataaatggaagagggccaaaacagctcagcacagttatccaggtattcacattgctggtcaggtgttttactgggaaggaaaccgaaggtttttgcctaagtggtgatatggtattatcagttaacaccaactgtcttgtgctatcctggtcaccatgggtaacgaacaagtgattttactaaaagaacttcatgatgaggagttgatccttttttttcttttttgagatagggtcttgctctgttgcccaggctggactggagttcagtggtgtgatcacggctcactgcagcctcagcctcaacctcctgggttcaaaccatcctcccacctcagcctttggtagtagctgggactataggtgcaagccaccatacctggctagttttttttttacattttttgtagagacagggtctccctatgttgcccaagctttgatccttcttgataggtgggaaagcaaaggtatctagaggcttggtgcaaatagtaacagatctgaaaaaaaagaacccaggctcctgggttcctggcctgtggttttgcccactaggctgactcgtgtttacagatgaatgtaagtttgattcttcctggccaactttggggttgatgacccctatttcaaggaagcccagatcctctgaggagcttcatttgtggcctctcaccagtgcctgagtctgcagggtcaggagatattggtgattattaactagtcttataggtctttaaaaaaagaaataaagatagggggaaggagtgggaaagtttagggggaaagtatatttttctcctaaggttcagaaaagtgggggaaaaatagatgagaataatcaggggaaaggaatatctctctagatttggagtggttgtttctcccatggattttgttatctttattcttgtgtagattccttctcataatcacagccccttcctgagggttccctctagcttttgttatcctggactattgagagttcttttaggggttactgatgagaaaaacccctaaaagaacttggggagaatcagctgcatctcactagttgtttgggagatctttatgtgtccagttgattttcaaaagatgaattaaacctttgagatcagttcaaaggctccagaaaagtactttaatagaatggcaaatctgtggagtagttgttgtctagaaccgtggtatggggatatatacacacaaaagggaaggggttataatttctcttatttcttaaatgagctgctgttttgaccacatctctggttgtaccttcaggtcccctttctgtctgtgggtggggacattggggtccggaccgttcagcaccaagactgcagccccttgagcggtgactatgtcattgaggatgtgcaaggggatgacaagcgatacttccgtcgactgatcttcctcagcaacaggaatgtggtgcagtccgaagccaggttgctgaaggatgtgtctcacaaaggtga

SEQ ID NO: 3271 - DNA, 2300 bp, Homo sapien
taggattctttgactgcaagtaaaagaaatatgagttgaattaggttaggcaaagaggagaatttattataagtttattggcggggaggttgtacaaggaactgaggacaggattacagttggacatcagacatgaacaagattgaggatacaggtactatccggatcttccctcttctttccctgtgctcctctccttgtgtcttttcacttttctctttctctgaagatgagcacttcccttctactggtgaaatcttactaaccatagttgccaatgttattcctcacttatagttcagtcactcagacaaaggccaatctctctctcaattgcatactcctgggaaaaggctttgattggtaaagctcaagtcaggtgcccaatctggtgcacacagctatggccagggctcagtttttcttcatgcctttctatcttcatgactgctctggctacaaccatgcattggatggagtgtttcttagaaaaggtttcctgggcagacattctaatagagatccacttcagtggagatgcattcagttttatttgtctttttctgctgctttaaaaaaaagttgagatgtaatgtacagtaaaatgcacatcacttaaaagtttagtttgaggagttttgacaaatgtatgcccacatcccagtcaagacatgggacatttccatcactccagaaagtttcctcatgcctcctacagtcaatctccactcctcaaagacaaccacagttccgatttctattaccatagaatagctttgctggttgtagaacttcacatacatgaaatcaaaccaatatggtctttggcctttttcattctacataatgtatctgagattgttgctatatcaaaagtcttttttgtggcagagattatttcactatatatatataccacgtttgtttattcattcacctgttgatagacatttgggttgttttcaggttttttgacattatgaacattttaatatgtctttttagagttagaaggaactgtacattaaatgctgagattacaaaagatgacttcagttttgaataaattgagtctgtagtacttgtaggacactcaggtagtattctgggctcctcttggagtacagtctaagttgcagaagagagacagggtctagcaatgtaaatttctgtagtcgccagccttgattcagagttaaagctatgggaaagtcctcaggcagaggacaaacattagacaagaaaatgcccatatatgaaaccctgcgaagcatcagtatttgaggagcagactaaaaaggaaccgtctgtggaggctaagagaagcatggccatttatctttgtgtcccgatcatcaggcacaggaccccacacacagtcacttctcaatgtgctaaatttcacagaatgcgtccagggtacctggttctggatagatccggtagaaggagatagaccgggagggcaaatggcatgaggagtctcacaggccagagtgattaaaggggtgtatcggggcggtaaaccctacagactctacctgtgcttatgcggggctggggaggacgagtcattacagatgaagaattaagtaaggtcagaccactcagggccttagatggatgtcacattgaagaatttagactccaacaggcctgccaccctgggaggagtcatcgcggattctggagaagggcgtgacagaggagatttcctttcgggaagtgtagtctggcagcggtgccccggtggtggcggcggcggtgctgctgttgctggtgatcgtgtggtggtgttagcggcgatagtgctttccactgggctttggcttggtagccgctgaaagagaacaacgctgccgctgctgctgatttcatgccatttcctgacccggcgctgtaacttggcctctgagccttggccacagaacgcagaggccgtggcatctggccgcagctgggctgcagtgcgtgcgcgcctggcctggtggtccgatgggaagcccggggcggggcagccgcggggcgggggcggggcgtcgcggagataggccacgcccctgcccgcccgcgcaggcgcgctgcgggtcgttagctgtcagagccaagcggcgggctggcggcgggctccgacgtctgcgccaggacctggctggctgagcccggcgcagcagcagcagccagggcagcgcggcccctactccctgtcaggtcgtagaggcgagcagggaccagctggtcgccggcccctcgggcaagatggggaaccgggagatggaggagctgatcccgctggtgaa

SEQ ID NO: 3272 - DNA, 2300 bp, Homo sapien
atgtaactaacttctccctccatcttagaacacattctcctcttggcttccataacattacattttcctggtttttcccattctacttacttagtcccctttgactagtttgcccttcctctctcttacctctaaatgttgaaatgacatagatcttctcctcttttctgtcctcatacatcctctctagctgaactcatctaggagttcagctcctagatgagttcatctcatttaaataccatcaatatgccatatttatgtgactaccatagttatgtctccaactctgaactccaaacttggatatccaactaccctactggggggtgcctcccagttaggctacttggcggtcagggacccacttgaggaggcaatctgcctaactgggaggcacccccagtaggggcagactgacacctcacacggcctggtacccctctgagacaaaacttccagaggaacgatcaggcagcaacatttgctgttctgcagcctctgctgctgatacccaggcaaacagggtctggagtggacctccagcaaactccaacagaccttcagctgagggtcctgactcttagaaggaaaactaacaaacagaaaggacatccacaccaaaaacccatctgtacatcaccatcatcaaagaccaaaggtagataaaaccataaagatggggaaaaaacagagcagaaaaactgcaaattctaaaaatcagagcacctctcctcctccaaaggaacacagctcctcaccagcaatggaacaaagctggatggagaatgactttgacaagttgggagaagaaggcttcagatgatcaaacttctgcgagctaaaggaggaagttcgaacccatggcaaagaaattaaaaaccttaaaaaagattaggcaaatggataactagaataaccaatgcagagaagtccttaaaagacttgatggagctgaaaaccatggcacgagaactatgtgatgaatgcacaagcttcagtagccaattcgatcaaatggaagaaagggtatcagtgatggaagatcaaatgaatgaaatgaagcgagaagagaagtttagagaaaaaggaatagaaagaaacaaacaaagcctccaagaaatatgggactatgtgaaaagaccaaatctacatctgactggtgtacctgaaagtgacggggagaatggaaccaagttggaaaacactctgcaagatattatccataacaatattaaccttaaatgtaaatgggctaaatgctccaattaaaagacaaagactggcaaattggataaagagtcaagacccatcagtgtgctgtatcaggaaacccatctcacatgcagagacacacataggctcaaaataaagggatggaggaagatctaccaagcaaatggaaaacaaaaaaaggcaggggtttcaatcctaatctctgataaaacagactttaaaccaacaaagatcaaagagacaaagaaggccattacataatggtaaagggatcaattcaacaagaagagctaactatcctaaatatatgtgcacccaatacaggagcacccagattcataaagcaagtcctgagagacctacaaagagaattagactcccatacaataataatgggagactttaacaccccactgtcaacataagacagatcaacgagacagaaagttaacaaggatatccaggaactgaactccgctctgcaccaagcagacctaatagacatctacaggactctccaccccaaatcaacagaatatacattcttctcagcaccacaccacacttgttccaaaatcgaccacatagttggaaataaagcacttctcagcaaatgtaaaagaacagaaattataacaaactgtctctcagaccacagtgcaatcaagctagaactcaggattaagaaactcactcaaaaccgctcaactacatggaaactgaacaacctgctcctgaatgactactgggtacataatgaaatgaaggcagaagtaaagatgttctttgaaaccaacgaggacaaaggcacaacataccagaatctctgggacacatttaaagcagtgtgtagagggaaatttatagcactaaatgcccacaagagaaagcaggaaagatctaaaattgacaccctaacatcacaattaaaagaactagagaagcaagagcaaacacattcaaaagctagcagaaggcaagaaataactaagatcagagcagaactgaaggagatagagacacaaaaacccttcaaaaaatcagtgaatccagaacctagtttt

SEQ ID NO: 3273 - DNA, 2300 bp, Homo sapien
ttaaagcattgtgatttaagacggtctttggtagagactaataatctaccttcaagtgaaatttctgtccaatagaagaataaaaagaaaaagaaaatttatggatgtctagaaaaaacacagaagactaaataattccaatccacctccaggaatcccatttttacttattattgcaccaaaatattttttcctattattgtttttctaaacactcttaagggagataaaatgtaagatcatagaagaaactgtagagcaaaaacacataaacctcataaattctatatggcaaatgtaagggcgaaaaaccacatcattcagaataaaagtacaaggcaaggaaatgttgccaccttgagaagaaagactcttcatgatgtcagtaaagcactagaaaaatggagtccatataagtttgaaggaatagagaactttttattcctctatcctcaaatggtaattctaacactaaaattttaatctataattttttaacaagcatcccaaagatgtatccaaataaaatgtttattatttaggtaatatagtacattccaccaaatatgtgatctgaagccttcccaaaggtttaagatttaattcagaattttattttttgaaaatttatgtggcctaaaatagaacttgaaagtagtccttctcaaatgagatcacttctgaatgtgctccccttcagcatattaagatgacagaaaactacatgacaagagagtcaaaaaaatcattcatcagttctatttacttcacatctgacctaggcaagccctggcaaaggaggtatttggaagatgtgggcaggaacccccagttgtaaaagggagagtcctcattagtaatgctgtttcttcggaccacaaatttttttaaggactgagttctccactcaaaaatgaaaaatcagtttcttggtttaaaatgttcatatggcatgttacattattttaattgtatccccggtccagtgactaccatttaaaatcagtgataactaagaaagttcaaaggctccaaaccaaggcatcaactgaagctcatgtatagcaggaaggaggtgacttgatgtaaaatagcacatagcatgcagtcttttgtcctttccttcccctccagtccaggcatttgatttttaaatcaatattcttagtggatagcattcttcatcccaatagacaaaaatgtacctagatgatttcataccacctccccaaatgaaaaccgaagttgtcaaagagaaggttttcttcaattcattttttaaaagtgtttggtacttttccactttgtcttaaacatggacttatttttatatgcagtgttacacagtttagatgtataaaacttaaattgacctgatgaatgatgagaaggaaaaactccagtcataacagaatgaaatgacaaccttactcagttttccttaacaaagaagtgtgttcccttccttacattctataggcaagaaaaaagagggcaggggaaagggatggggggcagcctggagtaaaattaaattatgctaagatttgttaatatgtatttagtaaatagtatttctatgtttcataatatacctttccccaactcttcttacctccacctccaccctgctatgtttaatagacttgaaaaattactccctttttcagagttgatcataactcaggatagtcaggaagagccaaactattatgcctttagtaaacataatattccttatatattttcattcctttatttatgcatcaaacatttcttgaattcatgataatgtcctggaccctgggaataccagagaagtaacagaataaaagtagcttacaaaatagctaaataagcaattacaatgtagtgctacaataagagaaaagtttggttgtctttccagggagaactgttctgacttcagtactgaagcagctatctgagttttagtatactgttatcaactttacccaacacatgctaatgttccagaacattgtgattttgacttctaacaaagaaaggaatactagaactcatttcagccaatcagaaactgagcttttcattctgaatggaattatatgattcaagatgtaaatcacacagatgttggtagagaaaaaggcatactggtattgaaactgtaaactggcctgtttacttcgtctcctaacaaaaaacactttggattcaggttctccacagcagtcttccactggccacagtgaggggagctaggtttccccagtctccagctagaaaaactcagaacatctaaagatctgaaagat

SEQ ID NO: 3274 - DNA, 2300 bp, Homo sapien
ttatgtaaaaataacacaactgaataacgagcacttgaaagcacttgtgaattttgttctgaaaatactaaaaccgtctacctatttactgagaatgagatttttttttaatgtacagtagacaaagcaaaggtacatgttactaaagtggggatgtggagacagtgatgggaatttgcttatgaagtcacttatccatgggcaggagggtacatggtagttatcaacaggaggagaaactctttttggggagtctggcttttctaacgagctgtttcgaatgccaaggagtcattcctttttagtctgtcgtgtgcctttggaatggcctctatgcctgccctttctctttctctctgccctctttctggtttctctcattcaccccaacactacctcacacctacccttctgtccatgtccccttcccagagtggggtttatcactacacttaggaaccatttcatcaaaaatggagaagggacacggtaacccaattatttcaagagacagttgaaatgctccctagatatgtaattcctgcaattttgaaaaatagatttatgtgtcatatagtagtttgtttggaaggagtaggactaacaggaatgtaggagggtgcctcaaagttacatacagagttactattctataaagatgggaacttactgttctagacttttgatggtaaaaatgtgaaaatttcagactacagcagtggagaaaatgtggggtgagaaagaggatggaagtgttttgagagacagtgtctaggggaaaaattatcttatactgttgagtggtagtggtggagagggaaaaattttgagatctcatctcctctagccaggcctatactcagtgatcatttttttctgagaaacccggattatttctatttttaaagcacttgacttgagtttctcaatggatcaaatgtgccctctgataattgtccccatcccttaagaagaaatcatcttctgtgagatgtttcgtaaaacttttgccctcggtggctgagaggttaccttctgggaaggctgagcactaatggcttgtttacaaggctggcctcactaagccaaggaatcttgtcaaattttggaacagaagcctagagggaaatagagaacattttacagaatatatcacacttaaacattgctatcattacgatggccaaagtcagctaatagcagccatatagtgaacactttacaaaccatttttatatttaactctttaaccatcctataaagtagccaagtgcaaataatgtcatctccattttactgatgaagaaatcaaagctcaggtagtgtgatttgccttgagtcactgagctagtaaatgggtcatgttttctgacttttatttccactgtatcctgtgttttactacatccctttgtttctttattacttccttctgtttatatatcctttaatatttccatgaactcagtttaattagcaatcttgtcctcacttcttttaggaggtaaagaggaaaaaaaccaagctttgaagctatagacaactggatattgatctctgttcatctacttcccaggtgcctgtctttggacaaatacaacttatctgagccttagatttgtcctctttgaggggggagatgatataatcagtgtaaaggtcaatgcaccaaaaaagagagtttcatgagagcagcaatttttgtgtgtttcattcacggctgtatcatgagcaccccaagcatggcttgttacatgcaggcattcaatcagtatctgtggaatgaacgcatggatgcacgggaagtcccagctgagggcctgacttaataaaggagcgcaacaaaagcggccattatctctcacctactggcccagcctctttccttgtcctctcttgccttacccagtccttcagatggcacatcccatctttcaataggggattgctggggatttgccttcctaggctcagagcattcgggtttgggccagtctccaggagaggagaccggaggtccttcgagcagccaggagggggcagcagtcacgtcgcgatggttccagccggggaagggtgccctcgctaaggagattgcggcggacccggaagtgcttggccacagtcgcagccccggcgccccgaagcgggaaaaaggctgggtgccgccgtcccccagctgcgcaaccctaggaactctcgggtaggtgggttccgtgtaacggtcagtgtttccggggctccttttcctctgctgcctcccgcagacccaaggctgagtgaggggcggcggcggaagt

SEQ ID NO: 3275 - DNA, 2300 bp, Homo sapien
gtcacccttttaggaatgggagaactcatgttcattgtgcagtttaggccctagtgacttgctgaataatccaaggatctgcagggcaaacgagttatcctgtgtgtggtcagtgctttatagattttattgaattgggagattctgttacagcagggtttctcaaccttggcacttttgactttttggccaaataatttttgttgtggagggctttcttgtgcaccgtaggatgtgaaacagcatccctggcctctactcactagatgccagtagtacttctccaatgtgacaagcaaaaaatgtgttcacacaatgccaatctcaccctggggggaagtctgccccaggttgagaattactgtattatagttaaggggtggttgatagtggttacttagcctaagccttaaaagattatatatataattaaatattatatatgaaagattatacattatacatgctctttttctatattctttcttgccatttttggcatatgttatacttttaagtatggtgacattcatctatactagttttattttatataactattactcactttcttatacttgtctattgagttgtaagaaaattttctctgttctttttctcattatatttaacagatatgtggaaaaatgtctaccagttctttaaaggtcagctctatggaacttctatttatttcatctgaagtcttagaataggaaagaatcaacacaaatatagaaagtcacgtgaagaagctaatttatggggaaaatgagttcaattttgtgcaggtaaaattggaagtgatagaataatatgtccagcaactacttgaaaagaggatgggatataggtttaggagtcaacagtatagttgaaaattaaaattgctcaagagaaaaatggaaaaagctcggagtagtgaaggattaaaccttaacatgaaaccatggaaatgaagctgcaaaaagagaaaagaacatttatagattgaaatagtaaaagctaataattggatgataattaggtgaatggaaagcctaccacgggggtattaataaagctccaactgcaggagaaggaaggaaggaagggaggaaggcaggcaggcagtcaaggaaggaatgaaagagaaagaaaaaagtaaaattatttgtacttgcatgtttcaaaaaatcattgcagggacttggtggaaaataagtggatgggtttgtgagtttgggatgagagggttaggagatgtaacttgataacttcctagatttgagataagcacgtattctaatataacttctttggctgtgatgcactgaggatcagctgagggatacctcagctgtttcctatcctgaataaaagttcctggagtaagaggaaaagagtgtccaacatggtaaagaatgtcaatttatccctaccctttcattgcccctactttcttttaaacttgcatattaatcatttgatactgtttttgggtgagataaatacttgcttcccgcaataggtgacagatgaaaggattttattgtcatatactaagagtggcatcagcagataagtggaactgtacctaattactgccagaaaaggcagttcagggtgaactcctttaaaacaaaaattatcaccctttgtataatttctctaacatcaaattgacttatatccaagaatcacagagcggatcaaatcattcagttctttgggactataattaacatccaattcaacttagaaggttcataaggaaattccgcggctcaaaattaggcgttaggtgggcattttactgagggttttttccctacggccacatgaacaataagtaacccgtcctttaaacatttttcacactaaacattatgccatgttccaaggcacagaccattgcagcctccgtcccctcagcggcgtaaacacttggaatgggcatgctgccccgttacttagtattgagaagtggtcactttttgctcttcttaggtgagtgtaagcgactgccttccccactttaggtgaaccccaggacttggagcgtctgtgggtgctcctctaatggggacaactcctcccttccgactccatcgcagagaacccaaagttcgaaaccaacagaacgaaaagcaacgaagcacacttaaagtgaggaacccggcaagcggcgaaattcttgctgaagagaagaaaaagcgaaaggttttccgctgcaaccaatcagatgagaggattcttggcacgcccctttctatctaccaatcaacatctagctcaatggggcagtccattgccacagg

SEQ ID NO: 3276 - DNA, 2300 bp, Homo sapien
gtatagttgaaaattaaaattgctcaagagaaaaatggaaaaagctcggagtagtgaaggattaaaccttaacatgaaaccatggaaatgaagctgcaaaaagagaaaagaacatttatagattgaaatagtaaaagctaataattggatgataattaggtgaatggaaagcctaccacgggggtattaataaagctccaactgcaggagaaggaaggaaggaagggaggaaggcaggcaggcagtcaaggaaggaatgaaagagaaagaaaaaagtaaaattatttgtacttgcatgtttcaaaaaatcattgcagggacttggtggaaaataagtggatgggtttgtgagtttgggatgagagggttaggagatgtaacttgataacttcctagatttgagataagcacgtattctaatataacttctttggctgtgatgcactgaggatcagctgagggatacctcagctgtttcctatcctgaataaaagttcctggagtaagaggaaaagagtgtccaacatggtaaagaatgtcaatttatccctaccctttcattgcccctactttcttttaaacttgcatattaatcatttgatactgtttttgggtgagataaatacttgcttcccgcaataggtgacagatgaaaggattttattgtcatatactaagagtggcatcagcagataagtggaactgtacctaattactgccagaaaaggcagttcagggtgaactcctttaaaacaaaaattatcaccctttgtataatttctctaacatcaaattgacttatatccaagaatcacagagcggatcaaatcattcagttctttgggactataattaacatccaattcaacttagaaggttcataaggaaattccgcggctcaaaattaggcgttaggtgggcattttactgagggttttttccctacggccacatgaacaataagtaacccgtcctttaaacatttttcacactaaacattatgccatgttccaaggcacagaccattgcagcctccgtcccctcagcggcgtaaacacttggaatgggcatgctgccccgttacttagtattgagaagtggtcactttttgctcttcttaggtgagtgtaagcgactgccttccccactttaggtgaaccccaggacttggagcgtctgtgggtgctcctctaatggggacaactcctcccttccgactccatcgcagagaacccaaagttcgaaaccaacagaacgaaaagcaacgaagcacacttaaagtgaggaacccggcaagcggcgaaattcttgctgaagagaagaaaaagcgaaaggttttccgctgcaaccaatcagatgagaggattcttggcacgcccctttctatctaccaatcaacatctagctcaatggggcagtccattgccacagggaaagggcttggtgcagcttccctcacaacacacacgtcattctaggccattccacgaactgtgctcaaaagaggaaaacagtgcaacagttccaaagctgatcagtctcgtggtgagcagcgaaactatagacttctctaacaaaaccatggattctaggagggactgggaaagagaaaaacgaattctggaaggcaaactacaactcccaaaggcccttgcgcggactcagcgcgcgagggacgaagggcggtccactgtaaggggaaatgctgaggatcactgggctcctcccggctttctgaacgcaagccagcaagtgggcgggacctggggcgggcggagcggcgaaagcatctgctcctgcgctttgtggtctcctgcctccggcttctccgcctgcgacgtcgaagggggcgtggcctgcgcagaggctggtgggggtgcgggcgccgcgggacttgggtgacgcgtccctttccagctcagcggtgtgtgaggtgtcgcggccccgccggcgattggctgttgagaggcgagtacgcggcggccgttggtcgctggcctcacggagcaaggcccccggcgggcggggaggatatggggcggcagtggcggctgcaggaggcgggcgtggacgagccggtggctgcagcggcggcggtccccggagtcctgtgaagcgcccctgtccgcgcctctgtggggccctcagagagggctgccaggacgcgagccactgaggagccgctcagccagcgccatagcccttaggactatcggtcacattctcgcgctcctgctccggctcctccatcttggcctcggcagtggcggctgccgggaggatgtgccgccttctggcag

SEQ ID NO: 3277 - DNA, 2300 bp, Homo sapien
tttactgggtgatttgggcttgggaaaggtcggtggcagggcacctgttagggcattattgcagtatttcaagtgagagataaagtctgaccccaggcaacagcagtaagaaaaatgggagtagcgaggatggggcaggggggcagtacactgaggggagggtaaggaacaggtctcaggtaaaagcgacagtcctgggtgaccagttaaacgttgggggagaggaaaagaaaggagatgaagttgccaccagaaagagtggcctcaggagaaaggggttgtacagggttggggatggggtgggatgggcagaatgtatcagagaaatagtacccttggggttggtgtggtacaggtgagtgggcctgaatgatagtaatggaaatcccaaagcatgatataaaaactaacgaaatttgaaaagtaataaacatgaaaaaaatgaaaaattttgatttatgggggatttatttggcttctattggagaatgattaggactgaagctaactacttggaagttattggcatataaatggtatgtgaggccagaggaaatggtgagatgagcccaagtagagaggccagctttaaacaacaacaacaactaccaaaaaaaaaaaaaaaaaaaaaaaagcaaaacaaagaaataggacacagagttagatttgaatgtcagatatatgatgaataattgtttagtatattccatgtttggacatgtttaagacctacttgtcctaaaaataatgtattatttatctgaaattcaaatttaactgggcaccatgtatttcatctggcaaccataacaggggcagcacacagaaatgttggcagggaccaggcaggcctttcagatagtgaggtggtgtgtgagacacaggccagtggtggaggctgggtgacccagaactcctgtctctcattctcaggggcagctgctacatacttcccactgattgggtttgcagagatggcctcgagggtgtctgatattctgatatttcaaaacagaatagaaatatgtattttaatgtgtatttaatatatatattttaaaatatttttaatgttgatattaaaagtggtcagttgggctcagtgcagtggctcatgcctgtaattccagcactttgggaaactgaggcaggaggatgtcttgaagctaggagtttgagacaagcctgggcaacatagcaagtccccatctgtacaaaaaaaaaaaagaataaattagtcaggtgtagtgacttatgcctataatcccagctactcaggaggccaaggcaagaggattgcttgagcccaggagtttgaggctgcagttaactacgatagcaccactgcactccagcctgggtgacagagtgagactctgtctctatttaaataaataagtaaataaataaactgggcaaacaatgaaaatgaaaacattgcgaaatacaaagcagctctgtgggttccactggtttgcagcctctgatctaatttctaaagtgggtgtagcaggtttttaacctgtaaattatggtgatcggcaggtcagggtaaatggtagttgtgtgtggggaagagatgatggcaacagatgttttcctcctgcaaaaactaaaatgtgggagtgacttctctggccatgactccatggtctctcccctcagagccattttcagtaaaatttttatagtttaaaaaatacggttctgaacaatttttgttagagttattttgggatttttaaatagttttttggttgtgtatatggtagaattcttaaaattatacaattataatgtataaaaaagcatgcaattataattcataaaattatagccccactgaccattctcctgtagctgggagcagttcacactaacagggctatacccccatgctgacctgctctgcaggatcccaggaaggtgagcatagcctactaacctgtttgggtagcacagcgacagcaactgaggccttgaaggctgttatcagaaaattgtgggcggaaacttccaggggtttgctctgagcttcttgaggcttctcagcttcagctgcaaagtgagtgggtgtttctttgagaagcagaatcagagagagagagatagagaaagagaaagacagaggtgtttcccttagctatggaaactctataagagagatccagcttgcctcctcttgagcagtcagcaacagggtcccgtccttgacacctcagcctctacaggactgagaagaagtaaaaccgtttgctggggctggcctgactcaccagctgccatgcagcagcccttca

SEQ ID NO: 3278 - DNA, 2300 bp, Homo sapien
ataacatgtaatcctgataacttacaccaaaatcgtgccaactgtgactcattgctctagaatttcagaaagtcttgcctactgttacctgtcttaacttgaagtttcctcatttctaaatcctatttcatgaaaagaggccctagaatatagtcttcttgaaataagtatgtcatctttcttaagatactgtcataaggttaaataattaataaggatattccagggcctaacagtggttaaaggcggaaggaggaactggattttatttaaaacagtttctcatgtgaataaatgtttacctaaggtagcaagccagggaaattccctcaaaaatttggaaagcagacaggaaaaggggcagatcataaaaacaggaaggacataatttaacttccaattttaagttctgtgcttgtgtatatgaattccagatctgatgcaagtgcaaaggttatgggatcaaggcatcagtctttttctagagtaagtttattctttatccctgcattgcagcatctaagtacagagccacaaaaacatttgttgtgttgaaaaatcatttttgtgtaactggtcttttaagaagtagtttattgaacaaggtaaaatagggcccaaattaaaattttgacagttcagagagaaatattgctaataatattgtaaatagtgcaatattaagacaaaatggttggattacaaagcagtatctgtgggcttgagttttcactccatcattaaccagccagcagtgatttgagacactactcacaccctcttgtccttagtttcctttttttgtaaaggaggatgttaaatctctggacttttttctaatttataaatcgtcaattctctcttagattaaaaaataggttttccaaaatactttcattgtacttccttttgtttaagtaaactttaggtgaattttatcttgtgggaaagataaagaatgttcattcttttctaggatttaataattgaattaaacttcactacatcgctaaagagggtagagaagagataatctaacatttatggaatgcataaacttttcaccttcatttcattctccacaaaagcattataaagtgaaaattttctccattttacagtgaaggaaactgaagctcagagaactcaagtaacatgcctaaggccacagagcaggtaggaactgggcagtgccagcctctgctcttgaggtctgtctgatttaaaagcctgtgtgactgaggtccatagaaccaggagacttcctcaattttgtagtaaacccatatttttgggcccaggaagaaaacccaaggtttttttttttttttttttggaatagagtataagctctggctgagggcaggatgcaggaaaatatccttctgtaaaataacttcttatgccagaactagattatcagagtttaaaaatgatgaaatataaaattgagcttgttgtatttacaattttttattaaattcttgtaatacacttgatattttctagagactcagaatgaacgcattctatacactagaaattgatgaaacatttttgtgagtatagattttatttttccaggtttactgaagtataattgacaaataaaaattgtgggtatttaaggtaaacaagatgatgacttgattaaaactctattttttccaaactagagatcctagcctctccaacttcctaacactctgccgctcatgtacatgatatctggagtatggtagggggattaatctcaaactttattttttcttataaaaagtgattttcttatctagaaataatctggaatactttcttagatgagagcacaccactttattctcccaagcctcctctacacgtgcactgtactgccgtttgatttaggaaagaaatttttttcccctctgaacttcccttgtgcttttttttttatgttctgagtttgtgttggctttcagccttccgttccttttgttgtatttgatctggtgccaaatgagagtcagcacttaagttataagtatcattttctaacacagtgacagaaggaaaactccgccttccacacccactactaattaccatattgctacaaaacatgacattgcatccttcacccatcacttgtgaatttttgttttccacagctctcatttctccaaaaatgtgtttgagccacttggaaaatatgcctttaagccattcaagaactcaaggagctcagagatcatcctggaagctgtggctcttttgctcaatagttatgttgctatttctttgctccttcagttggctaa

SEQ ID NO: 3279 - DNA, 2300 bp, Homo sapien
ttcccctaaatcttttctatgatttaagacaccttggggaagggatatatgagctgctacattaacggatgatgatttttatctttaccaagtgacccacaatttgttactggtgcaataagttaagaaaatagcatacttttatgactgtcatttcacagtcactcaaatcagaactggaatgtcacaaaaacaactccctgttagcccagaggaaaaaaaaaaagaaagaaagtaaaggggaaattcagattagtcacaaagaagttcccccgcctgcctgcaaaagttgcagcgttaaaactgagagagtccgctttgctctttcaatcgccttttatctctggccctgggacctttgcctattttctgattgataggctttgttttgtctttacctccttctttctggggaaaacttcagttttatcgcacgttccccttttccatatcttcatcttccctctacccagattgtgaagatggaaagggtccaacccctggaagagaatgtgggaaatgcagccaggccaagattcgagaggaacaagctattgctggtggcctctgtaattcagggactggggctgctcctgtgcttcacctacatctgcctgcacttctctgctcttcaggtaagatgcaccactgggcgctgttttcccaccagctcatgctgatggcagctgcaacagctgcaaacagtcgcttggaaataatcttatgccaaaagtgttgagttttttttccctctccccacagcaatcgtaaagtgtggttaaacgcccttctgtctctcctttccttccttcttttcagcagtggcagtggtagggcagagtggaggtagggcagaggcacagcttctagatctttttctttttctttgcaatgcaagattccttgtatccctttataagctgtcactttgaagctttgagtcactgatatacctggtctacccattgtgatagtaatgtgtttgatcaggcaattaatattaaaaggaaataggaaagagaccagttccactttcccataatattcatataccctatagacctgcaaggtgattttctttgtaaagaatgctgaaggtatcaatattaatagcggagcaatgtgtgcgtgcatgtgtgtgtgcctatgtgctcactcattcaccccaatgatttaatcagatattgtttctcacaatctatctcttccagtcataatttaaagacatcatttcaccttttccctaccttattaaatacatcatgtagtaggagattatccttctagtattttccccatatagttaaaatatttccatttttctttcactttattcttgttccacacttctctcttttgcattattttttcttattcagtagttcagatatacaaacattattaggtatttaaggatgttcttcactgcagaagatgccactggagaaaaataaatctatactctcttcgtgttcctttgttgagctagtctgataatcttgttttctaggtggttgctttgggttagaaatgtttctccctgataaagttcaggtaatacaaactgatttctgatggtcttgtctgagattaagcacctccaatgaaaccagaatgagatgagcagtcttggcaaatgcctgggcttgtttctgcctacaggaaatagggttttcagtgcatggaggctggtaagagtgtgtgtggttatgatcactgtaccacagacagtgcttgtgtctccaaattccagaagtgtagctagtgtcatgctcaggtctgcagaacagtgagcacaacaacacattgatcctctcctcatcacaccacactcttatgtcttctcgcagaactctttgggtgaaattaaagtaggcgactcggggagagggtgtgggggaagagtaaggtgtccatggcaggatgcccaagacatcgaccggatgcccaagacatcaaccggaattaggctcttttgagaagaaaacaaagagagtaaccaaatatagaacagctgagtgcattcaccagtctgggagccctgagagtgctttttctaacaaccacagtgttacatatttccttacaccatgggatgataaaacacaggacacatggctccattcaaggctaactgattgcacaacggctctgagcaggagagagcaaaaggtgaaccacagttgtacagcttgctggtggttggggtcacattggactatcaatatccaggagatgttgagaaaaagaggggatcctttccaacaagtcatccagcaactctgggacagaaggaaagc

SEQ ID NO: 3280 - DNA, 2300 bp, Homo sapien
tgaaaaacgttttgaagatggaggactctgcttatgtgcctgagactgaaaggtcagcaatgataactctaatagtgatttcatttgttcaaatgctagactagcccagtgatgaactttggaatgcctagatagtctatcagaaatctgtgcctgaaacttccagcctggtgtgtgtgtatctcttcccacaaagaatgtgaagagctgtgaaaacgtgttcaataaaaaaagagacaattaagtgtaaaatatcacttaaacatcaacaaaaattacaactaggcaaaatatggtagtaggacgacaagacaataaaaatgagaggtgtgtcatccaagtgttagcctaaatgtgggtagagatgactctgtgcaaagatttttctttctcggagccatgatattaacactgagaagaaatgctgcttaaggtacaagtatgtgcatggtaaatgtttatttttttcattcttttgacagtaatttaaaaatgttatctacgattttcagcatgaatagtttttactactttttcagcttatttctagtttccaatagtatttatggctttttttttttttgctgtgactcttagtcattttttgaaaattgacgagtaaatagttactgattttaatactcttttatgaagaactattacacaagaattgggctttacacactgatttttccttcagcttttttctccacaccctgtatgtaacacaagctttgttcaagggaataactatgacaaatatgtttggatacaatttgatttctagttttggcttggagtctatgatattgtgccttagttaccttatctttcagataaaacttaaatttctcaacaccagtatgttctcctaatgcaaggcataattattgtagtgaaggtattaattcatattttaattgattaatactgtagtcataaatgtactttacatttcccacaaactttctcttttaagtatgcctcatttccattttttctgtgaagtggtataacaactcatactgtcaatatccaaaatatttctccctcctttctttacatatctgctgggtgcctcatggggagctgagagagacatacttggccacaaagagagacaattccgtcttaaacagcttttccccagcatccttatgttgtccagtacagtgccaggctcatgtgatgtactcagtaaatatttgcccatttgaactttacattataagtaattttatcatttatttcatttcattgtttattttagtggtaaagggtacctggtgtctattgatagaatactcttactttccaagttctgaggccagccacgacctcaaagaaagaaataatcttcaaagcttatttacatctattcatttgttcattcatggaaaaattatgtacgggaaaaatgtgaagtggaaggaaaggagacaaggatacccttctgcttcttttctggtatgcagaaaattaatcatataattgtttattgaatttgcctcaaagggttaaatgagagaaagattgcaagtccatctaacacagtgtctgacacatagtaaatgcttccaaaaggtagtttatttttatgcaatagactacaaccaaggatctctcctttacttctgcatgacccagtgtcctattttcttgttttgtctttttcattcaagaatgatctgtgtgtgctttctttctgaatctgtgagaggggttcaatgtttagttacatagtaaagtgcagataagaaccttgggccagcatttcccctaaatcttttctatgatttaagacaccttggggaagggatatatgagctgctacattaacggatgatgatttttatctttaccaagtgacccacaatttgttactggtgcaataagttaagaaaatagcatacttttatgactgtcatttcacagtcactcaaatcagaactggaatgtcacaaaaacaactccctgttagcccagaggaaaaaaaaaaagaaagaaagtaaaggggaaattcagattagtcacaaagaagttcccccgcctgcctgcaaaagttgcagcgttaaaactgagagagtccgctttgctctttcaatcgccttttatctctggccctgggacctttgcctattttctgattgataggctttgttttgtctttacctccttctttctggggaaaacttcagttttatcgcacgttccccttttccatatcttcatcttccctctacccagattgtgaagatggaaagggtccaacccctggaagagaatgtgggaaatgcagc

SEQ ID NO: 3281 - DNA, 2300 bp, Homo sapien
tcaattttagagtaagtgctgtggcgatgagaagaatgtatattctgttgttttggagtggagagttctgtatatagctatcaggcccacttgatccagagctgagttgaggtcttgaatgtctttgataattttctgtctcaatgatctgcctaatattgtcagtggggtgataaagtctcccaccattattgtgtgtgagtctaagtctctttgaaggtctctaagtactttctttttctgggtgctcctgtattgggtgtatatatacttaggttagttagctcttcttgttgaaatgaaccctttactgttatgtagtggccttctttatcttttttgatttttgttgatttaaagtctgttttgttataaactaggattgcacctgtttttttctgttttccatttgcttggtaaattttcctctatccctttattttgagcctatgtgtgtctttgcacgtgagatgcgtctcttgaagatagcatactaatgggtcttggctctttatctagcttgttattctgtatctttttttgggaggcatttagcacattttcatttaagattagcatttttatgtgtggatttgatcctgtcatcatgatgctggctggttattttgcaggtttatgtggatacttcattgtatcattggtatgtcagtgtgtttttgtagtggtaatggtttttcctttctatatttagtgcttccttcaggagctcttgtaaggcaggtctggtagtgatgaatttcctcagcatttgtttgtctgaaaaggatcttatttctcctttgcttatgaaacttagtttgcatatgaaattctgggttggaaattcttttctttaggaatattgaatactggcccccaatcttttctggcttgtagggtttccactcagaggcccaatgcttgtccgatggccttccctttgtaggtgacctggtctttctttctggctgtccttaacatttttttcttttttcttttttttttcagatggagtttcactgtgtcacccaggctggagtgcagtggcacgatctcagctcaatgcaacctctgtctcctgggttcaagcaaatctcctgcctcagcctcttgagtagcctgagtagctgggactaaaggtatgtgccaccacacctggctaatttttgtatttttagtagagacagggtttcaccacgttggccaggctggtcttgaactcctgacctcaagtaatccacccaccttggcctcccaaagtgctgggattacaggcatgagccactgtgcccagccaacattttttctttcattttgactttggagaatctgctgatacatatcttagggatgattttcttgaatagttatcttactggggttctcttgttcctgaatttgaatgttggcctatcttgctaggttggggtcattctcctggatgatatcctgaagtatgttttccaacttggttctattcttcctgtctctttcaggtaccccaatcagttgtaggtttggtccttttacataaacccatatttctcagaggttttattcattcattttcattcttttttctctattcctgtctacctgtcctatttcagagagatagtctgcaagctctgggattctttgctctgcttggtctattctgctattaatacttgggattacattgcgagtacttgtagtatgtttttcagctctgtgaggtcggttatggtcctttctatactggctgttttggctgtcagctcctgcattgttttatcatgattcttagcttctttgcctttggttaggacatacacctttagctcagcaaaattggcttttgtccacattctgaagcttacttctgtcatcttgggctcagcctagttctgagcccttgctggagaggtgttgtgatcatttggaggaaaaggggctctctgggtttttgaattttcaagatttttgcgttgattctttctcatttttgtgggcttatctatcttcgatctttgaggttgctgacctttggatggcgctttcatggattgttttgttttttcatctttttcttttagcagtctgtttactcttccttacagatgctgcagttagctgggggtccactctacaccctggttgcctcagtttttcctgtacttggaggtatcagcagtgaatgctatgaaacagcaaagatggcagcctgccccttcccctggaagctccatcccagggcggtactgtcctgttgccagcatgagcacacagtatgtagggggtggctggagaccccagtt

SEQ ID NO: 3282 - DNA, 2300 bp, Homo sapien
agagatagtgatcagtaaatactgagggaactcagagaccagtgccgggtcctccgtatgctaagcgccgtcccccgggcccactgttctttctctatacttcatctctgtgtcttatttctttcctcagtctctcatcccacctgacgagaaacacccacaggcgtggaggggctggcccccttcagtggacagctaattcaagacaatttaaaatgctccaaagtctaaagcaaacaagttcacagagtgcagaagcattgccagtgtacagcttctggcactgtaaattctaatgagtattttattatatttgcttaatttacaacagacaataatataattatgcctttgacagacatcaataatctgtttctgtattcattctccatatttatagagtattgtgttttctagctgatttccacaacatattgttaacagtgccttaggccaaactactcttctttcccaactattctctttcttccctacaaagggagttaaaacaaggagctgttaaaacttggagccaaattagagattaaattacattagctttaaacggttttgtgaagtggctagaaatttttaccagtaatcttactgcaagtcctgggtcactgaagaactcggtaaatatgattagcatgcacgcaccaacacatcactgtgatgaaaacgcaaatcacagtatgtgagtcactactctcaacattgccatgcccctgccttaaacctgccagccccatccagaggatttttctcatctctgaactccaatcatttacaccttcccccatcagaatttaccctacattttattataattgcatataaatatgccttccctgtaacagcagggactgtgtttctccactgtatggcctggcacagtgtccagcacacagcaggcaaagcaagagttactgcatgagccagtgtcatcatccaaacgatagctaccatttccagagcacctaccgtgagctgactagtttacctacattatcctggtggctttcccagaccagaccacccaaaccaaagcagccccccagtcaccctctaggcacataaccctattttagttctctgaatacgactgattgctgtctaacatattttggtttgtgtgcttattgtctgtcaccggtttcccttcacaagaaggaaagctccaagaggacaggcatcttatctaccttgtacttggctcatagcaaataaatgaatctaagccgcccacctccctgggtgacagagttgacctgcacacagtaggtctcaaagagtatgttttaaattttatatttagatttcaagataattgtgttgaatattttatggttcataacaaacagaaaggggagggcagaataaaaataaataaaagtttagttacattaccctagcactgacattggtacgggaatttttgctgcaataagaaagccacttcctctgacataaggtcacccatacttctgggtcttgccacatcctcttagacagttcatcgtagctgggctggctggggcggtcaggactccagacgctcacactaaaagaggggtggtagtcgagcagtcactccactcctctgtagggagctggccgcgagtgggtgcgcagcagggtgcgcgcggacccgtgcagcgcccagggcggctgtgcgaagccgccgcagcctgcgcgcccaggcgattctccaccttggggctcgccttcctgccgcgttcctcttccttccatccctaaagcgcgtacgccctgcagagtcaaacctggcgcatcctcaagcttccagggggcaacgtgaccgagccccgcatcacgtgtgcagagacggcctatagtgtctgaaggatgccacctagtcgcaggcccggcggcgccaccaacagcgaccgcggtagtccagctcgcgccgcgtcccggccccagcccggcccggcccagccccgccccgcgcccagccccgccccgccccgcgcccagcccagcccccgcggcccggcccccagcggccggcctcccgcggccccgcccccgccgccccagtccccgcccctcgcgccttcgtttattcctccgcgcgctgggacaggctgcttcttcgccagaaccaaccggttgcttgctgtcccagcggcgccccctcatcaccgtcgccatgcccggaggtctgcttctcggggacgtggctcccaactttgaggccaataccaccgtcggccgcatccgtttccacgactttctgggagactcgtaagtggccaccgcgtagccctgtcctg

SEQ ID NO: 3283 - DNA, 2300 bp, Homo sapien
tctaccgtgttcctaactatggctccctgataaagtaccacttttgatcaaatctagatggatctagaggccaataaacattaacaaaaccccaaaaaagtatggttagcttaaaaagtgacagcatttataactgttggcacagtaaatacgttttatgctaatatttaatctatacaagctaagagttctggaaatagtttatgtttcatggggatgggggatgagggctgcaggtagaaatgggaaggaacacaactctaaaaatcccaaggattgctggagaaatattactacctagatcctaagtataagaatggccataagctgtatttctaaagtatttttctgcattcaaggtttgaatattccatttctcaacctttttctggcctagtcctatctttcacaaagcttaacttttccctattcagtggctggaaaagggacttaagaggttataaagggttggataggcatatgatgtgtaagaatctgtccctggttctctgcacagccctgtccaatcactgattaatttcataagcctgtctccctggatactgtatataaaaaggatataatctggggaagaactgttgtcaagccttggagccccacagtgtagtgggaccactagtactccagaaccataatataactagacatgcctggaatgcttctgatgaaaactaagcaacttccagtttgctgattcaggagctgttaaaaaaaaaaaagggcaacaccgatttactactcctatccataatggtaaaactgccaagtcagatcacaggtcatcaatttggctatcatcagcaagctcatgtgctagaagcaaggtagaaagcggaggggacagtgaggggcaagccactggaaaacaagagagtctcaaagttggggagtacacgtgtcctggagcctggaacggccatcactagcaagaataggccactccagcggaacagcgtcagaaagtccttccctccaagtgttgcaagttctggaatctctgaaggcacacctacgcagagtgttcttggctcttcctaaagctgttatcaaatcatatcttggccattggaggcggctctggacaaaaagtctttcggccacctacttggcagctagtggttttaaatttcacattttgtgcccagaagcctgcaaataccactgcaccctcagatgatacgttggccttcctgtaacctatagccagcagctgtgtcctccgactttggctttagacacccatcctccccagggagcaaattccagaacggagggtgggagggcggtgcgaccctgggcactagtccggggaagtgatcgtcaatgccgccccgcccctgcgccctcggcctgaccacgctacctgcacagtttactaagacgagttaaatggacaacaaaccctcccgcgggcggtgagtttccagaacccgcagaacacaattttatcctccccaccccccaccttggcgtggccttgcccagccacgccggaggcggggaggccaggagggatcgagtggcccgcgcagggcaggccgaacgggtgccagctcccagcagcgcagccgacgctgagcagaggccacacggcctggcgcgcgccggaaccagtgcgggggaaggcgagggcggcgcagggggctgagcggccgggaggacggcagggagaagaaacagggaaggcacctccgagtccggcgcaaccgaggccaggacagggctacgcggtggccacttacgagtctcccagaaagtcgtggaaacggatgcggccgacggtggtattggcctcaaagttgggagccacgtccccgagaagcagacctccgggcatggcgacggtgatgagggggcgccgctgggacagcaagcaaccggttggttctggcgaagaagcagcctgtcccagcgcgcggaggaataaacgaaggcgcgaggggcggggactggggcggcgggggcggggccgcgggaggccggccgctgggggccgggccgcgggggctgggctgggcgcggggcggggcggggctgggcgcggggcggggctgggccgggccgggctggggccgggacgcggcgcgagctggactaccgcggtcgctgttggtggcgccgccgggcctgcgactaggtggcatccttcagacactataggccgtctctgcacacgtgatgcggggctcggtcacgttgccccctggaagcttgaggatgcgccaggtttgactctgcagggcgtacgcgctttagggatggaaggaagaggaacgcgg

SEQ ID NO: 3284 - DNA, 2300 bp, Homo sapien
tttgtgtctatctcaattaaatagtattgtctcttttcagaagatggagttgggagaaaacactgggcagcctctcagcgctcaactccccaaactgaccagaatctccttcagctggatttataaaaaatggtgaaatataactttattattgcttttttttaaaaaaaaagctccatgggaaaggataaaaaatttgatcacctctatattttagttattgctttctttagctttcagaactatgtgtaagctaactgactttatggattttctccaacttttcctgaagtatgaggatttttctaaaggccatggggaatctgaacttcgaaacttaaattcaacctacaggagtcttagctgcagggcttaggtgaaccgagtgagcctgaggggacagcagtaggatgggaactaggcagaacctggaagggcattactcaaactgagtagtgctgagatcagtttgactaaggagagagtcaaacttaattttgagaggaatcaaggtgacagccagtatagataaggtgaagatccgaacgggagggtagtgaacttggtaatgaggtgagttaagtaaaggcagaagagggaagagtaaggaatgggtctcttaggagagggcctgtgaataagccaattactttttaacatagtccttggcattatagtagggatgagctcagtggcttaaaagaaccacatcagtttgtacaaaaaaggaagtcataaagaatattttaggagctagtatgtgggcaccaatgttgcttgtcacagtcatagagctgttgattagaattgtgtttagtctgaagtaggaattgagactcacttgccagaggtttcttgatacatagtgaaggtgtaatcttactgctgtgatgttctccttggtgccctcaagaagatgatgtgcagcaaccttggtgaatgtggtataggaatgagagagtagaatttgtcacaaaacaactcttccttgaaagtaacccaccaattgatgattattgttcatttgtttaatatttatactgtatttgtttttagtaattatatttgaggcaagaagtatataagttaggcatcatggaatttgggatgcatttgtcctcccatgaagaatgggtaacattgtttcttcaaattgaggactggaaaccaatgatggataggagttaggaaaatgggagtgagaaacattgaaaaggaaggagaggtagaaaaataaaatgaaacagtatgactgaaaaagaattagagaggagacaagactgtgttgaagagggttagggctgagccagatggtgttggcataagaaatatagagtatatatcaaaaatatagaaggagattctgtctacattaatatctttgactatttcagctattatgttgttttgggacaatcaaagatgggagagaccgaacagagtgagttcaggaaaggtctttattaaaaggtgatcacctggctcagtaggactagcgtccaggaaagtctgagccctggacaaagaaagcagccaccttttaagcagtcagtggccaggagctacgtgatgcaggaagcgtacttacaagagcgagaacaaaggcagttgatcagtcttttacatttatctatgctacgtgttccacatccctgggaaaccatgtttctgtattaaccttgtaactttgcagctgcgctagggaggtgaaacaggaactccctgagcctcaaggaatgtgaaactagcaagtacagataaggcttgctgagcacagaaggaaaaacacgctgttagtattcttctctaacttagactacaggggagctacactacacttagcttttgaagggaaaagtaaaaatttttggttgtctttgattatacttgtaaaattcatgaattcattctacaatgtcagcaaaaaaaaaaaaaatcagttaaaacagttgtgggtacttacgtaacttgagtgttaaaaaatgaaagcttcccaagaactagatcacttggcttcttctggattgggggtggggataatgtaggcagccaatcagaacgaaagcaggctggcaagaaaccaatgagaagtaggcatggaaatggattttggtgtgatatcagttggtagtactgtccctggcaaacagacgcataactgtgcattgttctttgggattttgagagccttcatctcaatttcaactttaaagcagcttaatctttaaggaacatatctctgatctgggtaatttgtagaacttaatttgagggtcattacatgtgaggatagcaggagt

SEQ ID NO: 3285 - DNA, 2300 bp, Homo sapien
actgtccttaattgctccttgctctaccagttgtctacagaatcaagttcagacttgctgatgcaatcccagcctctttttaagagcagacttcttgcttattttgaatggcctatacttaaccaaattggccaacatgctcattcccaaaaatacctgtgatctttgctttggtgctttaacttagttattccatctggaatttccttctttctgacttctgaatgacagtcttgcccattcttgatggctcagcttaaatgttaatattctttactaaacatataattccctttatcacatttcccacatcttgtcttctcccactacccttcacccctggtaaacatgatcttgaatctgtgttcaatgttgctttttgtcttttttttctgtgtagtgttactgcatctacttgtattcctaaaaagtctgtttaattgcttttcacttgacaaaaatacatcttgagatatatatatataatcttttggatttacatttttcatgtgatatattggtaagattcatttatattgttctgtgtcttacttactgctgtgtgacaaatgagccctaagcttgttaggttaaaaacaacactcattcattatctcagtttctgtgggtcaggaatctaggcacaggttagctggatcctctacttcaggatttctcatgaggctataatcaaggtgttgcctgaggccatagtcacctcaaggttaactgggccagatctacttccaagctcactcagtggttgctggcagaattaagttccttatggaattggattaagagctttgattcttactggctgttgaacagagatcaccctcagttccttgaaaggtggccttctccatcacagcgcatgagaagagccagggagagaatatcagcaagacaaaatcacagtctgttgtaactgaattacagaatttacatcccctcattattgctgtactctcttcattagaagccagtcactaggtccagcccacattcaaggtaaggaaattacacgaaggtatgaataccaggaggcaggggtgggacattgggagccttgtcagaacttgcctaccatatggcatatcattgtaatttatttcttttaacagttatataccattttgtgtgaatataccagtttatgctcatcttcttggacattggttttcccttctgggttttttgctgttgtgaacagtgatgccacaaacattcttgtacgtaatgaagggactctggtactcttctctgaatctttcccagtttaatactgtgttctgacagactgaagcaccattaagacatccttagttagatccttttgtaattcataggtgtgattattgggttttcatgctcatgtgtgagaggtacctccttcaaaccttgttacaacacgggcacatttcctgtctgttgtgaaaaaaaaagaaacatcttgaataattttatctggaattaatcttattgcttctaaactcccatagcatttctcccatagcattattactacttgtcaccttttattacacttattttgtgcacttcatattttttcctttgaaatagtaacttgttgaaggtaggaaataaatttgattctggttttcacaatttacacagtgctttcagtatgtgttactgactgaatgaattctgtttaaatgtcgttgcctaatttttaatcataatctggctccagtaacccaattatatttctcacttctctcatacaaggacccttatttaggcaagtgggtctcttagacattctttttcaatctcttcctaatgaatttagatcatatgatctctttcttctcctgtttctattgaatttattatttatttcacacatttaacattttagtatatacttgagctatgttatatgtacctactcataataggtacacaataaactttattgatggaattgctgaagtatcttactttatagttattttcaaatagttaagtatttttataccatctatattgtcagttgactgagcaaataaataaacaaatactgatgtgtttgagtagatttttatcacttttttatttttttggtcataggtatttttggagttaatggagtcagaaggacctccagagtcagagagttcagaatttttctcacagcaagaagaggaaaatgaagaagaagaagcccaagaaccagaggaaacaggccctaagaacccccttttacaacctgctctcacaggggatgtagagggtttgcagaagatatttgaggatcctgagaatcctca

SEQ ID NO: 3286 - DNA, 2300 bp, Homo sapien
ttggaaagggccaagtgggtgactttgagagatcaagtccagtttgacttttgacttagggtttcttttttttttttttttgagacggagtcttgctctgtcacccatgctggagggcagtggtgcgatctcggctcactgtaacctccgcctcccgggtttacgtgattctcctgcctcatcctcccaaggagctgggactacaggcgcataccaccacgcctggctaattttttttttttttttggtattttttagtagagacggggtttcactgtgttagccaggatggtcttggtctcctgacttcatgatccgcccgccttggcctcccaaaatgctgggattacaggcatgagccaccgtgcccggccttagggttttatatggtggcatacttctagggtcttgcgtcccttctcccctgattcttctcttgggatgggctatccacatgtgcagtggcctgctagcacttgggagaggagcacgtgcagtgtgtttactgcagttctatgcatgacacttgaggcattcttctcttaccaattgaatgtacccaagaaggtcatataccagttaaactccaccattttgactcttaatgtgtatccttgagcccactcacctgtaagaagtactttttaagtggtccatttttcagaaaacaggccccggcaaatccaggcagctcccttgcagatgtgacaagccgcatgctacagacatctgggaagagtgataagactcacagaagtcagaggggagggagaaaaaaaaatagggggtggggtggctaatccataaaaggaaagaaagttttgtcattgggaaatcaaaacttaaagtggggaaggagacaagatgtaaccttataaggggataatgaaacttaggcaacgttggggaagactgtaaccccatagtactcagcctatgaggaaccagggtagggacttgcacactaggtgataaattccttgttgaaactgcactgggtgttcctgctcaccagacacccgatcttgcaagaccgttattaaaaagtgtctcttttgctgttcttcatgcctctaagtccattctttgggtttggacaggtgagtgtgtttctcacatcacctaactcctgagctcttatggggaagctgctgataaccagtttcagatgttttctatctattcggagagtgccttttcctggcattggctgcaaccaattattattttagagagacagttaacaactgcctatcacctgatggtcgcctgacattcctggtgggggataggggagcctgctctgctcatgcctgactacctactgtaacaatggtgaaattttgcttgggccttaggtcaaatattcatttcagaactaggctattcgaacttcagcacagatgttcagagcccctctaaaacattcacttactccttagtggactcttggtagaaacagtaaagaaatgaatattttccttcacacctgccttcagcacaaaaacttccctgttttcactgtgtgattcatgtgaacattgatataattgctaggtatgcctggcccttccctgctggtttctttcgaaccccttgtccctccacctccatcgcttccccccttttaaagttgtgttttgcatcttgaatttctgaatcaagagggatatagtctccaagtttcttctgctcctaaggtagttggcacttgtgaggtcgcctgaaacactccttgctggtgacaatgaccataaaccatgggagaaagatatccaataactagaaaattaagcaaggggttattcatacaatcttttgtagtttttagaatgcaacctcatatttccagaaaattctttcgtttaaaagccaaagacaggccaacaaccaatatgcacaacttatttttaaactgtaaaacaaataccttattacagaaaatttacaaaacaaagaaaaaaccgacacgccacccagagactgaaattatagataattcctggctgttttccactctggcttcctgcgcctttgcaaccaagaataaccttcccgcgctgccggaaccgcggcgcaggaggaggcgctgcctcgcgtgttgcgccgttgctatggtaaccgaggaggccggggcccgggtgtggtgagtctaggggtcctggcgctgtgggccggggtgggcacttggggaggagtgcgatggggtagacggacatcttccctccaggctgctcgggcagggctggaggggagtgggcttcaatctcagcgtcctcacactgcttctgtccagagct

SEQ ID NO: 3287 - DNA, 2300 bp, Homo sapien
ataatcacctggagaacttgttagaacacagattactggggcccaccttcagtttttgattcaataggtctgtaatggggctcaagggttagcattttccaagtgatgttgatgctgctggtccaggacaacactttgagaatcactgaattggaccttcattgatcaacatggacaaatcttacaaacagaatgttgagtggaaaatggaagttgcaaaagaatacatatgctttgataccatttatgaaaagttttaaaatatggaaaagaaatcattttactgcatatgtatatatatcacatatacacatgcagtaaaaattttcaataagatcacaaagctagtcagttacaggtctaggatttgtacctatgtgtatccgtgaaatcgcctttgcaaactgaaaccccctttgcaaaaattctatcagtgagaaaattatagcagtggaggagatctgatctagccaaaccccatcttgcctttagctttcagtctgtccttaattattcctgggcttaagccaagataactttgggagacatttagtttaatagtttaaataattacagtccttccccaaaactcaattgcctttgtaaagctaatgagagaccaccagacaacggggatagatgagcctgaattctgttaagtgtagacataagtgattgccagccattattccagaggtcacaagatatgcaacttccccaattactcctacagataacatcactattgtagaatctaggattggcctttttgggtatatttttaagttttttgcatgtttgactactgatggctccacctggacccaccaactgttcctgtggctccacccagaaacaactcagtaggcaggaggaccatctcccatacccctatgactgcaccagtcagcagcaagcacccattgcctagccacccctacccctttccccagactacctttgaaaagaaacctagcccccaaatgctccaggaggccgatttgagtaataatataactgatttgagtaataataaaacttcttccatttttccactcgatgttgtgtaaaactctttctccattgcaatccctataccttgataaatcatctgtatctgggcagcaggcaagaagaatccactgggccactatatctggatctaaaggccatgtattttccactacaagctaattaacaagaggtatcctttcccctcagaaacaactggacacacctgtgtagattctacataaagaacagctaaagaaaatctggttaatacttagcctagtatacttaccaggaaatcagcaacagtctttctctgatattcctgaaattgtaatccccaccttacacttgtatcacttgttttctaaatattaatatacggtaaaaatcaggtggctgtgtgctatgggaaaatctggaggaaaagataattttaaaaatatacttttttggctctgcttgctactgaaaaaaaatttttttaagaaaatatactcttccctccttaacattaaagtgaatccacagaagatgtgtttggtgaagtgtctggtggtgaatactaagtagaaagggcagactaacacagccttagagcctggataaaatcctggtgtcctgaaagtttgaccgtgggaaatctggaggataaggtctatctctggtctgtctatctaacttctgcaccttgcacatagtagaggcctgacagatacatgccaacccatgtgtgcatgcaataattcaatccacaattaggaacattgtgccaaaaggagacccaccaactaaaaagaaatacaaattcttagctttctgtgactaccctttactgcctttgctggcgaaaacaaagaagaaaagaggaggcttcagtattcaaatactgccagttccgcagtgaattctaaaaatggttactcttgggatacaaggaacccccacgaggataaacaacctctgaggttacctgaatgccccagcaaagggcacgactacttccggagccgcaccggaaccccttggcggattatgtgggttcctgcgggaacgatttaagaataggactacttcctgcttctggatatgggccggtgaagggaaaggaaatagctctacgagcggcatcctgcctgcgttagcggcggtggaggaggaggcagagaggagtggagggcggagtagacggaggaggctgctgcagagaagaaagtgtcagagccggtaagtgagccagtcaccttagagcaggggacagcggacagcgccccagggctcgcttcgca

SEQ ID NO: 3288 - DNA, 2300 bp, Homo sapien
acaacggggatagatgagcctgaattctgttaagtgtagacataagtgattgccagccattattccagaggtcacaagatatgcaacttccccaattactcctacagataacatcactattgtagaatctaggattggcctttttgggtatatttttaagttttttgcatgtttgactactgatggctccacctggacccaccaactgttcctgtggctccacccagaaacaactcagtaggcaggaggaccatctcccatacccctatgactgcaccagtcagcagcaagcacccattgcctagccacccctacccctttccccagactacctttgaaaagaaacctagcccccaaatgctccaggaggccgatttgagtaataatataactgatttgagtaataataaaacttcttccatttttccactcgatgttgtgtaaaactctttctccattgcaatccctataccttgataaatcatctgtatctgggcagcaggcaagaagaatccactgggccactatatctggatctaaaggccatgtattttccactacaagctaattaacaagaggtatcctttcccctcagaaacaactggacacacctgtgtagattctacataaagaacagctaaagaaaatctggttaatacttagcctagtatacttaccaggaaatcagcaacagtctttctctgatattcctgaaattgtaatccccaccttacacttgtatcacttgttttctaaatattaatatacggtaaaaatcaggtggctgtgtgctatgggaaaatctggaggaaaagataattttaaaaatatacttttttggctctgcttgctactgaaaaaaaatttttttaagaaaatatactcttccctccttaacattaaagtgaatccacagaagatgtgtttggtgaagtgtctggtggtgaatactaagtagaaagggcagactaacacagccttagagcctggataaaatcctggtgtcctgaaagtttgaccgtgggaaatctggaggataaggtctatctctggtctgtctatctaacttctgcaccttgcacatagtagaggcctgacagatacatgccaacccatgtgtgcatgcaataattcaatccacaattaggaacattgtgccaaaaggagacccaccaactaaaaagaaatacaaattcttagctttctgtgactaccctttactgcctttgctggcgaaaacaaagaagaaaagaggaggcttcagtattcaaatactgccagttccgcagtgaattctaaaaatggttactcttgggatacaaggaacccccacgaggataaacaacctctgaggttacctgaatgccccagcaaagggcacgactacttccggagccgcaccggaaccccttggcggattatgtgggttcctgcgggaacgatttaagaataggactacttcctgcttctggatatgggccggtgaagggaaaggaaatagctctacgagcggcatcctgcctgcgttagcggcggtggaggaggaggcagagaggagtggagggcggagtagacggaggaggctgctgcagagaagaaagtgtcagagccggtaagtgagccagtcaccttagagcaggggacagcggacagcgccccagggctcgcttcgcagatatgtggtcccaagttgctgagctgccccatggggtcaggtcggtcgcctgtcagtcggcgccgagaagagactgttggggcgctggggccgggcctcgcggagcgccagagtgcgctctcgctggctgacagcctatctcgggagccagaggaggccccgggctttgtcctgcctggtggtgctggggtttcgcatcctggacagcttccccagacagtgtttggaattcagggaaggaagaaagtacgtgcgcccccatttaaccctcgggacctggcgaaatcctgctacgtgggtagtgaacattgtatcggggactgaaggaaatgcttgtaaagagtgttagtctggagccatactttccctgccctgttcaagctccctggactgtcggaagcggagttgtttgtaaaggcaaatgcagacgcctcctcctcctgtcacttcgggacaagttaacaatcttcagattcgttattaaagcctcgtgtaccctatgtgatctatcaggttagtactgctgtgggtatctggtgcttgttctgtaaatatacttgatgtcgagatcacagttaaatatctccaagcactttttgaagagaaacaagactgacctaacagt

SEQ ID NO: 3289 - DNA, 2300 bp, Homo sapien
tctttgccaactactgtactctgttttgctcagtaataattccattcttccttttcattttctttccccactaaaaaaactttcatcatcttttactcttccttcaacatcacctttacatctaaaaagttaactttgttaactttatcatcaaattctcacatatttcttttttgaagacagagtctcactctgtctcccaggctggagtgcagtggtgcaatcttggctcactgcaacctccacctcccaggttcaagtgattctcctgcctcagcctccccagtagctgggactacaggtatgcaccaacacgcctggctaatttttgtattttttggtagagatggggtttctccatgttggccaggctggtcttgaactcctgacctcaggtgatccgcctgccttggcctcccaaagtgctggattacaggcataagccaccacacctggcctctgacatatttcttaaaaagatatacacttgtcctcttagatgtgggcttcactttcattctcaattatagctacttatcttgttcccaatcttagcccctttccctaatccatcatcagtctttcattgtcaccacttttatcattaccttgcttgagatcccataacagttcccacacatctatatgaagtcaaatcagaattcctgtctggctttcaaggcactactgtatttgatcttattatctgatcctatccaggttcattttctactacttcagttcttccccaagatccatcgacattagcctttccaaaatccaacattctgcatacacttcctctaaggttttgtatacaacattggggggtggggggatgggagtgaagaaagttccagtagacaattctttaagaggttaaatgacagccctatacccaaacatgcaccccctactctagacagatgatcactctactgttctccctgcctttttattcaccttatcgccaattaaaaacacttctctactcccgtttgtctcagtaaatcttatccattttccatgtgccatctcctcagaagttttcctgagcttggcagggctagttctcttgacaattccacttgcagttgtggttcacagcacacaagtaaagctttgttgtttctcttgtgattagtccgtgaaggggctctgacttgatcacttttctacattgccaccaatacctaaatccaaccgccccaatgccaatacttagccagtgttaagcacgtagtgtttaaacacacctcaacacgcaagtattgtaagataatgaccacacaacagggcaaatacaaagttaaagcaggtccgggaccaatacaaagcatctttaccaataaaatgccgtgatgacgctgtcacccattccggattcacgaatcattcttcaaaagtccggctccaaaactatgtggagactgaaatcccctgaagaaaaaaaaaaaaaaccgccaaaatgacagctaagacagaggccagactaacccctggccctcccaaattccctctcgctccacaagtgggttcacaagagacacaaacgcacccaggaagacctccgctccctcagacgcggggcgggccctgcgacttcactctgggagggacatttccgctcacccagctctgcgaccctcgctcctgcggagtcagcttctgctcgcggagggggaagggcaaaaggacagtgcgtcccaacccgtccctctccagctgagcctgtcagagaccagcccagctctgaaatcaagccgttgagaaaagggaattcggccctccgccgcctcttcagtttaaaatcgtttcccgactcgctctgcggccccacgcaggaagcctccttggcgcctcgccgattccgtatcagtgaagcaactaaaattgccattttaactgagggcaaggccgagccacttaaccactatcgtcaacctttccaatcgtgctcggttgctcctcagttttcctaccggtgcgaagctttctctcaaatttccgcccgtagtaggcatggcggcggcacctcaccactgattcgttgaattccttcccggtaatcttgggcactagcgggcggagttgaagggcgcttggaccccagcggcgatctgtgtttgggttcgcgctctgggagaattttggctttgctcgccttcctctttcagaagactcgaaatcggccagcaggtctgcgagatttgaaacgcgactgttactccttgttttccggttctggccgcgggagcctctcgagaagcgtggaaagaggagaagggcgtataccttgt

SEQ ID NO: 3290 - DNA, 2300 bp, Homo sapien
atttgcattgacctaaaatcctaattacccaattcttaatattgcacatttcttcctcaaatgaaataggattttagaaactgcagaaatggacggtgtaggaactatttagctttagtatgaatctagtgtttaacagccacttgtacactagaaaacactattataattctgtgaaaaatgatttttttttttttttgagatggagtctcgctctgtcgcccaggctggagtgcagtggcgcgatctcggctcactgcaagctccgcctccgaggttcacgccattctcctgcctcggcctccccagcagcggggactacaggcgcccgccaccacgcccggctaattttttttttatttttagtagagacggggtttcaccgtgttagccaggatggtctcgatctcctgacctcgtgatccgccctcctcgacctcccaaagtgctgggattaacgacgtgagccaccgcgcccggccgaagaaggatttttttaaggcatcaaccaaaagcagagtattctatatattacgtggttacctttttgtggtctttctaaaaactcagggaaaaaaaactgccgtataatgaatataatgagagtgaatttcgcttctacacataaggctatccagttaagaacaggggaaaagccgggcgcggtggctcacgcctgtaatcccagcactatgggaggcggaggcgggtggatcacgaggtcaggagatcgagaccatcctggctaacacagtgaaaccccggctctaccaaaaatacagaaaaattagccgggcgtggtcgcgggcgcctgtagtcccagctactcgggaggctgaggcaggagaatggcgtgaacccgggaggcggagcttgcagtgagcggagatcgcgccacttcactctagcctgggcagcagagcgagactccgtctcaaataataataataataataataataataataataatgggggaaaaaatgaaaaatggaataaaagctctccggccgtagataacaggctgaagtactgttcataggatagatctcttcgctattttcacctggaattctcctctgtgaactctgcaacagacttctgtagagagaaccccagatcggttgggtggtccttctgatgggtctggataaacccctgtacagctgacttaaccaagaagggaagtacatgttggagccacacgatggcgaaaaacaatcacgaaatcccacgctgccggtagttaaaagtcagttttggaaatacacagaaatcccttaaaattccaggagttcccactctcttctcgaatatttaaggcctcctccgcacaacattggagtacacgtgtctagaaacaagacaaatctccaaggtctctggggtgcttgctggggtggagataagggaaagacctctccctgagtcttaaagcatcagtctgcacttctactcaacaagtcggcagccaaaagtgacgacgagagagcgactccacgtagcggcgccaggcgcgagcccaagacaaccagaggcggtcacaaggtatacgcccttctcctctttccacgcttctcgagaggctcccgcggccagaaccggaaaacaaggagtaacagtcgcgtttcaaatctcgcagacctgctggccgatttcgagtcttctgaaagaggaaggcgagcaaagccaaaattctcccagagcgcgaacccaaacacagatcgccgctggggtccaagcgcccttcaactccgcccgctagtgcccaagattaccgggaaggaattcaacgaatcagtggtgaggtgccgccgccatgcctactacgggcggaaatttgagagaaagcttcgcaccggtaggaaaactgaggagcaaccgagcacgattggaaaggttgacgatagtggttaagtggctcggccttgccctcagttaaaatggcaattttagttgcttcactgatacggaatcggcgaggcgccaaggaggcttcctgcgtggggccgcagagcgagtcgggaaacgattttaaactgaagaggcggcggagggccgaattcccttttctcaacggcttgatttcagagctgggctggtctctgacaggctcagctggagagggacgggttgggacgcactgtccttttgcccttccccctccgcgagcagaagctgactccgcaggagcgagggtcgcagagctgggtgagcggaaatgtccctcccagagtgaagtcgcagggcccgccccgcgtctgagggagcggaggtcttcctgggtgcgtttgtgtctc

SEQ ID NO: 3291 - DNA, 2300 bp, Homo sapien
ttgaaaattcagtaagttcttaatcctgcaggagttgcaaaacgttttattcttcggactggttgtaaattagtaaaggtttggaattgccctgggaaaaccaccaccatgcattcttagactgtctttctcaatttaccttcggtactgaatccatccacacaaggtgacttcttggcctaagtgagacgaacgcaactctccacatgtgttggtccggacaacaaagctactgaattctttaaaaaaaaaaaaaaaaagaaactttaaaaggcaagattaaaaatacatcacttgcaggttgcttaaaaatgaaaattctcaaaatatatcttaggtatgtcagggctacaggggaaatttataaaataaaataagtcagagtatgtaatttaattcattcactattaaatttacctgcaaatgtgtcaaaagccaagtgaataactgaatgtaaatttctgtcttgtgttaggaaatcaaaatttttttgatcttctagcatttgcattgacctaaaatcctaattacccaattcttaatattgcacatttcttcctcaaatgaaataggattttagaaactgcagaaatggacggtgtaggaactatttagctttagtatgaatctagtgtttaacagccacttgtacactagaaaacactattataattctgtgaaaaatgatttttttttttttttgagatggagtctcgctctgtcgcccaggctggagtgcagtggcgcgatctcggctcactgcaagctccgcctccgaggttcacgccattctcctgcctcggcctccccagcagcggggactacaggcgcccgccaccacgcccggctaattttttttttatttttagtagagacggggtttcaccgtgttagccaggatggtctcgatctcctgacctcgtgatccgccctcctcgacctcccaaagtgctgggattaacgacgtgagccaccgcgcccggccgaagaaggatttttttaaggcatcaaccaaaagcagagtattctatatattacgtggttacctttttgtggtctttctaaaaactcagggaaaaaaaactgccgtataatgaatataatgagagtgaatttcgcttctacacataaggctatccagttaagaacaggggaaaagccgggcgcggtggctcacgcctgtaatcccagcactatgggaggcggaggcgggtggatcacgaggtcaggagatcgagaccatcctggctaacacagtgaaaccccggctctaccaaaaatacagaaaaattagccgggcgtggtcgcgggcgcctgtagtcccagctactcgggaggctgaggcaggagaatggcgtgaacccgggaggcggagcttgcagtgagcggagatcgcgccacttcactctagcctgggcagcagagcgagactccgtctcaaataataataataataataataataataataataatgggggaaaaaatgaaaaatggaataaaagctctccggccgtagataacaggctgaagtactgttcataggatagatctcttcgctattttcacctggaattctcctctgtgaactctgcaacagacttctgtagagagaaccccagatcggttgggtggtccttctgatgggtctggataaacccctgtacagctgacttaaccaagaagggaagtacatgttggagccacacgatggcgaaaaacaatcacgaaatcccacgctgccggtagttaaaagtcagttttggaaatacacagaaatcccttaaaattccaggagttcccactctcttctcgaatatttaaggcctcctccgcacaacattggagtacacgtgtctagaaacaagacaaatctccaaggtctctggggtgcttgctggggtggagataagggaaagacctctccctgagtcttaaagcatcagtctgcacttctactcaacaagtcggcagccaaaagtgacgacgagagagcgactccacgtagcggcgccaggcgcgagcccaagacaaccagaggcggtcacaaggtatacgcccttctcctctttccacgcttctcgagaggctcccgcggccagaaccggaaaacaaggagtaacagtcgcgtttcaaatctcgcagacctgctggccgatttcgagtcttctgaaagaggaaggcgagcaaagccaaaattctcccagagcgcgaacccaaacacagatcgccgctggggtccaagcgcccttcaactccgcccgctagtgcccaagattaccgggaaggaattcaacgaa

SEQ ID NO: 3292 - DNA, 2300 bp, Homo sapien
tctgaaaaaaaaatttttttaattaaaaaattcaaggccaggcatggtggctcacacctgtaatcccagcactctgggaggccgaggccagcagattgagtacaggagtttgagaccagcctgggcaacagtgaaacctcgtctctactaaaatacaaaaaattggccaggtgcggtggctcactcctgtaatcccagcacttttgggaggctgaggcaggtggatctcgaggtcaggagtttaagaccagcctgaccaacatggtgaaaccccgtctctactaaaaatacaaaaatttagccgggtgtggtggcgggctcctgtaaccccaactactcaggaggctgaggcaaaagaatcacttgaacccagaggcagaggttgcagtgggccgagatcacgccactgtactccagcctaggcaacagagcaagactctatctcaaaaaaataataataatacaaaaaattagctgggtgtggtggcatgtgcctgtagtcccagctacttgggaggctgagttgggagaatcacctgagcccaggaggttcaggctgaagtgagccaaaattgcaccactgcactccagagtgcacaccagagtgataccctgtgtcaaaaaaaaaaattaaaattaaagaattagataaaataaagaacttccatcatacttactgggcaaagttggtttctattgcaatttttactaacgcttgtatgcctaagaaaaatattatttattcagctcttaagttttgaaataaataaagagcaatgaattatcttttagggatcaacatccagagatgagtatagctaaccctggagaactcctttgactctgacccattattgctatgggatttaactgcccctaagactaaccctggagacaattgcttttcaagtatgtgggacttgtttgcactaataatagtcattcttacccttattttcctttaaggaaagtttttttaaagctcttaactaatagttttacttgctgtattatatagagtcaaaatggggatgcagtttttactaaatttggtaataaagtcattaaggagcagccccagcctttatggtaattaagctgtgactattaacgttttttaaaccatctacttataattactgaagattcctgtaagttcatttgtttctcagaactcttttcccccttgttctgtagtcggcagcctctgtgaagaagattttatgtgaagcccctgtggaatctgtggtgcaagtgtctggtacagtcatttcccgtcctgcaggacaagagaatccagtaggtagtttcgaagatatctgtgtaatttttgcttgtatgcatttgcaccatctgtgtacacattctggcaacacatgactggacattaggcactaaagttgaataaattctacaaatgaactgacagatttcaaaatcttgactataaacaaacacatctatgtaaatatgcatgctaagtctcactctgtcaccaggctggagtacggtggcgtgatcttggctcactgcaacctctgcctcctgggttcaagtgattctcctgcctcagcctcccgagtagctgggactacaggtgcatgccaccacgcccagctaatttttatatttttagcagagagagggtttcaccatgttggccaggatggtcaccatctcttgacctcatgatctgcccatctcagcctcccaaagtgccaggattacaggcgtgagccaccgtgcctggccctttttttttttttttcaggacgggtcttgcagtattacccaggctggtcttgaactcctgggcttaagtgatcctcctgtctcagcctcccaagtatcagactgcaaggatatgccatgacatttgttgatatctgaacacatcagccacatatgcataagaatgtcaaaatcatgcacagacatgtatgttttatactatacactataaggactttgcacattttacatatgtaaataaatgcatagattctacaaatgtgtattttgtgtatatcctgatgagtaatttttaaaacccttccttctcactctccaagaaaatgccaacaggtgagattgaaatcaaagttaaaacagctgagcttctgaatgcctgcaagaagctgccctttgaaattaagaacttcgtgaaggtaccaacctctgttattaataaaatagagtatctagaaaatgttgatgactagtcaagtattttcagagttttttaaagaaaagtttaacttctacaaaattaagcattttattgtagacacatcatgaag

SEQ ID NO: 3293 - DNA, 2300 bp, Homo sapien
gctgcctctgcctctcaggttcaagcaattcagctgcctcagcctccgaagtagttgggactacagatgcgtgccaccatgcccagctgattttttgtgtttttattagagatggggtttgaccatgttggccaggatggtctggatctcctgacctcgtgatccacccgcctcggcctcccaaagtgctaggtttacaggcgtgagccaccacgcctggccaatagcattttaatcatgtgttgaagtgaaaaaattatgagctttggagttggacagacctgggatcagatgtagcttcgctgcttactaattgcacatacgcaaataagtaacttagttctctgagccttcatgaaatggttgtgggaactaagcaagttaatgtatgtaaggccattagcacagtgtctgacataaaagagatgtacaataatatttataccctctgcatgtattatgtgcaaaattctatagtaacttgaaagcagaaaaatatataaatgtgtatatattgtggctaaattagtttccatatggtactttggtttcagattgacatagagatgtcatttgtagaccagactgggatccagagtttaattgagggtttgctccagtattcctggcccaatgacaaagatcctgtggttgttccttttcctactatgacttttgctgaggtgctggccacctatggaactgataaacctgacactcgctttggaatgaaggtacttatcttcacttttctaggactctgtccccaaataatcctgcagtctttttaaaccactttgaaattgacaagtgttacacactgttagatgatatttttgttgttaccttgttaccttcgttgttacagagctagagcaagagagaataatagcatgttagcaatacagtgctttctatctttcatgttccaagatccatttccaagagcgagattcttgctataaagtttttattacttgcaagttattgattatatggatatgaatggtaacttgaaagaaaaaataactattctttccttttcagttttttttttaatccaaggagttactaagtttccttggtccataaaaagctcaaacatatgacaatgtttattcaaattattactatctgtaagtatttaaagcaggggtagaatttatatagaacagtttcattaccaggcctctacttgtttgctcttaaagagcaatatcccttgatccctgtaatgctagtgacatttctatatctcagttctcagtgcacattctttagaaattggtcctgcctggtctgtgaatagtcagtggtcaattcttagaatgaaaaaaatacaatacacaaaaagtcataactaccaacttacagctgccaactcaactacttcttgtttcttcgtttgtaatatggaatagtggttctttttttgtatttttttgagacgtagtctcgccctgttgcccaggctggagtgcagtggtaagatcttggctcactgcaacttcggcctcctgggttcaagcgattctcctgcctcagcctcccgagtagctgggattacaggcgcataccaccacaccggctaatttttgtatttttagtagagatggaattttgccatgttggccaggctgacctcctgacctcaggtgatctgcccacctcagcctcccaaagttctgagataataggcatgagcctctgcgccgagcctggaatcttaatctggttcttaagtcagactgcttgtgttaaattctggctctgccacttactagctatgccatcttgggcaagttccttatttctgtgtcttggtttcatctatgaaatagggataataaagagtgctaacctcatatgaaatgaatgagtatatgtaaaacactggtcatattgcttaacccatggtaaacactctttgaatgtattctataaatgttaaattatcaagatctattctcttctttaaaatcttgtttgtaaaatgttttcagataaaaattacttcatatttagttatctctttttgttacccattttccagattatagatatcagtgatgtgtttagaaacacagagattggatttcttcaagatgcacttagtaagccccatggaactgtgaaagccatatgtatccctgaaggagcagtaagtgaagtacagttctatgtttctctagaatgtatgctttggaagtaactttgtccaatactgtcatatttaaacttcagaaagaacaattctttttaaataaaaatagggatttttgctgggcatggtggctcac

SEQ ID NO: 3294 - DNA, 2300 bp, Homo sapien
agatgatggtattatccatccataaataggtagatatatctctattttatagtttcagattaaacaaaactgatatcaatagtaaaagtcattttacttatcaattttctgtttttttttttagttttaaagatattattggccgggagtggtggctcacacctgtaatcccagcactttgggagattgaggtgggtggatcacttgaggtcaggagttcaacaccagcctggccaacatagtgaaaccgtctctactaaaaacacaaaaattagccaggcatggtggcgcatgcctgtaatcgcagccactcgggaggctgaggcatgaggtttgcttgaacctgggagatggaggttgcagtgagccaagatggtgccattacactccagcctgggtgacagagcaagactccatctcaaaaaaaaaaagacaacaaagatattattaatcactgaacactattttctctcaattataagtaattgaaaattctaatcaaccttagattaacctcaaatgtgcgaaaaagtgaacaccaaaactcattgtgattttaagttctaatcatacacataaaagttttaataaactaataattataaaatgaggccgggtacagtggctcacgcctataatcccagcactttgggaggctgaggcagacagatcacaaggtcaagagactgagaccatcctggccaacatggtgaaaccccatctctactaaaaatacaaaaattagctgggtgtggtggcacatacctgtagtcccagctactcaggaggctgaggcaggagaatcacttgaacccaggaggtggagattgcagtgagccgaggttacaccactgcactccagcctggcaacagaacaagactccatttcaaaaaaagacaaaatgagaacaaggtcttgatcagtgattttgaaattgttttcttctactcagtcttcacttctgccttgaaattcttttgatttataccttttttttttttgagacagagtctcgctcttttgcccaggttagagtgcagtggcaccatcttggctcactgcaacctccacctcctgggttcaagtgattctcctgcctcagcctcctatttaattaattaataattgatttaatgatttagtttaaaatgttaaattcattttaaaataacccattacatgttaacacaaatagcatgtttttattttattttattttgagacagagtctcactctgttgcccaggctggagtgcaatggtgcgatcttggctcacttcatcctccacctcccgggttcaggcagttttcctgcctcagcctcctgagtagttgggaccacaggtgccctccaccacacctggttaatttttgtatttttagtagagacgaggttttgccatgttgaccaggctggtctcaagctcctggcctcaggtgatccgcctgcctcagcctcccaaagttctgggattacaaaggcgtgagccaccacactcagccatgtttttattttaaaaataattattttcaaaaaaaaaatagaagagtaacattgttttatatttctgcaaatattttttatttctggcttaatagaagacactagattctgatatctgcttctgtatcctatctgttgttatatgctgttttggttgaagtctgtgaagaaaatctgaccccactcatatataaagttggaaaagggaggagtattttaatagctttgtctgataattatggatactctctttgataccacaccaaaatatgacaagtagtagagttccttaaaggctagttgcaatgtggattctgaaatcgtattgatgagcttttctaaagtccattggtgtaccttgtatttaaatagaacttttacctatgtgtgatatttgtaacaccagtccagtgattgatcatttggaaaatattggttcactgagttatgcaaatcttccaaatgttgacacattttgatatacaatatctaaaacaaaataccattaattaatattaccaccaatcccattacaaaagtctaagtctgaggaagctataagggcacagaagtgtatacaagccttccaaaattttaggtttcatttggaagcttgagttttatcattggcaacaaatgccatcagttttttccaagctgacttgttcttttttgagcaaatctctgccaaaattacccctaaaatatgaataatcaatttgtcaggttttttcaaactaaaaatgttctgtgaaaacaagcagctagttcagcttgtatctcaaacaattgtaa

SEQ ID NO: 3295 - DNA, 2300 bp, Homo sapien
aattaagaccttcatgttcagtcagcatttgcttatcatcatccaggctgcatttacaaactttcttattaatcataacaagacaagaatccgccatttatttaatgcattcagcactaggaggtaactaaaaagccatttgtgccgtaggaagtttgcccagttacctgcttacttggatacagtttcacttaccatttcaacttccagctttctgtctaatgcctgtaattttaatacaaaattgtcagcaaaaaatattttaatggtagattggtggtacactgcttaaccattaacagcaaaccacaactaccccagatacatcagacagatagtacatctcttcatgattaaatctgctgaactatgcaaccatcatagtatctgttttcacattttcttcagtattaaacttagtatcaatatgagagcaaaattctcatttgaaaagaggggagagaagcactaacatagataatcatcattgctttggctattttctaatcccttaaaagtgagaagtacaaaatagaggtgtctcacctgtgtgccaatggcttgagttaggcttgctctttaggacctgggaagaaacaacttcatgtgaacttaggtgtactctctatgttccccaactcaccattttgggtgcctcagttaagataatggtggttaagatcctcatcattctagcactcaagagtagcaaataaactgtcatcattgtggcacatccaatggctttaaacctttttgagagggaattttcaacttacttcagtagctattctcatccttccttggggacacaactagaaaacaaaaagatgcaagcaaaacagtgagaatgaacctcacagcagtcacgttaaatataaatgctgttaacattaaagcctcagaatagaatttcagaaatcccttctgtccactactcttaaagcatcacaggctgagaccacctcttagatttcattcttcccaccatactttccccaattcttacctgtccataaggtgctatccagagccacactgcatctgcacccagcaccatacctaaagagatcaggtacagattttaattcattgttccacggttcttttttttaaagagtgttctttaaaaaaacggttcgtctttttaaaccaatgatgcaggtaacataccattcattatctagcgacaggtaaaggatacacttaatgttacaaagaagcactgcacccgcagttaagaaccaccgatggcggccgggcgcggtggctcacggcttgtaatcccagtatgttgggggaccacggctggtggatcacctgaggtcaggagttcaagaccagtctcgccaacatggtgaaaccccgtctctactaaaaatataaaagcctagcatggtggcgcgcgcctgtagtcccagttacttgggaggctgaggcagaactgcttaactcgggacgcggaggttgccattaaccgatgtcgagccactgcattccagcctgggtgacagaacgaggctcggtctcaaaaaagaaaaaagaaacactaatggaaatattggtgacactgcggaatgcaggcacttaagcacgtggactaccaccgacagcctttcatgagagcggacggctgatggaggctcgggtcacggcccttaacaatagcttactcgggtgactcggcatgtgccaccatcagagcggttggcattcatcattactctcagatgtccctaccaacacaggcttcatcagaggcagggcacgagagccgaggcttctccgcagttctactctaacatagtcgcagcttaggtcacgcatgcaccatatgtgcaatcccccaccatcctcaacttgtaggccctgcaaaggcgcgcgactggcttagaagtcccagtcaattcagggtgaccttagcagacaaaggctggagcgccccaaaacccgcaacattcgcaaagataaaacatacctcacaggagtcgactcctacctcgaaaagacagtatggtgcctgggctcctgtatataagagttcttttgatgacgtcacgacgcacgctcccggcagcgtccgcttcggctcctccccctaacctccctcaatcttcctctcatccagtatcaccttcttcccaccccttaagtccgccccttttccccgcccttcctcgccattgtgggcagagacatgaccgtccacgtgatgccgtgctcccgccctcctcccgactgaggaggaagagcagagaggggagggggcgcgaggcaaggaaagctctggggatggggga

SEQ ID NO: 3296 - DNA, 2300 bp, Homo sapien
ctaccccagatacatcagacagatagtacatctcttcatgattaaatctgctgaactatgcaaccatcatagtatctgttttcacattttcttcagtattaaacttagtatcaatatgagagcaaaattctcatttgaaaagaggggagagaagcactaacatagataatcatcattgctttggctattttctaatcccttaaaagtgagaagtacaaaatagaggtgtctcacctgtgtgccaatggcttgagttaggcttgctctttaggacctgggaagaaacaacttcatgtgaacttaggtgtactctctatgttccccaactcaccattttgggtgcctcagttaagataatggtggttaagatcctcatcattctagcactcaagagtagcaaataaactgtcatcattgtggcacatccaatggctttaaacctttttgagagggaattttcaacttacttcagtagctattctcatccttccttggggacacaactagaaaacaaaaagatgcaagcaaaacagtgagaatgaacctcacagcagtcacgttaaatataaatgctgttaacattaaagcctcagaatagaatttcagaaatcccttctgtccactactcttaaagcatcacaggctgagaccacctcttagatttcattcttcccaccatactttccccaattcttacctgtccataaggtgctatccagagccacactgcatctgcacccagcaccatacctaaagagatcaggtacagattttaattcattgttccacggttcttttttttaaagagtgttctttaaaaaaacggttcgtctttttaaaccaatgatgcaggtaacataccattcattatctagcgacaggtaaaggatacacttaatgttacaaagaagcactgcacccgcagttaagaaccaccgatggcggccgggcgcggtggctcacggcttgtaatcccagtatgttgggggaccacggctggtggatcacctgaggtcaggagttcaagaccagtctcgccaacatggtgaaaccccgtctctactaaaaatataaaagcctagcatggtggcgcgcgcctgtagtcccagttacttgggaggctgaggcagaactgcttaactcgggacgcggaggttgccattaaccgatgtcgagccactgcattccagcctgggtgacagaacgaggctcggtctcaaaaaagaaaaaagaaacactaatggaaatattggtgacactgcggaatgcaggcacttaagcacgtggactaccaccgacagcctttcatgagagcggacggctgatggaggctcgggtcacggcccttaacaatagcttactcgggtgactcggcatgtgccaccatcagagcggttggcattcatcattactctcagatgtccctaccaacacaggcttcatcagaggcagggcacgagagccgaggcttctccgcagttctactctaacatagtcgcagcttaggtcacgcatgcaccatatgtgcaatcccccaccatcctcaacttgtaggccctgcaaaggcgcgcgactggcttagaagtcccagtcaattcagggtgaccttagcagacaaaggctggagcgccccaaaacccgcaacattcgcaaagataaaacatacctcacaggagtcgactcctacctcgaaaagacagtatggtgcctgggctcctgtatataagagttcttttgatgacgtcacgacgcacgctcccggcagcgtccgcttcggctcctccccctaacctccctcaatcttcctctcatccagtatcaccttcttcccaccccttaagtccgccccttttccccgcccttcctcgccattgtgggcagagacatgaccgtccacgtgatgccgtgctcccgccctcctcccgactgaggaggaagagcagagaggggagggggcgcgaggcaaggaaagctctggggatgggggaagggggggcggtgtaaggctgagtgatttccttccggcacgtcgcccgctccgtgggagggggtgggggatttcacttccgggacggtgttccggcccattccggcccatttccacccccggaggtaggtgctgctccttgactggactcgggccccacaccccagtgccacttccctgcaccggggtcacctcgcccgccctccgccgcagcgcgctcctggggcgctcagctactttccttcaccccgcctccaggcaccgggcgaccttccacccccttggcccccggccgggctgatctgccggaccc

SEQ ID NO: 3297 - DNA, 2300 bp, Homo sapien
aactttagccaatctgacctttttccaaagcgttattgtttgttttgaaacttttaatccaataagagcctctgtcgatgccatcatgaattcagatgtgtttattttggagcctacaccagcgccttttttgtttgctctttccggcaattccccagtgaggaagcccctggaggaaagtctttcgctaccgtcggcactggaggggtgagagctgtaaaagggagaattgggaacggcatggggttggccactccagcacttgagcagctttcttctgcgttaggaagcctggggagaggggaactggctaaagggcaaaatgtcactgaggaacttcggagaagatggggacaaggcgtcgggcgggggagccagcgctcaggtgagaactaggaagggggcggcgcccagggaccggctccaggcggcggcgggcggggagctgccaggaggtgggtgtgcgtatctgggtgtgtcccggctgcggtgggggagggggccgcccttcccggggtcctgagggaggggccccgcgagggggcgggtccggcagatcagcccggccgggggccaagggggtggaaggtcgcccggtgcctggaggcggggtgaaggaaagtagctgagcgccccaggagcgcgctgcggcggagggcgggcgaggtgaccccggtgcagggaagtggcactggggtgtggggcccgagtccagtcaaggagcagcacctacctccgggggtggaaatgggccggaatgggccggaacaccgtcccggaagtgaaatcccccaccccctcccacggagcgggcgacgtgccggaaggaaatcactcagccttacaccgcccccccttcccccatccccagagctttccttgcctcgcgccccctcccctctctgctcttcctcctcagtcgggaggagggcgggagcacggcatcacgtggacggtcatgtctctgcccacaatggcgaggaagggcggggaaaaggggcggacttaaggggtgggaagaaggtgatactggatgagaggaagattgagggaggttagggggaggagccgaagcggacgctgccgggagcgtgcgtcgtgacgtcatcaaaagaactcttatatacaggagcccaggcaccatactgtcttttcgaggtaggagtcgactcctgtgaggtatgttttatctttgcgaatgttgcgggttttggggcgctccagcctttgtctgctaaggtcaccctgaattgactgggacttctaagccagtcgcgcgcctttgcagggcctacaagttgaggatggtgggggattgcacatatggtgcatgcgtgacctaagctgcgactatgttagagtagaactgcggagaagcctcggctctcgtgccctgcctctgatgaagcctgtgttggtagggacatctgagagtaatgatgaatgccaaccgctctgatggtggcacatgccgagtcacccgagtaagctattgttaagggccgtgacccgagcctccatcagccgtccgctctcatgaaaggctgtcggtggtagtccacgtgcttaagtgcctgcattccgcagtgtcaccaatatttccattagtgtttcttttttcttttttgagaccgagcctcgttctgtcacccaggctggaatgcagtggctcgacatcggttaatggcaacctccgcgtcccgagttaagcagttctgcctcagcctcccaagtaactgggactacaggcgcgcgccaccatgctaggcttttatatttttagtagagacggggtttcaccatgttggcgagactggtcttgaactcctgacctcaggtgatccaccagccgtggtcccccaacatactgggattacaagccgtgagccaccgcgcccggccgccatcggtggttcttaactgcgggtgcagtgcttctttgtaacattaagtgtatcctttacctgtcgctagataatgaatggtatgttacctgcatcattggtttaaaaagacgaaccgtttttttaaagaacactctttaaaaaaaagaaccgtggaacaatgaattaaaatctgtacctgatctctttaggtatggtgctgggtgcagatgcagtgtggctctggatagcaccttatggacaggtaagaattggggaaagtatggtgggaagaatgaaatctaagaggtggtctcagcctgtgatgctttaagagtagtggacagaagggatttctgaaattctattctgaggctttaatgttaacagcatttatatttaacgtgactgctgtga

SEQ ID NO: 3298 - DNA, 2300 bp, Homo sapien
cagataaaagaaataccttccttatatttagatgtggaaacagaatcaccaacaggtttttcagtttaagtttcacaggaggacatagttaaaactaaaaagtgatctttagactcctaaaaattcatgttatgaccatgctttccttactaataagttatataacatcaaaacagaagttcaacagaaggtagggggaaggacttttaagtgttaactataaggtacttgcagactgaatataacatctcataactttacaacttttctctggaggaggaaagctttctgaataaatgcaattctacatagcttgatatccctcttcttagtattttactacctgctgcaagaattatgtttattattttataaaaggactaatatcccacatgaatgtaggctaatatttctaagcttaagaatcagagccccccccacaaaaagactttggttatagggctgtgaagcaaactctaggaaaaatcccacagctgtgccaggattcaaccaagatgcagagaatgtgaagttcagttgtcaaaattaggaaagctgggtaaatctgccaaattcgaagttggcaattccgaggtggtgatgaatacttccatcctgaaacttagttctccagatccgatgaaaaaatacagcatttaccaagtatgccaacatttttccattaaaatatttttaaaaaatggctgaaacactaaacctgaagctgtatacaagatagttgaaagtacagtttcaactactgaaaatagtttgtataaatccgaacaggaagacatttacttaagcccaatgtgcgttcacttatctatatattacatagttacaccacacctgaaacttcaggaacttactctgccaagctcacagtactgccccgcattaacaacacacttattaaatagggaagtgtatacactgttttcaacaatcaactttagccaatctgacctttttccaaagcgttattgtttgttttgaaacttttaatccaataagagcctctgtcgatgccatcatgaattcagatgtgtttattttggagcctacaccagcgccttttttgtttgctctttccggcaattccccagtgaggaagcccctggaggaaagtctttcgctaccgtcggcactggaggggtgagagctgtaaaagggagaattgggaacggcatggggttggccactccagcacttgagcagctttcttctgcgttaggaagcctggggagaggggaactggctaaagggcaaaatgtcactgaggaacttcggagaagatggggacaaggcgtcgggcgggggagccagcgctcaggtgagaactaggaagggggcggcgcccagggaccggctccaggcggcggcgggcggggagctgccaggaggtgggtgtgcgtatctgggtgtgtcccggctgcggtgggggagggggccgcccttcccggggtcctgagggaggggccccgcgagggggcgggtccggcagatcagcccggccgggggccaagggggtggaaggtcgcccggtgcctggaggcggggtgaaggaaagtagctgagcgccccaggagcgcgctgcggcggagggcgggcgaggtgaccccggtgcagggaagtggcactggggtgtggggcccgagtccagtcaaggagcagcacctacctccgggggtggaaatgggccggaatgggccggaacaccgtcccggaagtgaaatcccccaccccctcccacggagcgggcgacgtgccggaaggaaatcactcagccttacaccgcccccccttcccccatccccagagctttccttgcctcgcgccccctcccctctctgctcttcctcctcagtcgggaggagggcgggagcacggcatcacgtggacggtcatgtctctgcccacaatggcgaggaagggcggggaaaaggggcggacttaaggggtgggaagaaggtgatactggatgagaggaagattgagggaggttagggggaggagccgaagcggacgctgccgggagcgtgcgtcgtgacgtcatcaaaagaactcttatatacaggagcccaggcaccatactgtcttttcgaggtaggagtcgactcctgtgaggtatgttttatctttgcgaatgttgcgggttttggggcgctccagcctttgtctgctaaggtcaccctgaattgactgggacttctaagccagtcgcgcgcctttgcagggcctacaagttgaggatggtgggggattgcacatatggtgcatgcgtgacctaagctgcg

SEQ ID NO: 3299 - DNA, 2300 bp, Homo sapien
agtagctgggactacaggctcatgccaccatgcccagcttattattattattttctggagatgggggtctcaccgtgtgtggggtctcacagttggtcttgaactcctggcctcaagccttggccttccaaagtgctaggattacagatgtgagccactgcatccagcctggatgaacaaattaaacacaaaccctgatgttatagttcttaattccttgacctggtagtatctgcatcctaatcttttccagcgatgttcaccaaatcacctatatttttgcagggcccctcatctgccctcccccaaggaccttcttggcaagacacaaacctcataactcctataagctggaacaataggtctcaacagcatgttcctgaaacctcaaggtctttgtatttctgatttctctttggacagctcttcctaaagatattcatatggccccctccatcatttcattctggtttcctaacaatgattcctaagggaggcctttcctaccaagtgttctcagatggtgccctccccacttcctcccactgcttcctatatccttgccctgctatagttttctctatggaccttattaacatctgactggcacgttacatatttattttttaaatactgattttttttttttgagatggagtcttgctctgtcacccaggctggagtgcaatagcacgatctcggctcactgcaacctctgcctcctggggtcaagtgattctcctgcctcagcctcctgagtagctggaattacaggtgcccaccaccatgcccagctattttttgtatttttagtagagatggggtttcaccaggttggctaggccggtctcgaactcctgacctcaggtgatccacctgcctcagcctaccaaagtgctgggattacaggtgtgagccaccacgcttggcctaaaatactgattctttatgtgattgctgtatgtctcccccgaatggaatcccagccccaagaacagtgtctgctggcacaagcagcactcgtgtatttgttgaactcaagtggttgaacaggagacttttcaatagtctttaatctagggtgacagatgagcctctgggcattctggggccctttgggacagttctcggctactgttcacactgcacatggagggcttcaaaggatccagggtctgaatcagccaagaacttagacacagcttcagttcaggagagatgtcctctctcatgaacgaagagctctcgaaaatgcctatgactgcaacaacaactacaaggagtccttgatcacacagcaggaggcacatgcgccctgtgaacttggtggctgcagtccttgtgatggtgcttttggctatttcagaagagggaaatgtaaacaaacctgccctttatctccactagtttgaatttacccaatctccccaataactaataaaaataacgatacacataaatataatttagtttgtttttatttcagcagttgtacgtgggtttttcacctgccccgcattctgtctcctgatcccccagtagagttttgctaagtatttcccagctgctcacaccccttagaaacgcgcttggcatgcaccccgaggccctgctcttctctccctgtcccaccacttcagggctgctggggaatgggtctctctgtgggccacaggtgtaaccattgtgttttccttgtctgtgccagggacaccttggcactcagatgcctgaaggtagcagcttgtccctctttgccttctctaattagatatttctctctctctctccctctctccataaagaaaactatgagagagggtgggtatgaaccaagtttgtttccttggttagtttcctaaccaagtttgagggtatgaacatactctccttttccttttctataaagctgaggagaagagtgagggagtgtgggcaagagaggtggctcaggctttccctgggcctgattgaactttaaaacttctctactaattaaacaacactgggctctacactttgcttaaccctgggaactggtcatcagcctttgacctcagttccccctcctgaccagctctctgccccaccctgtcctctggaacctctgcgagatttagaggaaagaaccagttttcaggcggattgcctcagatcacactatctccacttgcccagccctgtggaagattagcggccatgtattccaatgtgataggaactgtaacctctggaaaaaggtaagaggggtgagctttccccttgcctgcccctactgggttttgtgacctccaaaggac

SEQ ID NO: 3300 - DNA, 2300 bp, Homo sapien
ccaccccataaacttaaaacagaccaaaaatgtcagctttcagagaattctgtggtgcttgagaaacagacagtactagactgagttattagaaaatgtgcagcaaaccaacttttcccagagctgttatttggaattctttatccctttctagatcactagcttcattggatacgtatatttttcttgacattgaagctttttgtttgtttgggagggttttatttcttgtttttattttcaacttttcaaatagaattaccaattttgaagtcctcattttcatattaaggatcatttgcattctcttaatataatcagaaagctgattcagtgtttaattagatttaaatgttgatcaagaattaactgtaacttactagcactgaaaatacatgtttggtgtttcgcctgcgttcagctcatggttggaaatttgaagcagtgcttttcaaattaaacttttgctgacatcataggatgctaaaaaacaaggacaatcaactatgttttaaaactgcaacatttgatttgaacttaaaatgaatagagccacattattttaatggatgttttgttttacttgtgaactgattgagtcttaaggatagtttatgaattgatcacttgttgctcagaatcattagtataagtaggtaggaaatagtttgaagtcatttttcatagacttaactgtccaatgttgcaaatgtttcttcatgaaaatattgaaaagagtaaggttttttttttttttaattctgctgcacatattctgatgccatgtgtctgtgcttaattaactaagaccctataaaacgtgtttagtggggactgtttgatatagttgccctctccattcctctatttgcctgatttttttcagtttccctttctgtattttactactaaattagaaagcactggttatgtaataagttactacattgctttggttgagtaaaaacaagagtttatatttttcttgtttcttattttcttaacccttaactcctgctgaggtcataacaacctcagtctaagctctgtgtccatcatactgttaacttaaacaaatgggtggtgggggtgggaagggtaatacagtcctgccattgcctaccagtaggagagtccaaacagaacactcttttgagtagcaattatttaatttgcccagtcaaggcaccgtgtttatatactatttcacattgaatttgattatgccctacagacctggctggtcaaggatttgatatacacatattggcttgggattcgagctttcttttttatttaaataaaaatttatatatatattatatatatacatatatacatagctatatctgtatatatattgggtatgttttaaggattttttcgcatgagcgcagctgttgcgataaattgaccgattgggaggtggtagaagcactgaatgaaggtgaggctttttttttttccagttttcttatacatttgtcttctttttttaaaaaaaaaaaaaaaaatatatatatatatatatatatatatatatatgtatgctttttcttttttttttggcttttgtttgctttttgacttttacttaaaacccttttacatttccactttaaatgcctattgtttattgggagaaggaaagaaacttttgtatgtctgacagagtcccaagatttttcatttctctgcataacagtaaaaggcaacattattggcctccaaccttctttttttttttttttttttttttttggagagggagtctgcttctgttgcccaggctggagtgcagtgggttgatctcggctcgctacaacctccacctcccgggttcaagcgattctcctgcctcagcctcctgagtagctgggactacaggcacgcgccaccacgtccagctaatttttgtactacaaccttcttataagcagatttggactgatcttctcctttgggtatgtcagatcatcctaaattttagaagcagttgattcactttggaattcagaatgattcttgtattagaagataatttgtgggtattaatttttgtttaagtttaaaataaaagtaaagattcattttggatatcagttgaaaccccttagtaactcagtttctgttattcttgttctcatttcctttaaatacacttgttcttggcttttgccattttgattctgtgaagtaggcaggagcagggattaatttatacagtattcctgttctgaacaaaaccagaaaagtcactgtataaacttgacttaaaatagtatctttctcttttcatg

SEQ ID NO: 3301 - DNA, 2300 bp, Homo sapien
gaaacagggtctcactgtgttgcccaggctggagtacagtggtgcaatcttggctcactgcaacctctgcctcaggctcaagtgatcctcccgcctcaacctcccgagtagctgggaccacaggcatgcaccaccacacccggttaagtttttatatttttggtaaagacaaggtttcaccatgttgctcaggctagtctcaaactcctgagctcaagtgattcgcccgcttcagcctcccagagtgctgggattactggtgtgagccacagtgcctggctgcttaaattttttaacagagtaaatgacaaatgtttcacagtgcatactggctttgtttttcttttattcctaattttttaacattggctcattgtatcccaaggcatttgagggagagctgaagtaaaatatttcagaaactatcttctaaagatttttctactagcttctccaataagttttagaaatacaaatgtccacagaaatatattatagcaaaaatattaatagcataatttataatatgacaaatgttactcttttttttgagacagaatctcgctctgtcgccaggctggagttcagtggtgtgatctcggctcactgcaaccgctgtctcccaggctcaagtgattctcctgccttagtctccctagtagttgggaccacaggcacacgccaccacacccagctaatttttgtatttttattagagacggagcttcaccatgttggccagactggtctcgatcttaacctcgtgatccgcctgcctcggcctcccaaagtgctgggattacaggcatgagccacagcacccggcctatgttacacatttttatgaggaattttatacttaatatgtcttgctgctagagattttatgcaaaatatacacactgatagagttaatgtttcaagagagaatatttctagaaaataatattaagtacattttagttcttggttttgcttttatatttgctttttgatatgtgcctatgctttttatatagatttcgtaaaatgaataagcgcctggttccgagaagacccttgagtgcctctttgggtcaacttaatgaggtgggcctgccttcagcagctatccttccagatgaaggtgcagtggatctccctagcagaaaacctcctgctctgccaaatggaattgtatcaacagggaatacagtaacacagcttattccgcgagggacagaccccagctatgattctagtctgaaaccaggaaaaatagatcatctgagcagtagtgctcctggatcccctcctgacctgtacgtcatttttctaactcttatttcaaaatttcttcttcataaagtcgaaggaagatagaataattaatgtttgggatttaaaaaaaaaaaaccctgattattttttttggcctttattttgttgcttttttatttcccatgctagtgttttttaagaaacaattagcatagccaggcatggtggcacatgcctataatcccagcactttgggaggctgaggtggacgggtcacttgaggccagaagttcgagaccagcctggccaacatgatgaaacccatttctactaaaaatacaaaaattagccaggcatggtggcacatgcctgtaatcccagctacttgggaggctgaagcatgagaatcgcttgaacccaggaggcggaggttgcagtaagccgagattgcaccactgcactccagcctgggtgacagagcgacagagcaacagagcgagactctgtctcaaaaaaaaaagaaaagaaacaattaacataggggaaataagatttaaaaattgcaaattttgtagaagggaggactattagaataagtgagtttcccaaattgtagcaatcttttttacttgtaacaatttatgcacatgagaagtattttttaaacaacttccataatattattcccttaggctagaatctgttcctaagagtatttctgccttacctgtgaatccacattctatacctccaagggggccagcagatctgcctccaatgcctgttaccaaaccacttcagatggtacctcgaggttctcagttatatccagcacaacagacggatgtttattatcaggatcctcgaggagcagctccgccatttgaaccagcaccttatcagcagggtaacgattttaaatttatattgctaacttttcttaggaattatcagaactgttcttcaggtcagagtgatcatttacacagtagcctctttaagataagtaaatgtataaatgcattttttaatactttgga

SEQ ID NO: 3302 - DNA, 2300 bp, Homo sapien
aaacattattcttcccttaactttcgttcagcagtcatctttaaaatcttaccataaatatcacttacctgtacatcagctccaccctaatttggtcaggttgcctctgttatatatgcttgtatctccctgtactttacctacatatcacttaccataacttgcaattatatatttagttatgtgattgctgtttatatgtttagtgaaagaaacagtgcaagctccatgtggacttagaatgacttatcttttttttatcgttagtactgaacacatagtaaagaccaataaaacatttttttgtcatttaactaaattaaatttttcctgggaatggaataaggtttcttttttcttttttttttttttttttgagatggggtcttgctctgtcacccaggctggagtgcagtcacatgttcgtagctcactgcagcctcaaactcctgggctcaagcgatcctcctaccttagcccttagcttcctgggttgctgggaccacaggtgcatgccaccacgcctggctaatttttgtagagacagggtctccctatgttacctaggctggtctcaaactcctgggctcaagcagtcttcccatctcagcctctgaaagtgctggaattataggcatgagccatcacacccagcctgaaaaatttgtatgagtctgtcaagattgtggtataaatacagaggaaacatatgtttatataaattgtttctacttttaaaatattcttatgttgtcaaaagttttgtttgtttgtttgttttgagatggagtctcactgtgtcgcccaggcaggagtacagtggcggatctcggctcaccgcaacctccacctcctgggttcaagcaattctccttactcagcttcccgagttcctgggattacagccatgcaccaccacacctggctaattttttatatttttggtagagacggggtttcaccatgttggccagtctggtcttgaactcccaacctcaagtgacccacccgcctcagcctcccaaagcgctgggattacaaacctgagacaccgcgcctggctgtcaaaagttatttatgtcttgttcagtaattcttccctccctctacccccttccccaacaaagcttttttttttttttttttttttctgagatggagtttcactcttgttccccagagtggagtgcaatggcgcgatcttggctcaccacaacctccgcctcccgggtttaagcgattctcccgcctcagcctcctgagtagctggggttacaggcgcctgccaccacgcctggctaatttttgtatttttagtggacatggggtttcaccatgttggccaggctggtctcgaactcctgacctcaaggaatctgcctgccttggcctcccaaattgctgggattacaggcgtgagccaccatacccagccaagattattttttagatatatttattttttaaaaattagagatttagctgggcatggtggctcacacctgtaatcccagcactttgggatgccaaggcgggaggatcatctgaggtcaggagttcaagaccagcctgaccaacatggagaaatcccgtctctactaaaaatacaaaattagtcaggtgtggtggtgcatgcctgtaatctcagctacttgggaagctgaggcaggacaatcgcttgaacccaggagacggaggttgcaccattgcactccagcctgggcaacaggagcgaaattccgtctcaaaaaaaaaaaaaagacttagataaacttaagagactagggtcctggatggaactttattattaacttcaagtttcctcttaggcaggggactacttcccatctctaaaatgagggaatggaaatagatgttctatcatggctctaattctgtaaaagtgtaaaaagatggattacagtgatacaaatgtggtataaaaagttgtggaataagactggacttgtggttctttttcaacagtttaattgaaaagaaagacactcaatttttttcctttttctttattttcaggttatatttcacactatgtgctgactgtatctacagaagatatttaaaaaaaaaaaagataaactttttttcaaagattttgattccagtggaatctttgctttagatttgtgtgtgtgtttgtgttcgtgaattgtaactccagaagcaatgcctgtacaagctccacaatggacggatttcctctcctgcccaatttgcactcagactttcgacgaaacaattcgaaagcccatcagtttgggttgtggccatactgtctg

SEQ ID NO: 3303 - DNA, 2300 bp, Homo sapien
accagtttgtcatgttatgaatcatgctggagtattttataacaccatctctcaaagtgagagtttcagtcctttcatggaccagggctgctaggatacgcttaatgcaaatgaagccacagtggaaagagaagtgagcagcacataccacatgaagaatgctttgttattaattttttattccttttagtttctcgactaaaagcctgaagatctgttaataattttttggcatgtgcttagaattgtttttctggtggtaaggatgagtttgcatcagatcaccttaattgtcttttatctaggttctctcatgacttgtctcttatctatgttgtactgtgaggaaaagttcagttttaaagaatgacccctgttgatgagaggtgttacatgtggccatgggacaggatttttcttttccttatagcaagttggcacatgaagatagcatgctccacttaaatagaagaattaactcgcagtggccagtggtgtccactattgctttcaaagacatatggaactgaatttggggaacactaaacttgttttggacttgccattttttttttaaattcttttttagctaagttacctattgaatgcccataattaccacatccattgtccttttttgtcaaaaagcttcactccagttagaagatacctgaaggcagaaactgcggctttgtcaactgttgatttcctcatggcgcgcagtgtaaatttactagtactttatttagtagaggcttagtacttactggttggcagatttattaatagttcctgtacatctcaggaaatcaacagatgatttatgttattctaaccctaactttattaaatataataaaaactttcagcatttattgtcaggcccagggctaggtaggctcctgagatacagaagttaataagggaagcagcccagaaggtaggggaaacaaaaaaatagttacaacactcttgatatgtctcagcatctatagacattaacatcaggaaaagcgggggtgtggggggaaggaatttgtcagggagggccctttggacaaatgtcacgtttctcagagtagcttttaaatatgggtgggaaaatgagggcaggggaattgaagtgggatagaagggagatatttaaactaaagtcattctatggctgcaatcactggacactatattcacttatccatgcaatcacattcattgagtgcttcctatgagttaggcagggtgcacagtgtaagatacaaatgaatgatacaggttcacagcggttgtctagtgggataaaatgctgcacagggcaacctggataagcctgacatgttaggtgccacaaaactacagaacaaagtgctaaggagattcggaaaatttacaggtcatttctggttgcaggatctagaagaaggatgtccacaattcaaggatcagtacaatcttcgtagcgaaaaagcgttggtttattctacctctacctagtttgtacctcaacatcttttaccccaaaggataaaaaggtgcaaatgagggcacattttcttcatataatacgtaatggtgcttacttattgctttcctgttcattccccgcaggtgatttccctcttcagtctcccccgagtctcacagaaggaactaacaagggagcgcttcacaagcacacagacaccttcaaacaggcgcagaagagtacttggtgaaaaagtattctttcaggtgactttccttaagattactgagcattaagaatgaaaatatgtaaaccaggtttacgagcaagaaaataatctctccacattcagagttaatcttccgaactcagcaactgccagtagaacgcaccccggtcagggcgggctcgcgggcgcggtcccacccccaggcccctccgccgcggaggttctccagcgccgcccgtactcccgcctttcgcgcgtccctgctctaacagctctggttctgtcaggacctcactcctccgctcccggcgcaaccgcggccacgcagcgacgtgcacgcgcgtgtgcgccgccgccgcccggcagagtgggcgcctccgacatcaggagcgcgcacgccgcgcagaggggcctggacgagcgcgcttccgacccgccgccaccgcctcctcccctccttctcggcccgccccctccctcgcctcttcctgccaggcggcccttctcccctcccctctcagttccctccgccctcctcgggctccagcggtggcggagcgaacgggaccggcccggcttcagagcgcgaggtggagggtggaacgcggg

SEQ ID NO: 3304 - DNA, 2300 bp, Homo sapien
aaggatatcagaatgcaattaaaacctttgcctaatggtatttccttttttattcttttaggtaagcagaattttgtacagtttctgtacagcattcaaacgttcttccagacaagtgtctgatgttaaagactcagttattcctacccccgacagtgatgtgtttaccttcagtgtctccttggaggtaaaagaagacgatggaaaaggaaactttaggtgaggcatttggaaagattaaaaattcgcattgtatctggagtataatataggcgcatataaagtttcaagaaactatacagtgttggcataaagcctcaaactgataaatatttggctggtgaattaatattttttattcttgtgcttgtcagatatttctttccttttttttttgagatggagtttcgctcttgtcacccaggctggagtgtgcatgtgcaatggcacgatctcgactcactgccatctctgcctcctgggttccagtgattctcctgcctcggcctcctaagtagctgggattacaggcgcctgccaccatgcctggctcatttttgtatttttaggagagacggggtttcaccccgttggccaggcttgtctcgaactcctgacctcaggtgatctgccttccttggcctcccaaagtgctgggattataagtgtgagccaccgcgcttggtcagatacttattttcttaatgatttaaaaaatactgatactgtagaaaatttagtaaaataataaaagtagaataaaaactacgatcttgtcagccacagtcacttttaacatttggtctcttccctttgtttatttctaggggaatttttacacaattgtatatatataccttttttttttctttatgttaagtgttctaatcaaaattgtttttaacagtaactgataatatatggtttgaccaccacttaattaaccatttcttttttttttgtacatttagaatgttttcctccagttcagatatagacagttaataggaaacagttatattatttaatgctcaactttgttccttagctgtgcctttaattctaagagtagttgctagctaggtattttatctgtagttttacagacattgaaattgaggtcatgtaaaagttgctcaagatattttttctttttagataagacaagccatattttatacattgattattttaatgaattaatttgtaagaatagtctagcctaggctagaatttgattaacttgtccctgttatgtatctctttgtccatcttttgtttatatattcatggatacatcacagtcatctcaaattctatgtgtctaaaagtatgctcttctcacttcctttgctttggatttcactgttttacaggcacttatgaccacccaaccagctaaaccagacatgtgacagtcttaagaacttcaagtaaacattattcctaaatttgttttaaaactgaaatttatcatgttgtcattttttttttttttttggagatagagtcttgctctgtcgcccaggcaagattgcagcagtgcaatcttggctcactgcaacctctgcctcctgggttcaaccaattctcctgcctcagcctccccagtagctgggactacaagcatgcaccaccactcagctaatttttgtatttttagtagagatggggttttaccatgttggccaggctggcctcaaactcttgatctcaagtgatcagcctgccttggcctcccaaagtgctgggattacaggcgtaagccaccgtgcttggccatgttgtcttttttaagatcttgcttttaactttggttagcagacaaaatataaggctcttgtaaactcaatttagaaattaataatgactgtgttgctgactataaagtttatagtcaaataaaattaatagtttgctgcctgtggcaaggtgagagtttagtatatcttaagaataagggtgttgttgcttaaatactttgttgttttgttctaaccttggaataggttattttatcattttattagattattggtaattcctattccttttgaatatttcagccctgtgcctaaggatagagataaattttatttcaaattaaagcaaggaatagagaagaaggttgtgattacagtgcagcaactttctaacaaagaattagctattgaaaggtaagcagcttgctcctaaatgctaccaaaaacttgtattgacattgttactgtctcagatgcattgctcagtgtggcttttcactatacttcattttctccaattaaaaatgaggataatta

SEQ ID NO: 3305 - DNA, 2300 bp, Homo sapien
aagctattttaactttcaaatagaaataccttctaatattgcagttagtgaaaacatttaatttgtgatttggagacgttataggaaaataatcatcttagagtaagtataaagtttcttagtgaactgaaattcttatatttagtgataataagcactatatgctttcttctttttagctgtgttttgcaaatatcagttaaacattactaattaggtcaacttttttttgagtaatttcatggtaatatcaatactgattttatagcagtacaggaatggtttattcaggcttttgggtacctgtttgtctgctaagtgttgtgtgaagtgatgaggttatgcatatgagtaaaatatagctcttaccatctgtgggttcatggtcttgtgggaaacaaactttttagtatctggtggtacttcaagccacagaaatatagaggaagcactgcctgaataggtcaggtaaggaaaaccagttaaattgattattaaaacataaattagctattgatctatgtctcttacatcttttttttttttcttgaccacatatcagtaatgaaagtggttttacctaaggcaagccattagcattttggagccctgaaaattccatgaggaagtaaattaggaggattgaggtaatgaaaacttttaagatcctaggtcctaattaatcatggtctttcagagtttaaaagactaagatgaattactgcagagatttgtccataaaacctaaattcagattacagaattatagaactggtataaacttctgaggccccttcactatgtctctctaactttcagaacagtcctccccacctttgagtccatatctaaatcaaaagagttgtgagcattcatgctctcagacagagaaggggcttacttgcaacaaatagttgggcaaatgagaggcttgtatttgcaatgattagcagttgtgatttgttattacccagtgttgttaatcttcatagtggacattgaacctcagctagactacttctaatgaagagaaactcattaccttatgttaaagtctaagggacagttctggttattacaaagttatttttttataatcacctgaaatcatagttcttgtaacttggcctaattagtcttaattctgcactctagaacaagatattaatacttttactccttctatgacactcccaaatatcatgtgatcctcatgacaggaaagtcctatttataaatgaagatatatttttcagtgaaatagccagattacttatatataacagtcatatgctgagtaagaaaatttccgtgaatgatggacccatactttaaggtcgtcccgtaagattataatgtatttttactgtaccttttctgtgtttaggtacacaaatggtattgttatagttgctatagtatttggtacagtaacgtgctgtacaagtttgtagccttggagcaacagcctagttgtgtagcccctataccatctaggtttttataagtacggtgtattctatttgcataaagaaatcacttaatgacacataacttagaacataaccctatcattaagcaacaggtgactctgtgtgtgtgtgtgtgtgtgtgtgtgtgtgtgtagaggagagaaagagaccattatcatatgagtgtgttggggctgctgagagggtttcgtttacaagtgaccttgagtgtatttcatctctggaatgcatggtccctgcgctcaagctacacaatctgattagtgaagtattactaatacactagaaaaatatacatagtaattaccaaatgactgacacaattttatagggggttcagagaaacatctgtgaatgggtaataatgaaaaaagaaaagtttttctctttgttttagtctgacccttttaacagtctctattcataatgtgaggaaatcgctacaaaaactgaaatattgtagatactgttcatttgcatatggaaatacttgtatgctgtgtgttgttctttcatgggacaaactctacccctcctctctccacacacatatacacaagctataagtagcctagctttcgccataggagttgctggcttttttagtgagagtcaagagctggcttggtaaagtcttaaagaatggagaagaggaggaaggagagaagggaagaaagagggagtaagtgtaacagtagagggagagagttaatacacttggatgctgcttacaaaccaaaaattagtctcctaatactaatttatgattgtaagaaagtatataaatatctgacatatagaaaatag

SEQ ID NO: 3306 - DNA, 2300 bp, Homo sapien
ggcaactgttacctagtgacagtttcagctgcagtagccattggctgtgctgttgattggggcaggagggccgagtcacctttctgatggtgagtttttctgcatcagcccaggatgaggaggaggagtagggcttgggctcaggtggagtcattgatgctgagagattgtgaagaatatactgacagcatccttgtagctgcatcacagtaaatcggacttctgaatcaagcagcccagcctagcagctgataagagtgaatgtaggtgagaagcattaccttattcctgtaacaagagaactgttttgtgataagtgaaactaggaatgtagaagaagaaatatcctatggctattataaaagaagaaggacttgcctgaatgacttggtggtgcaccagaaaataactttcagaagaatgctttctgttaagctgctgcattgttcctggaggaaatgttatttctaatgcatgttatttcttcaaaagataggataacaaagaatgacaggagactctctgaaatgacttcacttttaaaaaatactttggcaaatgttaacctgatatcaaaatgaccttggaagcattttggatggattctatcctggcagccttgcaatgtttcaaactctaggatttaaagttcatcttgatactttagaggtattttaaaataagactatcttgcaacctacctaatggcccctgtgttaattgagcacttgctcaaaatagagtacagaaaaatagaagaggcattttttaacatatggctgctacataactgcaaatgtaataaacaaggtaattttccactttcagaagatatagttgaagtaatgatttaatgtgttaaatcatctactgaaaatagaaaaggtatagcaacatagaacatgaagcctattagaaatacctaagtaataaataatggcagcatttctggtcaaataagctcggagtatattggaaagttttattgtctaactttatatttacatatatatgtgagatatgggtatacagttgcaaaggtgagaaataactgtgagctacatattttattatcatgctccattataaggaaggtggtatatgaaataacaaatgttattttaagttatagatgccaaattaatagcaaaaataattcattttgaaaaggaagaggtataagttacgttgctgttagtaccaccagtaactgtaatggattaaaactgctttcatctaaatgctttaaaaatgcatgcagaattaaaacttcagaagtttattacattttgccaggtgttaattcattaattcattgtatattctcttttctattggaaaatacttttttctcatgagagttatagggcaatctggagtctgtttgttacctctattctgcccatgtagagatgaatcttttcaaattaactttgatagagttgtttttcttagattttagaaaaatgagaaataggttataaatttgaccccccaacatcaatccctgaactaagcccaaagacactctttgccacaatgaactttttcttagcttttcaaccaaatttgagatcttaaattatttaaaatctaaaatatgaatgcatttttcatcatagataaagcaggaagcctgagacagtttcagagtttttcttttctcattctttccagttgctccctaagaaactgcctctcttaggagaacagcccacagaagcttttcttcctttggcaattcattttttttctttttacagatttaatttttcatagtgcaagataataagaagtctattttctctagaagtgccttatgtctgcaaaaagttctttgagggcaccagaggaaactaattagtgacctcttttcacctcctttctagcttatccccttctctccaccccttaccgccccccccccacccccccgcccgaaagctgaggtgtgtcactgctgaactgaggctggtgaagagacttgagcactctctgggactctcagctgtgacagaagcactgacactgtctactgaagcaggttctgaaacactcatgtgcggtgtttaacagatgctgggcagggcatctgcttgctgtagccaagtctgcaggtgtctttaaatttccaagccatgaatgaatccaggtggactgaatggaggatcctgaacatgagcagtggcattgtgaatgtgtccgagcgtcactcctgcccacttggatttggccactacagtgtggtggatgtctgcatcttcgagacagtggttattgtgttgctgacatttctgatc

SEQ ID NO: 3307 - DNA, 2300 bp, Homo sapien
gatgtgaaatttttccagtttctactttttctagtattgcttccagacccaactttagagcagcttaaaggactttttttcctaatactcggaagagctaccagaatatcaaattcaagagtctaaaggagtttacaggctagatctaaaaaagccttattttctttaaatttccacttagatttatcttcttaagattctttttttctttatgacagaacctttctacttaaaactttctactttaatgctaaaatagatgccatatagattgcaagcaacatgtgtgaaaaagagaaataacagaacattgcaagtataaccaaagctaatatttattaaataataccatgcacaaagcaatacattaagcattcaaaatgtactatgtcattcagttctcaaaaaatccaacagaagcttggaagcaattaggtaacttctacaaaattacataggcagcaacaggaagagtgagtattacaactcaggtttgaaccgaggttccaagatggccaaaaaggaacagctccagtctacagctcccagcgtgagcgacgcagaagacaggtgatttctgcatttccaacagaggtaccgggttcatctcactggggcttgtcacacagtgggtgcagcccaaggagcagcgtggggcattgctcacctgggaagtgcaaggggttggggaattccctttcctagccaagggaagccatgacagatagtacctggaaaatcgggaccctcccaccctaatactgcgcttttccaatggtcttagcaaacggaacaccaggagattatatcccgcacctggctcggagagtcccacacccacggagcctcactcactgctaacacagcagtctgagatcaagccgcaagtgtcagcaaggctgagggaggggcatccgccattgctgaagcttgagtaggtaaacaaagcagccgggaagactgaactgggtggagcccaccaaagctcaaggaggcctgcctgccttcctggactccagtactgggggcagggcatagttgaacaaacggcagcagaaacttctgcagacttaaatgtccctgtctgacagctttgaagagagtagtggttctcccagcatgtagtttgggacctgagaatggacagactgcctcctcaagtgggtccctgacacctgagtagtctaattgggagacacctcccaggaggggccaaccgacacctcatacagccaggtgcccttctgagatgaagcttccagaggaaggatcaggcagcaacatttgccattctgcaatatttgctgttctgcagcttccactggtgatacccaggcaaacagggtctggagtggacctccagcaaactccaacagacctgcaacagagggtcgtgactgttagaaggaaaactaacaaacagaaaggacatccacaccaaaaccccatctgtaagtcaccatcatcaaagaccaaaggtagataaaaccacaaagacggggagaaaccagagcagaaaagctaaaaattctaaaaatcagagggcctcttctcctccaaagtatcgcagctcctcgccagcaatagaacaaagctggatagagaatgactttgacaagttgagagaagaagacttcagatgatcagtaataacgaacttatccgagctaaaggacgatgtttgaacccattgcaaagaagctaaaaaccatgaagaaagattagacgaatggctaactagaataaagagcatagacaagaccttaaatgacctgatggagctgaaaaccatggcaagagaactacatgatgcacgcacaagcttcagcagctgattaaatcaagtggaagaaagggtatcagtgattgaagatcaaatgaatgaaatgaagcaagaagagaagtttagagaaaaaaagagtaaaaagaaatgaacaaagcctccaagaaatatgggactatgtgaaaaaaacaaatctacacctgactggtgtacctgaaagtgacaaggagaatggaaccaagttggaaaacactctgcaggatattacccaggagaacttacccaacctagcaaggcaggccaacattcaaattcaggaaatacagagaacgccacaaagatactcctcgagaagagcaactccaagacacataactgtcagattcaccaaagttgaaataaaggaaaaaatgttaagggcagccagagagaaaggtcgagttacccacaaagggaagcctatcagactaacagcggatctctcggcagaaagtttacaagccagaagacagtgggg

SEQ ID NO: 3308 - DNA, 2300 bp, Homo sapien
gcactataaaccaaatggacctaatagatatttcatccagcagctgcagaatacatatgcttctcctcagtgcatagatctcaaagacagaccatttttttttttttttttttttgagacagagtctcactctgctgccaggctggagtgcagtgatgcgatctcggctcactgcaacctccgcctcccgggttcaagggattcccctgcctcagcctcccaagtagctgggactacaggcatgcaccaacatgcccagctaatttttgtattttagtagagatggggttttcccatgttggccaggatagccttgatctcctgacctcgtgatctgcccccatcggcctctcaaagttctgggattacagccgtgagccaccacacctggcctaaaatgtttttaaaacctgaaatcatatcaattatcttctcagaccacaatggaataaaactagaaatcaacaacaagaggaatgttggaaactatacaaacacatagaaattaaacactatgctgctgaatgaccagtgagtcaatgaagaaattaagaaggaaattcaaaaattccttaaaacaaattaaaatggaaacccaacacaccaatatctctggaatacagtgaaagcaatactgagagcaaagtttataccagtaagtgcctacattaaaatgtagaacaaagaaataactaagatgaaagcagaaataaatgaaattggaaagagaaaaagaacaatacacaagattaacaaaaggttagttttttgaaaaatttttcgaaaagttcgaaaagttttttgaaaacaaaatcaacaaacctgtaggaagattaagaaaaaaagagagaagacaaataaataaaatcagagattaaaaaaaaattacaactgattccacagaaattcaaagatcattagaagctactatcaacaaccatatgccaataaatcagaaaacctagaagaaatggacaaattcctagacacatataacctaccaagattgaaccaggaaaaaattaaaaactcgaatagacccttaacaagtaatgagactgagatgtaataaaaagtctcctatcaagaaaagtcccagaaaatgatggcttcactgcagaattttacaaaacatttgaagaactaatatcaatcctattcaaactattccaaaaaataatggaggagtgaatacttccaaactcattctatgagggcagtattaccctgataacaaaaccagacaaagacacatcaaaaaaagaaaattccaggccaacatttctgacgaacattgatacaaaaaatcctcaacaaaatactagcaaaccaaattcaacaacacattaaaaacatcattcatcatgatcaactgagatttatccccaggatgtaaggatggttcaacatatgcaaatcaatcaatataaacatcatataaaaagaatgaaggacgtagaccatatgatcatttcaattgatacaaaaaaaccattcaataaaattcaccatctcttcatgattaaatttaaaaaaacctaaaaaaactggatagagaagaaacatacttcaacacacaataaaagccatatagaaaagaaccacatctacatatgcgtaaaacctgaaaatctttcctccaagatctggaacaagacaaagatgcccactttcaccaccgttattcaacatagtcctggaaatcctagctaaaggaatcagataagataaagaaataaaggtcatccaaactgaaatggaagaagtcaaattatccttctttgcagatgatataatcttatatttagaaaaacctaaagacttaatcaagaaattattagaactgagaagtaaattacataaaattacaggatataaaatcaatatatgaaaatcaatagcatttaaatatgccaacaatgaacaatctgaaaaagaaatttaaaatttaagaatccaatttgcaacagctacaaataaattatctaggaataacttaaccaaagaagtgaaagatctgtacaataagaactacaaaacactgatgaaagaaactgaagaggagggaggaaccaagatggccgaataggaacagctccggtctacagctcccagcgtgagccacgcagaagacgggtgatttctgcatttccatctgaggtaccgggttcatctcactagggagtgccagacagtgggcgcaggccagtgtgtgtgcaccgtgcgcgagccgaagcagggcgaggcattgcctcacctgggaagcgcaaggggtcagggagttccctttccgagtcaaa

SEQ ID NO: 3309 - DNA, 2300 bp, Homo sapien
gggaggatagtctcacgctatttaccaaaatttaaaatgcatttattttttcacccagcattcccccttttgggaatgtgctctaccccaccccatttttgcatatgtacaaaatgatacatatgcaaggtttattgaagctttatatgattaaaaaattaggaacatctcaagtatcaataggaaacttgttaaatgagctatagtacttttatataatggaatactatgtaattgcttttaaaaaaataaagagacaactctttatatactgagatagaaagatttccaacatatattgttaaggaaaaaaatcaagatgtataacaatgtatatagaatattatcttttatgtgggatgggacaaaataaaattaaaaatgtaattattttatttgcatagataatcagtggcagaatacaggagaaattatttagagtagatatgaggctatgcaaaagaggttggggggtgtaggtaccggggattagtttatatataatgatagggaggagcgagacttttacctttagatctttttacattgtttttattttattttattttattttttttttagacggggtctcgctctgtcacccatgctgtaatgcagtgacgtgattttgctcactgcaacctccacctcccaggctcaagcgatccttccacctcatcctcccaagtagctggactacacactcatgttgccacactcggctaatttttttattctttgtagagacagggttttgccatgttggtcaggctggtctcgaactcctgggcttaagtgatctggctgccttggcctcccaaagtgtgctttggttttttaatcatgagtgtattgcctgtttttaaaggtagcctaatgaatgaatgacaacatgattaaaattaacaaaagaagataattcatctcaagtaaggaggtcatgtcactctgccaaagactggctctgaaggacttcatttgctccaggccttcagctacttatgcagaggactaataacatgaaggaacttttttgacattctggcaaaatgccacttatttatattgtatatgtatatatttttctgtagatgccagaggaacaagcattctgtgttttggtgaaaatcatgtacgactatggtttgagagacctctacagaaacaacttcgaagatcttcattgcaaattctaccagttggagagactaatgcaggtaaataaaaattaggaacttttatcactcagggatttgttgagtcatagaaaaagcctaatagagttggtaagcaataatgaattatagaagtttaatggaatattatagaaaatgtacatggatttagtttcagaccaatatctacattggtctatcataatatgtttatttagccattttactattttaaaaatatctcacattttaaatgttcaagttaaatatactttgaagtgagaatctaatgagtttaatcattaagagattgccaagtattgtttgtagaggaatggagatatttacagagtaaaaattgaaatacctaagagctttctgcatactaattagcaccacttccttatttgagtccacgtagaacacttggaaaagccagaaagatattcataagagaataaaacatactaaaatactgtagggatacatttaaaaatttttaaatataattcctaatctcaatgttgttgttgtgctttacaatgcgtatttataaatgtgtgtgagaaacatgcatccttttatatataccaaatattacacagtaaaaaagattgtgaccacaggcaaagtgattgaccagagctgacaaaaggaatttttaactagctttggagttctacctgaagttgataatcttaaatttataatgggtttttgtggcatgtttatgtgactttgtttaaaaggggttttgggaatccaagagaaatgtgaaggagatacatggatggattgattccatattggggaagggtaaaatggttgaggaaggaggttcgtggaatgtgagagcagaagatgctagtaggagctcattgatatgaactgccaggggatccgtaggtgtctaaagagggaagtgaagccagtaggagactgagagattagaagaacagggcagtagaggatgaatttgcagtgaggttaaaggaacaatttattgggagaagggaatgtaggagggtagaagactttaaaattgaaaagaaataaaaggaggcagggatgtaaaacgagccataagtacaatgacaaatgggcattaaggaggaaaaagactat

SEQ ID NO: 3310 - DNA, 2300 bp, Homo sapien
ggattagtttatatataatgatagggaggagcgagacttttacctttagatctttttacattgtttttattttattttattttattttttttttagacggggtctcgctctgtcacccatgctgtaatgcagtgacgtgattttgctcactgcaacctccacctcccaggctcaagcgatccttccacctcatcctcccaagtagctggactacacactcatgttgccacactcggctaatttttttattctttgtagagacagggttttgccatgttggtcaggctggtctcgaactcctgggcttaagtgatctggctgccttggcctcccaaagtgtgctttggttttttaatcatgagtgtattgcctgtttttaaaggtagcctaatgaatgaatgacaacatgattaaaattaacaaaagaagataattcatctcaagtaaggaggtcatgtcactctgccaaagactggctctgaaggacttcatttgctccaggccttcagctacttatgcagaggactaataacatgaaggaacttttttgacattctggcaaaatgccacttatttatattgtatatgtatatatttttctgtagatgccagaggaacaagcattctgtgttttggtgaaaatcatgtacgactatggtttgagagacctctacagaaacaacttcgaagatcttcattgcaaattctaccagttggagagactaatgcaggtaaataaaaattaggaacttttatcactcagggatttgttgagtcatagaaaaagcctaatagagttggtaagcaataatgaattatagaagtttaatggaatattatagaaaatgtacatggatttagtttcagaccaatatctacattggtctatcataatatgtttatttagccattttactattttaaaaatatctcacattttaaatgttcaagttaaatatactttgaagtgagaatctaatgagtttaatcattaagagattgccaagtattgtttgtagaggaatggagatatttacagagtaaaaattgaaatacctaagagctttctgcatactaattagcaccacttccttatttgagtccacgtagaacacttggaaaagccagaaagatattcataagagaataaaacatactaaaatactgtagggatacatttaaaaatttttaaatataattcctaatctcaatgttgttgttgtgctttacaatgcgtatttataaatgtgtgtgagaaacatgcatccttttatatataccaaatattacacagtaaaaaagattgtgaccacaggcaaagtgattgaccagagctgacaaaaggaatttttaactagctttggagttctacctgaagttgataatcttaaatttataatgggtttttgtggcatgtttatgtgactttgtttaaaaggggttttgggaatccaagagaaatgtgaaggagatacatggatggattgattccatattggggaagggtaaaatggttgaggaaggaggttcgtggaatgtgagagcagaagatgctagtaggagctcattgatatgaactgccaggggatccgtaggtgtctaaagagggaagtgaagccagtaggagactgagagattagaagaacagggcagtagaggatgaatttgcagtgaggttaaaggaacaatttattgggagaagggaatgtaggagggtagaagactttaaaattgaaaagaaataaaaggaggcagggatgtaaaacgagccataagtacaatgacaaatgggcattaaggaggaaaaagactatgtagaagaatctggtaaatatggatattaacagcaataagctcctttttaacgatttaattctaccaagtaaatatttgggattactcgctttttgccttttatttaccaaaaaattcatatattttcaaaggtcagtattcctaagggctttgagaatcaagtaaatatacctaataaataacagatgtgtggtactatgaagaacctcaaccacatttttctgttagcagttttttttcagttaactgaatgagcatttggacgttccatttgaagtacctaatgggcacatttggctatttttcaaagagagcatgtagttcaagaaatggcttattttgttttttattcttctttttgtggtctatttaggaaaacaaaatgaaggtggcctttgtctttcagttatggtaatagctatgctaatactttgtaccttgctgttcatgcttttgaaaaccatttgcttgtttaaattgggaga

SEQ ID NO: 3311 - DNA, 2300 bp, Homo sapien
ttatttgagtccacgtagaacacttggaaaagccagaaagatattcataagagaataaaacatactaaaatactgtagggatacatttaaaaatttttaaatataattcctaatctcaatgttgttgttgtgctttacaatgcgtatttataaatgtgtgtgagaaacatgcatccttttatatataccaaatattacacagtaaaaaagattgtgaccacaggcaaagtgattgaccagagctgacaaaaggaatttttaactagctttggagttctacctgaagttgataatcttaaatttataatgggtttttgtggcatgtttatgtgactttgtttaaaaggggttttgggaatccaagagaaatgtgaaggagatacatggatggattgattccatattggggaagggtaaaatggttgaggaaggaggttcgtggaatgtgagagcagaagatgctagtaggagctcattgatatgaactgccaggggatccgtaggtgtctaaagagggaagtgaagccagtaggagactgagagattagaagaacagggcagtagaggatgaatttgcagtgaggttaaaggaacaatttattgggagaagggaatgtaggagggtagaagactttaaaattgaaaagaaataaaaggaggcagggatgtaaaacgagccataagtacaatgacaaatgggcattaaggaggaaaaagactatgtagaagaatctggtaaatatggatattaacagcaataagctcctttttaacgatttaattctaccaagtaaatatttgggattactcgctttttgccttttatttaccaaaaaattcatatattttcaaaggtcagtattcctaagggctttgagaatcaagtaaatatacctaataaataacagatgtgtggtactatgaagaacctcaaccacatttttctgttagcagttttttttcagttaactgaatgagcatttggacgttccatttgaagtacctaatgggcacatttggctatttttcaaagagagcatgtagttcaagaaatggcttattttgttttttattcttctttttgtggtctatttaggaaaacaaaatgaaggtggcctttgtctttcagttatggtaatagctatgctaatactttgtaccttgctgttcatgcttttgaaaaccatttgcttgtttaaattgggagaaaaaaataaagttaccataaaggcatttttagaagatatccaattttatatattatacctttgcataatttctttgctttgccatttttaatatgctgaagacagatttctaaatagtttgtcgtggcttagaattttctaagtgttcaaaaaatatactgaaacatcatagaccccagattagatgatttccaaagagaagatacatttcttttctagctagttaagaattgaaccctgggctgggtacagtggctcacacctgtaatcccagcactttgggaggccaagtcgggcagatcacttgaggtcaggagttcgagaccagccaggctaatatggtgaaacactgtctctagtaaaaaatacaaaaaataatcgggcctggtggagggtgcctataatctcagctacttggaaggctgaggcaggaaaatggcttgaacctgggaggcggaggttgcagtgagccaggatcatgccactgtactccagcctggatgacagagcaagactcttatctcaaaaaaaaaaaaaaaaaatttaaccctgaatggggatgctatgacttgaccctggagtcaagatactcattacactacagatgctctggtagaatgagaattttgcaagaatcaagaacagtcaagtgagcaagagatggtctttcttagttgtttataataagtctgtttttattttcctcaattatctgtcatatccctaattctcatctgctgtcatcacttctgtgcagttatacaagacaaccaatactagaatagagttacagcgatcatagaaagctgtttgtaagttgcagttgtggcaggaacttcattgttctgctgcaagcttctcattgctcctaaattttccactttgacttttaggaacagctaccggacctgcatagccatttttctgatctgaacctggaagctcatatgtatgcatcccagtggtttctcactctttttactgccaagttcccactctgcatggtgttccacatcattgacttactgctttgtgaggtagagtgactcccatctttcactaagccaaaatagaaagtagtttctactaaaa

SEQ ID NO: 3312 - DNA, 2300 bp, Homo sapien
ccctcttccagctgaacctatcctcatcctaggcagtacatcaaacatttactccagaactttaggacctgaaatttatttgtatatacgtaatattctatgcttatgatcattttacattaagatctttactttgcatagttttttgtttttgtttttagagatggggttccactatgttgcccaggttagagtgtagtggctgttcacaggcaggaacgtagcacattagagcctggaactcctgagctcaaaggatcctcccacctcagcctctggagtagctgggaatacaggcacacactactgttcctagctctactttatttagtttgttaagaaatcattttagcactttgggaggccgaggcaggcggatcacaaggtcaggagatcgagaccatcctggctaacacggtgaaaccccatctctactaaaaatacaaaaaaaaaaaaaaaaaatagctgggtgtggtggcgggcgcttgtagtcccagctactcgggaggctgagacaggagaatgatgtgaacccgggaggcagagcttgcagctgagatgctgccactgcactccagcctgggtgacagagcgacaatccgtttcaaacaaaaaaaaaaagaaatcatttttggaagagataaaaggcttgacagcaatatataaatatttcatttaaaataacttgttaaataatacttaaatgttaaatttcttaaaattcttgtttttctgagattttggaaaaacaaaaccaaataatatattgttaagggaggcagaatctcccttcctatttctttaagctcattttcataattaatctatttatttaggcctacagacatacatcaataaatatgtttctatttggttatttgtagatatgtaactcttatttgtcagagtagaaaactaagactcacaaaatacatgctctggctctcttagccttgtttctctttgtaccatgctataatttgtatggagaaaccagcctggtacttaagagagcaactacagaaccacagaatcaagatgctgaatatggattagttaattgttaggataaagttaagagactgtccctatggtgatttggtcattttgccttcatttggctacaactgattatttattcacaacaagtaaactaatataacacattagcactaagattgtaaaattttgaactatggataatttttatattactggggaaggattaatttgaccagagatttatcagaacaatgttttcaactattagctgagtgtttatcaaggtctgtggcatacaaaagttatttttgctttgagaatttcaattctaatagttctttaaatgtatactcttaatacgtgttaggtttttattatttatcatattgcttgtttacaaaaatcttccttttaatcatggccagccttcccagaatcctgaaatgcttcttgtatttgcattgcaaagagtcattattattgcataaacacttcaacttgagggtgtgtcatttcttggttgcttggtctttggctcttctgtccatactctatcattttaccctaatacctctcttctgtagcggtttcagtcatctaataaggattggaacatcccactttaaatccaagtataagatctattctcgttgttagaaagcaagagtgaataaaggtcagctgttcagatgactggctgtctgatttttttctgtgagcgtcacatgttaggaaaagctagttcatctctctgtggcttaggattcaacagcataagctgtcagactaacactgattgaaggtagactgggagggggaagcgcatctgtccaatggctcgccattggcttcttattacagcattctcccctgagacacactctgcatgctcattcacctacctcctcctcttccctccccttccttccctaccccttcattactgattcacagcgagaggcagcagcagcagcagtagcagcagcagcagcaacaacagcgctgcttgtcacgaatcgaggattgcaatgagctcatcgttttctccttgcagcttcacaactgccctggcttcctggctactgctgctgctgtcttctcacacatagacacgcacacacaccctttctcgcacacacacacacacacacacacacacacacacacacacacacacacactctcacacattctcacatgctagacccttctaagcagcttgtccgtttttacacatgtatctgaactctcctgcatcactcttggccattttctcgcattcgattgcttttgccgtt

SEQ ID NO: 3313 - DNA, 2300 bp, Homo sapien
acaatgaataatggaagtgcatgtgtaggtaaggatgtgagtcatcatgccatcattacagcagcttgtgctggcagttggaaattttaggagatgatggacttatagactgagacttatgtgttagacaaagcattcatggacaaaggtgactgcaggcatggaataggcaagaaagtttaactccttatccatagcctatttaagattaaagatagaatttctgccaaaagtaatcaagttttaaacatttttaaattattttcaaagttggtgttgtatatagttgtgtcttttttgaatggacatgttcccatttaattaccccccaaaataatcactttcctttaattttaaggaactgtaaccagtgatttcagtgaaactgaaactggctttaaaatagatgcagcagttgcaagcaaaaaataacttgttagctctgtatgtggtttatttctgtgagtgtaccaacaagatttgttaataaagcacattagattggataaataattttatttttccaaaacttgtatgacattaaatatcaggaacattttcaatagcttctaaactggtaatttaactaatgtgactccaagttattctaatacccttctgttcctatggtttcaactaggccaaaatcagaaaacatattgacccatcaggctttactttgaacagtcatttggttacttttaatattgaaatcaagacctaaataaaagatgtttaaagtgcctaatatgaatatcctgtattttcccagggagtcagtttttattaaatatcatactttgatttttgccttatagttaaaaatgctgccattgcagagcttcttaaacttggattttggcttcagagactctgaattaccagaaatttgaatttctttgtatgaacatatgagcattttgtttttcttagtaacataatacatagcttttttttttttttttttttttgagatagagttttgctcttgttgcccaggctggagtgcaatggtgccatctcagctcactgcaacctccgcctcccggattcaagcaattctcctgcttcagcctcccgagtagctgggattataggcatgcaccaccacgcccagataatgttctatttttagtagagatggggtttctccatcaggctagtctcatactcccgacctcaggttatccaccccccttggccacccaaagtgttaggattacaggcgtgagccaccacaccaggcctcgtaatatatagctttattaagtgcatatacacataatctttataattcttgatctgattacctgtttttctacatatttttattcaataccatttatattgtatcaggttgaattgatgaaattaccattcctgttggtcagaaactgtcaggtatttgattggtttatgatttatgattcagtattttatgcctccttacagctcaaataggtgcatatgtagcttagctctatggccatgtaaacttttcctgagaattattctccaaaggctaagaaacaagtcttttttttttttttttgagatggagtcttgctctgtcaccaggctggaatgcaatggcgcgatccctgcctcctgcaaccttcgcctccctggttcaagcagttcccctgcccagccttccgagtagctgggactacaggcgtgcgccaccatgcctggctaattttttgtgttttagtagattcagggtttcaccatgttggccaggatagtctcgatctcctgatctcatgatccacccaccttggcttcccaaagtactgggattacaggcgtgagccactgcactcggtcagtcctttttttttgttttgttttgtttttaagttgatttttatttggaataatgttccaagtaccatatttacgatggacttcagtagtagcaaagttcataagcacaatcatccaaaattttctgttggtagagctttataatagagctttttaaaatatgttagtttatttcacttgtatttcattagtaaaataatttgagcaaaattaaaaggcaaaatctgacattaacctaaaggaagaaaattaggaaagaaaagttatttattgagtgcctgttgtgtcccaggaactatgccaagaggacttttcagaggaagtaagagttaaaatgaaatctgaaagattattaggagttaaggagtgtatcaaggcagggagaaggatgtttcatgcagacaatatgcagaagcccataggtaaaaaaaatatggagttgcccaagacctgaatgtaggtcatgactg

SEQ ID NO: 3314 - DNA, 2300 bp, Homo sapien
actagactattctgaaatacaaattctgaaaagctttcttctgatatttctatggtttctcattcatattttctcttttgttacctcacttagagcacatgggctttgtaatgtacactgctaagagtagatagaaacctgcttggaatattgattttctgtaattaagaatgtatttatagaattttatctttcttatagttctattttttttttttttaagaggcagcatcttattctgtcacccaggctggagtgtagtggcacaattgcagttcactgtagcctgaacctcctgggttccccgcaaatagctgagactacaggaacttgctaccatgcctggctgatttttcaattttttgtaaagatgtagtctcactatgttgcccaggctggttttataatactgggctcaagcagtcctcctccctcagcctcccgggattatgagtgtgagccaccacaaccagcctttcttatagttatttatctcactgtgaacactgtgaacattttgtcattttggagatccttaacattgagtcatgtatactttgtgaatgtttgcatagagttacctaggaacatctggaagaatgttcatgaaagattagaggagggccagtcatgcaggaggaacagtttctccagggtgctacccatctatatgggggttgcagaagacctttctgccctctaaaccatatttcctttttttatttctttgagacagagttttgctctgtcgcccaggctggagtgcagtggtgcaatctcggctcactgcaacctctgcctcctgggttcaagcgattctcctgcctcagcctccagggtagctgggactacaggcacacaccaccatgcccggctaatttttttgtatttttattagagacggggtttcaccatgttggccaggctggtctccaactcctgacctcgtgatccacccgcctcggcctccaaaagtgctgggattacaggcatgagccaccgtgcctggcctaagccatatttctcttgtagttgttttgtctttctttctgtctgatcttgattttatgggtgacgtgatgagaatattcaacaagtagaatatgagatataggaaaaaggtcttgactgctactctcctgagttgagataattttttttttttttttttccgagatggaattctccctctgtcgcccaggctggagtgcagtggcacaatcttggctcactgcaacccctgcctcccgggttcaagtgattctgcttcagcctcctgagtagctgggtctacaggcgcgcgccaccacgcctggctaatttttgtatttttagtagaggtggggtttcaccatattggccaggctggtctcgaactcctgaccttgtgatccacgcacctcgtcctcctaaagtgctgggattacaggtgtgagccactgcgcccggtgaggtgagataatttttatacttgctgctttgactgatgtataaaaaaatgctactcccataatgcaactactttgctgcattggagagaacacaatagaaaaatagccacttcttattcaagcttttcttgatttttgtttcggctgtctctaaatttgacacttgagaatagatggtttatttgactcatagtatgacccaggtatgcttttgttaaaaagaacagttctaggaggatgactgttgggacaaaattagctactagtatggaatactctttcagtgtaaaatctcagaacaacatttaaaaatcattggagatattttattcataaacattttcttaataagatccagaaagggtttataaacctaataaacctattcgataggttctatcaaataaacctatttctatcaaataaacctatttgatatcttctatcaaataaacctatttgataggaggaaataggaataggacacattgcttttgactttctatacccatgtggaaaccaggaatctattctctccctctcaatttacatgaccatgaggaaactgaaacctagcgaagttaaatgacttgcccggggacggacagctagctagttcctgcttgaactgaggaccatctatttggttaccgggagtgtggctggtttctgttgcctgttttgatactcttctcctggtaagttttagcttcaaatggtattgtccacaccacagcccttgatctcaggtaattctccacaccactgcctttttttttttttttttttttttttccaatgcagttgcgtggtgtgaaggcgataactgcagacactcaggtgtaaaca

SEQ ID NO: 3315 - DNA, 2300 bp, Homo sapien
ttcaacaagtagaatatgagatataggaaaaaggtcttgactgctactctcctgagttgagataattttttttttttttttttccgagatggaattctccctctgtcgcccaggctggagtgcagtggcacaatcttggctcactgcaacccctgcctcccgggttcaagtgattctgcttcagcctcctgagtagctgggtctacaggcgcgcgccaccacgcctggctaatttttgtatttttagtagaggtggggtttcaccatattggccaggctggtctcgaactcctgaccttgtgatccacgcacctcgtcctcctaaagtgctgggattacaggtgtgagccactgcgcccggtgaggtgagataatttttatacttgctgctttgactgatgtataaaaaaatgctactcccataatgcaactactttgctgcattggagagaacacaatagaaaaatagccacttcttattcaagcttttcttgatttttgtttcggctgtctctaaatttgacacttgagaatagatggtttatttgactcatagtatgacccaggtatgcttttgttaaaaagaacagttctaggaggatgactgttgggacaaaattagctactagtatggaatactctttcagtgtaaaatctcagaacaacatttaaaaatcattggagatattttattcataaacattttcttaataagatccagaaagggtttataaacctaataaacctattcgataggttctatcaaataaacctatttctatcaaataaacctatttgatatcttctatcaaataaacctatttgataggaggaaataggaataggacacattgcttttgactttctatacccatgtggaaaccaggaatctattctctccctctcaatttacatgaccatgaggaaactgaaacctagcgaagttaaatgacttgcccggggacggacagctagctagttcctgcttgaactgaggaccatctatttggttaccgggagtgtggctggtttctgttgcctgttttgatactcttctcctggtaagttttagcttcaaatggtattgtccacaccacagcccttgatctcaggtaattctccacaccactgcctttttttttttttttttttttttttccaatgcagttgcgtggtgtgaaggcgataactgcagacactcaggtgtaaacaacccagggaatcaatgggttggggggatggtaaaacaggagttcgtagacaggactgtgtacaatagcttctgaagttttggagggtattggtgtagctgttatttctgagaccggagaaaatgacggtagagtgacagtttctctaatcatcagttttcaaagagtatgtttttcgttggaaccacaaatatagtacacttaataaggggaaacgaaaccttgaatttttccttcccagactctgaaaagtaaagtaaactttaaggaacattttaagggtgacaaaaggtgaagattgcaaatcaaacttagagtgtccctgctcaagaaaatctgtgcactgcagctacaatagaggaccacttgggtttagaaatgacatgttattaataattctagtcactgtggctaattagaacaatctgttgaaggttataaattatagaagctttttaaaacatttatctaagaacctgtgtagaattctaaaaggactgaattatttgaagttattagtttctgtgtatgtaaacttaaactatttttaaagcctttgattatttttctaaaaatgtttttgcatgcttatagcctgatgccgtaaatgttttatgagtttaatgtacagcacctctaggtgctatttaaaattgttttttctggtccttttcttttgggttataagggttcttcgtaaccaagaagattacctatggttacgctgaatgcactctcccagggtgcataggcgctgctgaactgcggttataactcttgtttgcccctgggtggttgccagcagggagtaaggcattgtgggaagtactttctttaccttccacaacaggtgtctttgtcagtgcaccttattcagatatccatgtgtggaagctctgagtcactgaatagcaaagaaaaatatgaaagcaagaggaattgctttcacatctagaaaatgttgcaagataatctgaaatcttctggtgctggtgaatgcatgaagaggttcacagtatcttttaaagtacttctgaaaagataaggagtttaaaaggtatgaactgcctggacaccttataatgcctt

SEQ ID NO: 3316 - DNA, 2300 bp, Homo sapien
tggaggcaagagcaaacccagtgggttcaatgaataagtaaagtgccagactgtttaaatcagggagcggggaaggaagagtggtgagagatgggttctgacatgaagctcataaaggtgagataagatacgtaaaacactcaagttcacattaaggagtttgtactttattctaagcctaataggaagctgttagaggtttttaagcaaagggatataatgatctgaaaagatatctcgagctgctctgtggaaaactaactcttaaggcacaatggggaagcagagaaatcagttaggaagataaatttcagacaaaataatgatgacttggacctgggtgcgtagggtaagaaatatcttttccttctacccattttaggctcactggctggggatcctgtaacaaaagacaaattaacaagagaaaagcataaatattaatgttagttttacataacatggaaacttcataaagaaatgaagacccgaataaatagttaaccttagtgttgtttagagtaggtttgaagaagaatggagaattgtgggaaaatgtgatggggctaaaagactgtgatctaagggtaataaactgggggaaacttagcaaggcctgatgttcatattcgtctctacgtccctgtgttttcagagataaagatgttacttttattccaggtatagacagggcaattctcacatgagggtattacgtcctgcttcagagcagaaaggtgcaagaaagttagagacattcctgcatatgttctttctcaaattccttcagttcaaagtattcaatatgtctaggtgccatatttttgggtagcatgtcccaaaccccgtcaggtggtagaagcagaggttgtgagaactcgttaaattcgctacatattttgaagattaagccagtaaggcttgttatataagatgtaaggcctgagatagaagactcaggtatgagtccttagcctgagcaattaagagaacgaggtaactgttcactgcattaggtccatgggatatttgtttttatttaattatgtacttaataattccaggctattggttggacacttaaaaaaatttatacgataaaatacacagctcttaggagttcatcccatgaactttgacaattctatgtatcggtgtaatatttccattacctgggcaaattccccttcgccgggccttaagcataatctacagaaaaaactacgtacataaatatacgtttacaactcaatgagatttctaaagtgaacccacctatctataatcagtgtccaaatcaagaaacattacctgaacctcaaaagccccctggtggctctttcatgtcattgtcctccccactatgctcattaacaccatgggctagtttttaaatggaaccacgcaatatgaactcttccatgtctggcttctttccctcaacttcatttttttgtgtgaaattcacgcatgttgcgtttcggtaatttatttttgtactgtacttccgattctttactacagataatggtcagcctccattccgctaacagctttttttcctctccgagttgctgattctaattgctgccttggacgatctataaagctgagtgcgcgctatgtgacctctcaggggtcgctgccttggacgatctgtaaagctgagtgcgcgctatgtgacctctcaggggttgtttccaaccgtgttgttgacatcttgagcctgccaaggactagaataatctgaaaactaggcttctctgggggtctcactgagtgacagggttagaaccagaagagaacatcgtctccagaagacatttcaccattttctttgatggtaaacaggctcacttataccgaatccaaacccaggcgagaactacggactcttgaaatggtcggtgaaaggggcgaaagcaccaggaaatcgtgcttcaacagtccatgactgaaaggagggcctgaaactgtggccataggcgggcccttttgttagggccttgacctgggcttccgctacagggcccggtcacgaggccaacgtagctccacctctacggcggccagtgatgacgccaccacgtcggaactgttagaccgcggtgacgtctccaccgcgccaaactcactgaaaatcaaaccgctaccattaggagccctccacgcttaacatatccgttctttctcgtttgaaagtaaccaggctgctcctccccatttttcgccttcttctcgcggaggctgagagactaaccttacacaacatggcggcctggtgtgtctggtgtcctaga

SEQ ID NO: 3317 - DNA, 2300 bp, Homo sapien
aatgatgacttggacctgggtgcgtagggtaagaaatatcttttccttctacccattttaggctcactggctggggatcctgtaacaaaagacaaattaacaagagaaaagcataaatattaatgttagttttacataacatggaaacttcataaagaaatgaagacccgaataaatagttaaccttagtgttgtttagagtaggtttgaagaagaatggagaattgtgggaaaatgtgatggggctaaaagactgtgatctaagggtaataaactgggggaaacttagcaaggcctgatgttcatattcgtctctacgtccctgtgttttcagagataaagatgttacttttattccaggtatagacagggcaattctcacatgagggtattacgtcctgcttcagagcagaaaggtgcaagaaagttagagacattcctgcatatgttctttctcaaattccttcagttcaaagtattcaatatgtctaggtgccatatttttgggtagcatgtcccaaaccccgtcaggtggtagaagcagaggttgtgagaactcgttaaattcgctacatattttgaagattaagccagtaaggcttgttatataagatgtaaggcctgagatagaagactcaggtatgagtccttagcctgagcaattaagagaacgaggtaactgttcactgcattaggtccatgggatatttgtttttatttaattatgtacttaataattccaggctattggttggacacttaaaaaaatttatacgataaaatacacagctcttaggagttcatcccatgaactttgacaattctatgtatcggtgtaatatttccattacctgggcaaattccccttcgccgggccttaagcataatctacagaaaaaactacgtacataaatatacgtttacaactcaatgagatttctaaagtgaacccacctatctataatcagtgtccaaatcaagaaacattacctgaacctcaaaagccccctggtggctctttcatgtcattgtcctccccactatgctcattaacaccatgggctagtttttaaatggaaccacgcaatatgaactcttccatgtctggcttctttccctcaacttcatttttttgtgtgaaattcacgcatgttgcgtttcggtaatttatttttgtactgtacttccgattctttactacagataatggtcagcctccattccgctaacagctttttttcctctccgagttgctgattctaattgctgccttggacgatctataaagctgagtgcgcgctatgtgacctctcaggggtcgctgccttggacgatctgtaaagctgagtgcgcgctatgtgacctctcaggggttgtttccaaccgtgttgttgacatcttgagcctgccaaggactagaataatctgaaaactaggcttctctgggggtctcactgagtgacagggttagaaccagaagagaacatcgtctccagaagacatttcaccattttctttgatggtaaacaggctcacttataccgaatccaaacccaggcgagaactacggactcttgaaatggtcggtgaaaggggcgaaagcaccaggaaatcgtgcttcaacagtccatgactgaaaggagggcctgaaactgtggccataggcgggcccttttgttagggccttgacctgggcttccgctacagggcccggtcacgaggccaacgtagctccacctctacggcggccagtgatgacgccaccacgtcggaactgttagaccgcggtgacgtctccaccgcgccaaactcactgaaaatcaaaccgctaccattaggagccctccacgcttaacatatccgttctttctcgtttgaaagtaaccaggctgctcctccccatttttcgccttcttctcgcggaggctgagagactaaccttacacaacatggcggcctggtgtgtctggtgtcctagagcggacgaaagcaggtgactctctagtcaacttccgacttggactccgaagatcggtacgttatttccggggctgggttaacgcagcggttccgagctgcgactgcgcagcgtggcccagcgcggtcaaattataatacataaaagttgtcagggcggagagcaagacattactcttctcggattgccggttcgctcgcgagacttgagcgttgctaggagattcggcaggcgggcggagccagactcggcggggcggggaggggtggggctaggctcggcgaggcgaggaagggtgggtggagccaggcttggcgggctg

SEQ ID NO: 3318 - DNA, 2300 bp, Homo sapien
gattttttttcagtctccgatctgacacatacttacacattcatatataacaggcatttagtaaatattttctgaatgattaaatgaattatgatggttctcctgattctaatattccaggacagtaaagacaacagcctttcccacattctgttaagtagccagagaattagagactccttgggaaaattcaaggtaaaccgagacttctttaggccctgccaagtggcccacacactaaggggggagtgcacactgggggtctggggggaaatcttaggctgttttaaaaaaccaatacaattaattaaagaagaccctggagtcttgtctcagtacttcagagtttcctgcctcactcacaccattaggttgctttactctcttcttaaagcaaaaaatggcctaacaagatcctaatgctgtttaagatatttgtacacacatgttcatagcattattcacaacagctaaaaggtgtaagcaaagcaagtgttaatgacagataaatagagaaacaaaatgtagtgtagccaaacaatggaatattactgagccataaaaaagaacgaagtgctgagacatggtgcagcatggataaaccctgaggatgttataagtgaaagaagccagtcacaaagacaaaacactgcatgattccacttagatgagctacgtagagtagttgaattcatagggacaaaaagtagaatggtggttgccaggagctgaaaggaagggggaatggggacttattgtttaatggtagagtattttagttttggaagacacaaagttctggagatgggcaatgatgacagttgcacagcagtgtaaaggtacttaatgcccctgaactgtacacttaaaatggtgaggatgggaaaatttatgttatgtatattgtatcacaatttttagaaaaaagttactaatgctgtttaaagatgctttcacaagttgccagatagctgaatatgtggaggtttctggaagatggccccaccaggaaagggcatggaagctccaagccccatccaccgtgccttgtcccacacatctcttccaaccgactgttcatctgtatccttttcagtatctttttttttttgtcttgctgtgttgccaaggctggagtgcagggatgcaatctcggctcactacaacctctacctcctgggttcaagaaattctcctgcctcagcctcccgagtacgtgggattacaggcacctgccaccgcacctggctgatttttgtattttcagtagagactgggtttcacccatattggtcaggctggtcttgaactcctgacctcaagtgatccacctgcctcagcctcccaaagtgctggaattacaggtgtgagccaccatgcccagcctttttttaatatccttcataaaatcagtaaaaagccagcagggctgcactagcagcttccagggtatgaacatctccaccacccataagagttctggatcctgggctacctcttcatccaacagtattttgccatctttgaaagggcaaacgatcagcttggcctaactcccgtggcttaagtctaagtctttctgaccactttccaggaagatctggcctaagtcctgtgcccgctgtagatgtatataattctcctgactgttcttcctatgggattgtagaggtggactcttgccctgttcctggtcacaccaataaggtagaattaaatcataacctacaacagcaacaaaaaagatgctttcagaactagttttccagaaaggaagaaaagagtgcacagagctagctcgcctatttcatgacccgcttatagaagatgaccccaactgtgggtagggagagaagggtattacacgggctgcaacacacggggcgggtctggctgcgccatcagcatcaacgcggcgccttcagatttgtcatttgcccaagttccgtgaaatatcgcgagagctccgatcccaaaactaaccccgctttcctgtaggccacattcccacccacctcccagctccgccccaggcggcccaggccccgcccctcgtgtcctgcgctattcggcagtgtcaataaagtttcagcggtttgtagtttgtagcggacaacatggcggccttcatgctgggctcgctgctgcggacgttcaagcaggtcaggcctctacttttatccacaccgctacccctcaccgctgaatctcataacccacgggtcccccacggctctgccacctgtagtgctcggtgaggaccagtccaggggttctccttccgccctcttccgcgcttg

SEQ ID NO: 3319 - DNA, 2300 bp, Homo sapien
tgatcattgtattgaggttatgagagagtatgcccttgttgttgggaaacaccctatactaaagtttttagacataaatgggtaaagagataaatcatgtctttaatttgctctcaaatgttttcagggaaaactattaagagagaatgaatgattggcaaatatgacaaaatgttaacacttggagaatatgagtgaagggtatacagggattcttttaatatttttgcaatttttctgcaagtctgaaataattataaaataaaaagtttttgtttttgtgtttgtaaggaatgagcacgcacttccatctgccctcatccctttacccttcctgttggctgggagatgatgaccctagagagtggtgggtgtgtgctgtggatggtggcactgccctaccagccctgggccactgtcttctactgtttggggagaaatcatctatgttgttaagtcactgcattggagggtctctttgctacagctccatgtcctgcaactaactaataccagctgtaataaggagagattggaggaaggtggcttcttaggagcctggtgcactggtttagttattcctattgagggcatggaaaatggggtcacggagagagttggtgaagaccactcatttggggagagttagtgaaaggaaattaagaataggagagcaacttgagggcgcaatagagtcttaggatcctctgggagagattttcccttttaagaagcagagaaaatagtccaagggagaaaagagatgtttgggagttgggaaattttctggtgaccctggttcctactgcactggtcacctctgtatatggctggcccagattccagggccagatagcaggattatttgtggttgtaagtgaagggcagagaactatgaacctacctggactgaggtggagaggatcaaatatgatttagtgggatacataaggagaattaaaaagttataataatcatggtagcaggtaatctttaccaagtcctcattgtgtcttgggactagtctaagttctttaccccatctactcatttgaacctcacaataaccataagacactattcctattttacagacgagtaagctgagccacaaagaagttgtcaaaggtcatttgcaagtagcagacacaagcttcagatccaggcaagctgcctctgggaacccccctccaatttctgggggccactttttggtcccccgtctctccttctcctttccctccagcagcatttgatgctgacataggtgaactggaaacatatggtctccttcattttgttgtggatctgcactccagaatctacttcccacagagcaggagagggatggggtgtaaggaagggtggcaggtgtcagcccatgccctattgaaatgactctggttcataggaaggatgaaggcctgtccatctgagggcaaaagaggaagggcagccagaaaggggcacgactattctttcctgattttggagctcttgtactgttggcgtgtgggaggcatttgggatggggtgagggtcagagtgggcttgtgggaccgaatgtccccagtctgttattcctgcccccacttcagagtcctgccactcacaagtgtgagacgatggatgaaggaggagggaagtcagaagagcttctgtccctgagggtctctgctcatttctttctgtgctaaaggctttttcccattttaaaagcagtaggcaggaagtcccagaatgcctgaaacaggaaaaagagaaagaaactttataaatgcacttttgaaccccgagacccagctcctggccaggagacaggcaaactcttttaatatccttattctggattcacttaaatggaaacagcctccagtatttttagctgctgtgtaatcaaagtgaaaaagaagaaggaaatgtatatatttttctttcctagttagaataagagaaggaattgctcattatcttttagcagagtccctgctaggaagggaggaaaacaccaggagtctccatttgctcctcctctggcctagacaggatttaaacccaggaagggaagccaaggagagacgagaaccagggacgaccagcaagtaccaaggtctgcggcaggaggagaccggctcacaggagcagcagcattggaagaggcacccagcagcctcccaggtaagagtgccagttgcccaagctttacttactggagggagggaggtggccaatgcagatgagctcaaaagtggtggctcaggtgcctccgttcccgagcctgaaaatccgggcagtgtaat

SEQ ID NO: 3320 - DNA, 2300 bp, Homo sapien
cccaaacctcagattttacagatgaagaagctgaggcccagccaggaacagctgaactgtccggagccacaactggcagatggcagagctgggattagattgctagtaacctggctccaacctgcacctctgctctgcctctctgggctggaactagaacccagtgcttctgactttggatttagttctcataccactctcctgtgctgccttgttgaaaatccaagaatccagctgtggggataaggtctatatccatgaaacaactgaaaaccagcatatgatatggagaaaccataagaacaggaaactgccttaccacaagtaaaatgcccagatctcactctttggtaccagttcatagtgttcattgatcagcaattttttttttcagacattgacagcccccaaaacctggtgaccgaccgggtgacagagaatatggccactgtctcctgggacccggtgcgggccaccattgacaggtatgtggtgcgctacacctctgccaaggacggagagaccagggaggttccggtggggaaggagcagagtagcactgtcctgacgggcctgaggccgggtgtggagtacacggtgcacgtgtgggcccagaagggggcccaggagagcaagaaggctgacaccaaggcccagacaggtaaggagcattgttctttgggaatataagagctttcatgctaagtcagtggatgacaagttttgttttccttctctgacattggcagaagtcaatgattaatggaagagtgggatggcatcccttcataacagattgcacacaccatccctcattttcctttaactagtttccttgcaagtcagggccacaaggcagtctccaagctatgattacatggtcatgtccatcaactcctcttctgattgcatggatcttttgctgtagacagtatcgagggtctcttagtgagtttgtgagtgggaacagaaaatgaaaatcaaattttgttaataataatagtatattgaaaatttgactttaagaacgtagatgtcacatctgccatagcaaggagatgtatatcatttgctttatgacaaatgaatcacattataactataaaacatatttataactagaaattatgataagttctatgaaggagatgacatggtgtaggtatagagaataatgaagtagtgatgtttctcagataggaaggggaaatagtaataggatacacatggccaaaacaaccaaataacagttgcttaaacaagaaaggagcgtattcctcttgttgaatagcagagtgtacgttggccagagttttgaggataaggatagctcctacgttatattcttattttagtggaagcgatatctaaccatattttgtacagtgatttaatcagcaaaccagcatgatgagtgaatctatgatatgctagagaatattcaaccagggttttactttttgcggattcctttagtaatatatagtgagcattttccacgtgccctgcccactactaggcactgggaacacaggagaataggatgctgccctcttcctccaggggcttacatttagaagtggcttttagaatcttctagtatgaaatgggaggtctttactgacatgatgtgagacacaaaattgttagttcctggtgagcagagaccatgtcttttccaattctggattctgcacactgtctagaacatttcatggacagagttggggcttgatatacccttactagatgaataaaagatttgttttgctaaagacttggtagaggtaacagcctggattctcaggttctgatctattgtgctttctacttgaggagccaggtatatcttgggggagaagatgatgtccatgaaacagctaaaaatgaaacaagagcatatgaggcggaaaccccacacaacatgaaagggtttcaccccacgcaaaatgaccaccagtttctgcactctggcacctgttcatagtgcatattggtcagcattttttttttcagacattgacagcccccaaaacctggtcactgactgggtgacagagaatacagccactgtctcctgggacccggtgcaggccaccattgacaggtatgtggtgcactacacgtctgccaacggagagaccagggaggttccagtggggaaggagcagagcagcactgtcctgacgggcctgaggccgggcatggagtacacggtgcacgtgtgggcccagaaggggaaccaggagagcaagaaggctgacaccaaggcccagacaggtaatagaagtgaagagaag

SEQ ID NO: 3321 - DNA, 2300 bp, Homo sapien
tagagataccatcttatggatggccctggtttcctttctacgatcagacaaccatgtccatgaagccctgagctcaattcgattgcccctgtttttctcatttagtttcttcctcttttctcttaaaagcaaccctacatacccatcaccctggccagaaccaatctgtaatgttgctccagactttcaggaaagtattttctatggcctccccgcaataggcgtcattcaagacctgtacatgatccctgctcaagtgtggaattccttcacagaaggcaagttcctcctctactagatgatatggtggtaaaaggatgcactgggtcagggggagcggcggttggaaacacttggattcaaacctggctctaccatttattagctatgtgaccttgaggaacttccttagcttcctctcaaccacaatttcctcacctgtacaatgaggataatactacctctcataaatgtgttgtgaaaggttgaatgatacactgtgtgtaaacctccaggcaggagatccccattcccaaattttcaggccagcattcaaggccttactatcatccatcccaggcctgtcttcctcatggccctgttagactctatactctggccttaggctccaggagttttagaggaacctacataggtacataggtacattgtacataggtagacaactgcaggctcaaagtgtcattacagatttgagcttctcccggcttgtgaatctagtcttcctctgtaaaaaataaataaataaataaataaataacttattttcctctttttctagccatttttggcgtttcaggctggatggtgggttttctctttggcctttcaactcagagccacgtggtttctcctgaataaacagaaaggaatctcttgaatctcagttgtgacagttggttgcagcagtcattttaatgcccacttggagaagccaaaggacacccatactcaggcacagtcgatggagggcaagtcctggttcagcacctggcacctggtacctgtgtacctggcaaatacagtcgagggaacagcatttcaggcccttgtcagggaggacctcccaggatgacactgaggaggcccctgaaatgatccacagccaggtcctggcatccccctcttttcccacccacagtatccctggaggcactgaacaagctctgaatcatcagagctttgtgtctggagtcccctattcaaaggggcgcaggtcttttcatttcctagcatcccatgtgctcggaactagagccaagagatctgaatagaaagtagatggagagcagctgaggatgagagggaagaacccctgagaactttttgaagtcagctttcccctccgtcatttgcttgtgacagacagctcctggggcgcagttttccttagcgcctccaggcagcagagacaaagactcttctgagatgtcacctgcaccccttggagcaaccggcgttggctagaggggactgtcatgctcatttgtcccgataagacatcggagccttcacccaacctgccgcatggtatccctctccaacgcctcccaccccttccaggaaggccctctatttaggcagctgttttccctgaagccgggtttgcccggagttctgtgtcccattcctggaacactggtgcgtctgtgagagacaccggggctggctccgcagccgctgtgtcctgaaggaggcgtgttccgggactgagggggcaaggacacgtaatggcggggggcggggagtggggagccaccggcgggaagacggggagggagggcgcgtctggggcgtgtgcgcccaaggccagaggcacccgaggtgggctggcccagggtggaaagcctgggccgagcccctggagcgggcggaacggcgagccagattcaggaagttgtgcctgtgacatcaggggcaggacagagttggagcgaaacctcaactatgccaggcgtcggcccgtaggaaggcagggaacacagagggcgctgccctcggcggcagcggcaggtacgcgcgggggtggagcggggcggggcggggcggggcgggcggctcccacgaccttggccggcgccggggccctacacgccagacctggctcggggtgggagtgcagaggcaaccaaaaaggaacccacacctccctccagggcccggggcgctgtcagacggggcagcaaccaggagattccctgggcctgcaggaagcccttccgcggaccgaaaggtgagtttcaggactttctgttatgttttttaaaaatacattttta

SEQ ID NO: 3322 - DNA, 2300 bp, Homo sapien
taattgcatcttctagtagtgtcaatacagcaacagactttgcagccttggcagtctagtgtgagtaaatccaccatccagcccacctataagtccctgatttctctgccacagaattttctggttttcagcattagacttttctccttatgaattgagatagctagagataccatcttatggatggccctggtttcctttctacgatcagacaaccatgtccatgaagccctgagctcaattcgattgcccctgtttttctcatttagtttcttcctcttttctcttaaaagcaaccctacatacccatcaccctggccagaaccaatctgtaatgttgctccagactttcaggaaagtattttctatggcctccccgcaataggcgtcattcaagacctgtacatgatccctgctcaagtgtggaattccttcacagaaggcaagttcctcctctactagatgatatggtggtaaaaggatgcactgggtcagggggagcggcggttggaaacacttggattcaaacctggctctaccatttattagctatgtgaccttgaggaacttccttagcttcctctcaaccacaatttcctcacctgtacaatgaggataatactacctctcataaatgtgttgtgaaaggttgaatgatacactgtgtgtaaacctccaggcaggagatccccattcccaaattttcaggccagcattcaaggccttactatcatccatcccaggcctgtcttcctcatggccctgttagactctatactctggccttaggctccaggagttttagaggaacctacataggtacataggtacattgtacataggtagacaactgcaggctcaaagtgtcattacagatttgagcttctcccggcttgtgaatctagtcttcctctgtaaaaaataaataaataaataaataaataacttattttcctctttttctagccatttttggcgtttcaggctggatggtgggttttctctttggcctttcaactcagagccacgtggtttctcctgaataaacagaaaggaatctcttgaatctcagttgtgacagttggttgcagcagtcattttaatgcccacttggagaagccaaaggacacccatactcaggcacagtcgatggagggcaagtcctggttcagcacctggcacctggtacctgtgtacctggcaaatacagtcgagggaacagcatttcaggcccttgtcagggaggacctcccaggatgacactgaggaggcccctgaaatgatccacagccaggtcctggcatccccctcttttcccacccacagtatccctggaggcactgaacaagctctgaatcatcagagctttgtgtctggagtcccctattcaaaggggcgcaggtcttttcatttcctagcatcccatgtgctcggaactagagccaagagatctgaatagaaagtagatggagagcagctgaggatgagagggaagaacccctgagaactttttgaagtcagctttcccctccgtcatttgcttgtgacagacagctcctggggcgcagttttccttagcgcctccaggcagcagagacaaagactcttctgagatgtcacctgcaccccttggagcaaccggcgttggctagaggggactgtcatgctcatttgtcccgataagacatcggagccttcacccaacctgccgcatggtatccctctccaacgcctcccaccccttccaggaaggccctctatttaggcagctgttttccctgaagccgggtttgcccggagttctgtgtcccattcctggaacactggtgcgtctgtgagagacaccggggctggctccgcagccgctgtgtcctgaaggaggcgtgttccgggactgagggggcaaggacacgtaatggcggggggcggggagtggggagccaccggcgggaagacggggagggagggcgcgtctggggcgtgtgcgcccaaggccagaggcacccgaggtgggctggcccagggtggaaagcctgggccgagcccctggagcgggcggaacggcgagccagattcaggaagttgtgcctgtgacatcaggggcaggacagagttggagcgaaacctcaactatgccaggcgtcggcccgtaggaaggcagggaacacagagggcgctgccctcggcggcagcggcaggtacgcgcgggggtggagcggggcggggcggggcggggcgggcggctcccacgaccttggccggcgccggggccctacacgccagacctggctcggggtggg

SEQ ID NO: 3323 - DNA, 2300 bp, Homo sapien
ttcctgagcttaagtgatcctctcgtctcagcctcttgagtagctgggactacaggcatgagccaccatacctggctgatttttcttttattttttgtagagatgggggtctcactgtgttgtccaggctggtcacaaactcctggccttgaacaatcctcccacctcagcctcccaaaatgctgggattacaggctacagccactgcatccagccccaagtcctttataatgggccaaagattctcatcttctgacactcttattataccagccacatgtcctgttacctttcaagaacagtggctcttttctggccctgatggagtcttttgcctaatcccatcctgtcttagaccccagagcctcaaaagcccaaccagcattttggaatctagttcccaaggcattgcctgctcctggccctgggtggcacagtggctatgtgcctgtgagtcatcagccactgcccccaccctcaggtcagacagacagtcactttctgcaaaggtaggagggggagatggttgtagtttttagcacttttgggtcaagcattgaggaaaggactgaagaagtcaaaatcagggcactgccatagagattatagtttccatgggaaacacagatcttccctagccctgttttctccatttctggtcctatttgtcacagattctttttttctgaattgcaaaccgaaggcctcatatctatcttcacccaagccctccttagtgtaggtggcttaataagagtcaggagaagaaggtatatgcccagagagctatacccctgactgataatcctggaaagaggttgattttttttttcttttttggtcctatgggaaacaggaatgaccttcttaatgaggtgagatcatgagaagcctttccatcttcttttattattctgccttgcaaaggaaaaatgacaatagccaaaggaaattacatccagaaatccaaaggtgaataggtgataactgtgggcctacttcccattttatgagatgcactgtcttcactagcacaatttgatcttaagcccaagagagctagatgctctagaagccgtgacctttcaatttctcctccaaatccaatatcagcaaccatccccgcaacatctgcccagatccatgcccagttccctgagctgtcttctccctttcctctcccattcctcaaggcccagcaccattttctgtagtgcctatgtttgtctgaccagagcagtgtgtacctttgccaaccagttactggatgagccttagtgtcggcaattttctaatggaaatatcctcactcttaccaagctttgagaaccaagatgaaaagtcccttgggctgaccatcaggcctcggacctcatggggatgcagccagccaccattgaatggaggcgcttcccttgccgcaggcttctaggctttgttcactgcggcagtgtggatgtgacaggcataaccctgaaaaacctaggcaccacttgcatttctcagttaaccatgggcttcaacaaactgggaggaggaaaaaacagaaacagatcctttcaacaagcatgtaaattacagaagacttacctagagacggggcaacaatgaatagtaggaagcacattgcatgggaaacttgagggccgaggtacaggccaacagctgtcatcttagctacgacatgacatcggctgggttgtttcacctctctgggccagtttcttcatctgtcagatgagagattagactagaatgagttctaatttccctttcagttttgacggtcaatgatgctaatctgtgatctgaaaacctaagtagaaattggcatggtgggacagcacaattaggtaatgaaaattcactagactccctgtttaatgaggaaagaaggaaagaaggaaggaaggaaggaaggaaagaaggaaggggagggagggagggaaagaaaagagagagattgattcaggagtcataagtaaaacacacacacacacacacacacacacacgaaaatactgcagaaaagatcatgccgagtgagaggctgaactctttttgtccataaaaacagagaccaggtacctgggtggtgccagcacgcccacttcatcaaggaagttgaaatggaaaaagattatgtgttgtcaattcaggtgaaagtcaagaaacatcagtggaaacaaaaatcttccttttattgaaaccattctacactatggaacatttttataaatagtaccagcggcattgcatagctttattttgaagcaagaaagagacttcaaagatcagct

SEQ ID NO: 3324 - DNA, 2300 bp, Homo sapien
attgggcttttctgctgtccacaaatggataacacatttcatatgttccagtgatttcagggaagtccttgactaggggaagaactggaacaattattccacttgtctgcaaacaatatttatttatgttagttaatgccaggttctgggtgaatattatacagataataattccattagccctccaaccttgtaagataagtaccattattatctccactttatagatagggaaactgaggcacagagagcttaagtgatcttcccacagctagaaaatgaaagagctgaggcttgaacctaaacagagactctataggctccagagtctatagtctcaacagctctgctctggtctgctccctgtccatattggaagcagggacagactatagtctagtatataatgcaagggctgaataataaggcatgattttatactaggcactaatacaggttactcctaataaaatcaaccctcaggcatttttttcagaactgaaatggaacagaccagtatctaacttgaggataatggagagggattaaattagttggagaatgatttaaccttttgctcactgagcattttctcatgaattcatctttccatccttccagggatctacttatccacttattcaacaactatgcactgagcactctcgccgtcctgaagcgacggtcacacattgcagataagacacggtctgaccgacaaggacttagcagtccaggtggggagaagcaggcaaaggaaacccacggtctagcatggcaagtgctgtcagaagtggggcctggaagagagggacatgaattcagcctgcatttgggagaatagcagaggaggcaggagggaaaagatgagagacaaatgcttatggagaaaagaacattgaatctgaccctagcaaaattttctaatcgcgatattcctgggaagatcttagaaattacacagtttccatcaaagacaagagaaaattgaacactcttttcaagaaaagccctgggacatagtaattgataacacaggttttggagtcagacctgcattcaaatcttaacctctcttggaagaacttcctccattagaagatggggctattcatagtgacccatcataaggttgtcctgagggtcatgtagactcctgtgtgaggggcacagcacagtctgtgctgagtgcaaatacagtaaatcctagttgtgaccttcttctccgacgaatagtcacactcacttggtcccttagtccttaatcttcttagtagctctaacttttagaaccaagttttgtaaatctcttttctgttttgcatagagaatacaaaaggaataaaatttctgtaaaactgatttgcatcccagtgagtttattgtactctatggttcttggtgactaggtaaccagcagaggagctaattcattattttaccaatttaaacaggaacttggaagaaaagcacctggtggtcacagagcatgaggactatactgacaagaagattaaaagaaagttcagctcacacagccctagataatcacaaatgtacccaaggtttattaacaatcacaattacctggaactatattatttgcctggctggttattctgaagacaatttgtatggatagatgagctgagaggagctcatgaagttattttgaagtggctggcagagtccctttgcaataaatatctggggaaataggagaggacacccaaggctccctggtccaatttctcacctagaagtgaaaagaaactctgagttctcctcagaggaacagcccatccacagggccccagcccccagccctcatgtttcctccaagaaccatttgcccaccatgggaccagacctgtgtgttctagataagccttttgagaaaacaaaatagtatgcagaagcagtgtccattttcaggggtccagtcctttaaggaacaaagtcctgggcctttatgacattggcagccactgtcccttcctgacgccccccccttgaaaatctctggctgcctactcctgagctttgtaggcttgtgcagagccatggtgccaaggcataggtctcagaggttgtctctttccttggtttccgttgcagattcccacaactccatgctgtgtgctgcaggctggtcctgaacccagatctctggctgagaggatgggggcagatggggaaacagtggttctgaagaacatgctcattggcatcaacctgatccttctgggctccatgatcaagccttcagagtgtcagctggaggtcaccacagaaagggt

SEQ ID NO: 3325 - DNA, 2300 bp, Homo sapien
ttttatgaatggaaaatctgtggtgcacagtgaatggttatgccaaggtcatccagcagtcgggaagggctaggctagaacacaggtctctttactctctggccagtgctcctttatcctccatgtgatgatttaactctttttagttaagcaacttgtatagattttccagtatggattaagcatagtcctaggtgctgcaagctcaagaaagccaaaaaagagggaatggtagatgtcaaatgagacaacattagaagagaacattacacagtgcctggcccagaggagatattccatgggtccctgcttttctcccctttgctcttccccaccccctatagatacatacagaggggaaaaatctcagatatttgaggtagtcaaattcttgcaagtgtcagaaggggagctgatagacaactccagttactcctttagaagcacattttctagttcctaataaaacctctcaggctaggcccacacctggaagaactcccctggtattctataaagacatcagctcctgggctgcccctctattccagagtgttgatgaatgtgtggctcgcccacactgcctgattcataagcacattagtgctgactcaccgacaactgagagaaaaaaaaaaaaaaaaaaatctcctcaggttttgagttgagatgaagacacttacaagatgcaaaattcagctctactgatggaatgataactgaaacacaccatgagctagtcatctggggaaaatattgtcaagggtatttggtctcaaacccaagctcttgtacccattttctgaattcataatagaatcttcgttttccagagatttaaaaatctccttactttactattaatgaaaaacaagaagcgtaaaaccatgaagaatctaaagtagctgacccaagttcagcttatccctgagttcagccttgataggaggatttggctagaaggctccttccaaccatgagttgtgtggctataagattatcaccaaccatcttagtgccagctttacatgaatctgttgttcaatgatttgaagcttctctagatcttattcaaagcaaggcgtataggctcagacagcctgctccacccctggatacttatatagaataatcatgtagaaattattgaattgagggcagccagggctgcaacttgagttcctgggcccctctgcaaatacatctccaaataagaagaccgacggcctttttggcatgtaatgaaatacagagccattctgaagatgggctccttggccactggggaaggccatcctttggttttggcctcagctccttgccttttgattcttttccacctcctcatcagaaggctaacaatctaaacaccaagctcaacacacccacatcagttagtaggcagttttagccacatatagcacaacacaagtaatgtccatgaaggacaaagcatattcaagtgcgtaaaggactggtatactgcctggtacagaaccaagcctgattttagcatgcatctttcatctttttctaaatccaacttgtaccaaaatacattatgagaaaaactgtctctctaaactctgtgaaaacaagaccttttctggcaagactcctggtgtagcctgtcctgtcttcaagcaggaccccattatccacaatggctgctcagtaagcctgggcgtccctgttacactcaccttctctgaactctgctttcttggttgtttagcctctcagcctccctgactctcctcctcttgctccttctcagtctcagctgtgcttttctgtatttgtgcatgtgtgtctgactcctctgttgccccctctcatggtacccagggaggcactaatactccggtgtcctcagcacagtccccttccttggatagacaaactcagaaatggtccccatgatctttgcctcctggtactcatccccttatgtagtctcctcgccatgagtgtgtgtgggaccattgatgctcttctaaccaacaccatatagcaaaagtgttgagatgtcacttccatgattatgttgtgtacaattgtgacatcttgttggcagactccctcccttgatggttttgatgaagcaagaaggcacattggaaaggtctatgtttccagtataagacagggagctgaggatgtctccccactgcccaataatcaggaattgaaggcagcctctcacagacagtcagcaagaatctgaggccttcagcccaacaagccagaaggaaatgaattcgctaacaaccacatgacactggaagcagacctttctc

SEQ ID NO: 3326 - DNA, 2300 bp, Homo sapien
tcaaatagatgtgcatttgatttgggttctatacttattagatgtgtgaacttgagcaagccacttaacttttatgagcctcagattccccatttgtcagtggaagggtaatactttctttgaaagtttcctactatgctctttcccctttccctcctccatgagtttgcacatgctatgccttcagcttaattctctcacccactttttgctgggaagacttctgattattcaggcctcagcttagatgctgcataccttaggaattcccctagccctcaaagatcaagttagttgtgttttccatgtgctcactgcccaaattcttggcacttagtccttgaattgtaatcatttgtgtcttgctctttctttccccctttgaggaactggtaactctgttgaggacagggaccatgatttgttaattgtcacctaccatctttgtcctacttcatccacttttcacccaaaaaaaaaaaaaaagccagaaaaagtaagccacctcagctaaggaattcataattctgagattctgaagaaaatgtcaatttctcactgagcgtttattacctgaatgcattacaacgtttcagctcttcaaattgctggctccgttcttgcactgtgttaggcagtgggcaataatttgcttttggtacagaaattgagtgatgtgtcttctgaactgatgttaaaacccaatagtttccaattttataagatttaaagccagttttgtatatgtgaaactacccaaatcaccaagagaattaattttcttaggagattctcatcggtaatagcaatttccacagtttgtttggcacccctagtggtaaatattttattttaaaaactcagccacatataaatttattgtaacaatctaggcactttgtcataaataaaagcaatgataactgtggtgctatcttctatttacttcaaatgtcactcctgaagtgtacatttatagaacatggtaattcaatgaggaagctccagggtcagatggctcaggttccattaccatccctgacactcactagttgtgtgatctttggaaagttatttcattcctctgttactcagttcccagtctatagagtagcaataatagcctctgcattatagagttattgtatggcttaaatgagctaatacatgtaagggcttataacagtgcctagcacctggtataaacactctataaatgttagctattgttatttgccaggagtgaatcaaatataagaagagtgtttgtataagattacctttaaattccctgccaatcctgaggttctatgtttctatatcattccagtcccttagcattcctattcagtagggagggggcagcattatccacattttacaaacagtaaaattgagccatagagaagcaaaatgtccagtaagcaagtggcagtctgaaaccaggactcagatttttagatgtaagtattaggactctttccgggaggctgtgtggctgtacatttaaaagagaatgttagatatcccttatgagcctatgagcagtgaccccttgatgccccttctctgccaaggttctccataaatgtgcatcaaggtcacttctgtctctacttctgagatgatctcaggccatatcttttcagatatttttcttactagctttacaaaaaagctatattgtggagttggatgaagggccagctccctgtatcctctgcctctttaggcattcccatgcctgggttgtgctacgtatacacatacttcacctggctgcagacgctgactttttggagggttccttctgctgagcccggacctcaaaccacttgagaaccccacaactgaccttattccaaaacattctatcccaacccattccaccctggatttctccttcaatcatgggcaaaggatctgcaaaagcttccatcctctccctttctcttcttatctgggttggtcagagggaagcctctatcttcttcaggaccctgcctatgcagaggcagctccaagagttgggtgcggggagtatttctgtgcctgaatctggactgttcaagaggatttaggatgcttttcttttctgtccactagggggctgcttgtagggggatggaaaaaacggaggcttaaaaaaatcatgctgctgaaatttcagcaagaggggaaaagagagagcgcgtgagagagagagagagagagagagagagagagagagagagagagagacagcaaagcagtcccaggcttcctcctctctttcacgtcagaggcaggaaccgactgtg

SEQ ID NO: 3327 - DNA, 2300 bp, Homo sapien
atcgtgaagtcttttcctttcctctcctgtttccatggaagccccttcagtctttgccaatacattgtctctaatgaagaccagctcgggatggcgctgctataccaggctgtcagatagactcagacactcctttctgtcaatatggtgctcaaagcaagaaggaagccctagcccttcccaaaactgaaaccaaggcaaaagctttgaaggccacagaggttgtgctgaaagggcctataaccataagaaagaaatagatccatatgtcacccatcttccaggacccaagacaccctaagaactttcagaagaccatcctcgagaccaccttgatgcaaatccaatgccaccagccacagagtgaaccataaagaagacaggtcaatgccacgtgggttctcatcagggaacaggcgcccagctgggtaagctctggggaggctcacacaccactccggaggggatcccaccccacccaggcttgatggagaggagacacatgttagatggtggcactgtgagtgctgacaacaaaatcaggattagctaacagagtccagctggatagatctaaatctaataaacatttccttcatcaggggaaaaaaaaatcccagcacaaggccagacttgggtcgctaatacagcatcgctttattccaccaactcagatgctgtgagtcaggtctcctttcccacatctacccaactcaagttagcaccagagtacctttcccgtctacctttctggcctcacggctccctctgggtgtgtgatggcccagccaatctgcttctgcaccagggacatctggatgcaggcgctgacccagtacactgggaagtggtatgtttgaggtcagagaagaccgtgatggaagagagggtgtcttgacctcagcatcttgtcctctgttgagtgcttcctgaataacggacacggtgctataggctttacattcccctcaacaatatagtatttctccttactttgtagctaagaaactgaggctcacgaaggagaagtagcatgcccagagccacggaactatgaagtggctgggctgggtgagagctcaggcctcccagctcctaaggttgggctcgttcctctactttatcctgctacccccaggaggccttcagcaaaactagcctcttctacagtcagctccaatcccggcacatcctggccccctaattagcctggcttcctgtctctggatcctcagttcagctggagatgttgtgcagcatgtgcctagcttcatgctttggcctgattcctcctattctccctgggaaaggccctgggcttgtctttctggctttcccagctcctgcagctgccacacgctgaccccatactgtgtggcaaccctcatatctgttaccagggaccactcccgcagctgccacctgacccctgagccgagcaggaaagctcactcgtagactgacagaagccttgagaggttatcctgtctatgccccaggccaccaggcccgcacacgcatagttctagtgcaatggtgctctcacctaggtaaaggtggctcccaaagggtgacagcaagtcacctcattgaccccacctagaagcaaacatctccctcaggaatccctggcttccaaagtttattgtcaaactcaaggctttcctggcagaagatgcttctggccaatggcagccatccatactctggaaaaccctcatctattcagcaccctgccacctccccatcttcaggctaattccagcttcttcacttcaccctgggaccatttctaggcaccccccaattatccagtgactctcttctgaagactccagaaagccctgctaaaacccggcttgtgattccctcaaggaggcctgagtggagaccaattaatcctcagcatcatcaaagccactaggcagttccttaggcaggagcactacctgcaggccaccctgcccatcctgtccacagtgacaatgaggcctgggccgctcatggggcatcctgatgcactctagatgaggtcacactggcagggaggagctgctcttgcaaggccagtccctttacatgtgatgggtattgtgaatgagtggggctagagttgcctccccaggaggggctggaggtcagggcctggtgggctctgcaggcttatcagttcagcacaacgtgctcctgcattcaagaaacagggcatggggctgctcactggcactggaggccgaaagaaggtgagggcaagtgagatgcagggacctcttctcacagctgtgctgacaagcacaaaa

SEQ ID NO: 3328 - DNA, 2300 bp, Homo sapien
ctcagcattgtctcattgtatatgtcaccatgcataagttacttatgctctctgtgctaatacttcttcatctctaattggggaaaataatctgtaagatattgtctataaagtgccttcctagcctagtggtagtttccctttttaaaaaaaaaatcagttttttgtgtcagtttatatttgttggttgtagaaaaatagaaagatccaatttaaagtggttaaacattatggaaaatgtatcgattcacgggaaaagaatttctagaactagttatcagtggttcagtggtattgtcaggttctttctcttgttcttttcttccattgccagcatataccttggtcttttggctggctattcttgaggttgcaagatggctctaagcagttccagatatcatccccttatgaaggcatggtttttttctcctatcctttcctttctgaaagatagcacatctctctttggtcaaaattgggttacgtacttaaccccacatcaaccactggcaagggcatgaatgactagattgccttaggttagtcaaagtaatacatggggttggggtggaatctaacctctctgaaagttatatggcagtctgacacttggaaaaaagtcatgttattatcaagaaaaagagtaggatggtttttggatagttagctaaaagtgtcttccatggtatttttagaagaattacaaagaaaaagaacaaatgcaagtctttagtacttaactcatagtagatactcagttactcatgccttgttaccatatggggcatgtgatggtctcacatggtgaatgaggatttctctctcagcaagtgccaatagcgtcatcattgagaaacatgtaagggaaaatacatattctgaagaattctcctatagtaatagtagttgtagtagtagcagctgcagcaaaactgttttctaacttgaaataaaataaaaagctaacactttctgtttagcatgttttgaatttggaggctatgtataggtaaaatagaatctatctaaaccgaagaattacatgatacatttaacaaaaatacaaattatgtgtgctttttattttgtttctgttttcagtgaatgaactcattcttaaacagaagcaaagatttgaggaaaagaggttcaaattggaccactcagtgagtagcaccgtatgtttcaactcttattactatttttaataaatttcattttgttgtttttattggtttaatattagttagatgttaaagtttagtatattattgatttttcttaaaaggcgattgtttaggattgttctagtcaaataactaactttcttaactgcattgtctgtagtactttactagagtgatcctattttgaaaggtctggtaggattatattgaaacatttgtctttgaatacttgacatttgaaggattattttgggtggtgaaacaatggttagatattttcaaaaaactgttgaggttgggctcacacctataatcccaacactttgggaggccaaggtgggaggatcactcaagcccaagaatttgagactagcttgggcaacatagcgagactttgtctatattcaaacaaaaacaaaaacaaaacaaacctttgaaagattctcaattttaaaggcttagtcccaaattatggaggcaaatgagcttaataccttactacatgcaaaattgaaaatatggctagacaaataattaaattcagtcattttgaaggtaaattacagctttagaatagtctcaaaggcaccttttatatttgttatctaaattcatttaagggagaagaaatagtgtttaagttataactgtaagacagtagggagccactagctaggaaggggtagtttggaacattataatatattttcgatatctatgtaatgagcatattaggaagtagcaagtaaacatttgttttagtctctaaaacagtcttcataggaagttgttgtgtttcttctttcttcatttttagaatggccacaggtggcagatatttcaagattggttgggaactgaccaagataaccttgatttggccaatgtcaatcttatgttggagttactagtgcagaagaagaaacaactggaagcagtaagtggtagctaaacttaaaaaaaattttaaatgatgaactttattgcaataaaaaagacgtagaaagtttaaaaataataggatagcttcactaatccattcatttttactcagctagaaacagctacaaagtgtcacttctgctagattccccctttttgtaacttaaa

SEQ ID NO: 3329 - DNA, 2300 bp, Homo sapien
ctcactggattatgatagcttccgtaaccatttctacacttggcttccctttagtcttcttttcagcatagcaggtagaatgatctggttcattactgtgtcaaatcccatcactcctcttttccaaatccaccagtgaattaccgttttactcaacttaaaagccgaagtctttaacacattccttagttctttgaggtgcccttttttttctcttttctttttgagatagggtcttgctctgtcacctgggctggagtgcagtggcacagtctctgttcactgcagcttcgcctgctgtgctcaagtgatcattcttcctcagcttcttgaggagctgggactagctagagtagctggggctgcaggtgtgtgcccctatgcttgctagtttttgtgtttttttttttaattttttttttgtagagatgaggtctcagtatattgctcaagctgtgagagtgcctttttaaaaaatttgcatagaggtgttctgtgtcttagcagtgacatacttgaaggatcctcaaacactaaaatacccctttctcaaaatgctaacgattaggtatgtattgttttctattaaatagctcctgacatattcagtgaattgattggttggttcttttgccgttcctcctgctctgacccccaaatctcagttttctttactatgggtccctttgtagctggtgtgtcctcttattattatgtatttatcattattgtatatattgtatatattttcacattgtgttgtaatatcatctatacatatttgagtctgccattagactttacattcctgtattctaagggatagtgtttatgcccaagaaatttttcttgaaggagtgagtgtattttcagttacagttttaagtgtcattgtatcatccgtaaggatttggatttgtatgcaaataagagaaaacttgataaacattgacttaagcaagtcaagatttaccttctcatgtaatgtgaagtccagcggagacaatccaaagctgatgcagctgctcaaggatttcatccaggaaccagtatcctcctttcttcctagcttaaggtttttgtcttcatggtcagaagatggctgttgtatctctgaacactgcatcagaattttagtaaggaagaaaagggaaggataaaaggaaatgtctttttacaaggttttgcatttttgttctcatagatggtggccccttagaaactgatgtctatatttcactggccagaataatatcatatagccaatcctaagtacaaaaaaggctgggattttgagtattctgttttttattctttatagggaaagagggcagaagaggattacaattggtatttaaagtaccagaaagtagtgtaggacaagtggttaagaacgtagacctgaatttgaattttgactttgttacttcttagctgtgtgactttaacagctctctgcttctgttccctcatctataaactgtgcctagtagttggtacctatttcactttgttgttgaaactattaaatgagtcaatatatattgtgggtttaatgtgtatagtttgttttatttaaatagctaataagttgttatgattgttgtcattacctacaagcattgtcgaaactagaataataaatttatcactcaaggaattagctttatttgggataggaagaaaagagtatttagcaggtctcggtacacgcttttgagtacatgtgatggaaaacgatggtagagctttcttaaaagggctctggtgactgcattgtactactaaaaattatgtgccgagttaaaatattggaaccattttgatttactcattgacttcattttgaagctcagtgacccttagggtcatcctgaacaaatcatcattttaccaacaatcccctaaagtttagttcaatagaaatttcatctcttattgatagaatgtttatagacttagctctaaactgtatattgaaatatgatttcattggtattgttactagtcttttccaatttgtaatcactctacttttaaaaaaaaatcaattatttttcttttctttttagccccatctgctttgatatgattgaagaagcatacatgacaaaatgtggccacagcttttggtaagacaattctattgagtaaaataatcttttaacattttaaaacttatctgtaaatgtagccaatgagaagttacgtgttttaaaccaactttgattatgttacagtcatattttttttcttgacatgtctttgtagatgtggcagtttaaggctgttaacataat

SEQ ID NO: 3330 - DNA, 2300 bp, Homo sapien
ccacaatcttacacaaaaaatacttccgcaaaaacatctgcccagcaacttcctgtccagtttccgactggtgtcaccttgttattgatcttcgtagccaaggataacggtttaaaaacaattatgtaattctcatttttttttaaattttaaaaacctttgccttcctttacctccttgaatacgcacgtagtttactaagtcatgagtattttcacactttattcccaaataaatatataagaatcatagaatgatagaattgaaaaggataaaatcacacagttgtttctaactcccaccccttagaatgcggcaaatgaaaaaaatttttttttttgagacagggtctctgtctcacaggctggagtgtagggatctccgctccctacagcctcaacctccccagctcaagcaatcctcccatgtcagcctcccgagtagctgggactacaggcctgctgccaccatgcccagctaattttttgtactttttgtagagacggggtttcgctatcttgcccaggctggtctctaacctcaggttcagcctgatcctcacctccaggctcaggtgatccgaccccctaggcctcccaaggtgctgcgatgacaggcatgagccaccgcgcccgcctataatcaattttcaatattctaaaaaagcctaccagaaattgtatattttctggtggtattaaatgctaggtttccttgttttgtgctagaattatatcagatccacaataaacctaggttccgactgagctgggtctgattgagcaaaatctgttttcccattattgttatgttcaatttggcaaacagcttttcaaaatataggagtgaagtcgtggtcgaactaataaaattggtaacacttgctacaatgtttgcaattcgcagaaaacttcactgacttcatcttaacttattcctcacaaagctgtggaatcaccatcagtagagcaggagtcgttggctcaatgcagtgctgtctgcaaccgctcggagcttctaggttctttccgtgggtctccagcttatgagcacctacattccgcgattcggaagcacctgcctacccctcagaagagagagacagctccttcttcccgttccggaatgtggtgcgttcgcacgcatgcgtgacacggctactccgcgcttgcgccgatattctccgcttggggcggataccctgggtgacccgtgagcgtccgcgcccggcgcgcgcctgcgcagtcgcttttcgagagtttccgcccgctacgttcccgtctttcaaaccaccccaccacctataccattcattccagtctcctcaattctttcactgtattaagacggcctgccctctggcacgttttctggaacgaaagcggcttgggacagacagactcccttcgccagggagccccgaccccgagggcgcgccctgagcgtctgagcgcagccccgctgcgtccccagttgtatcccccgccacgcccgcctcttccgccgctcgcgcgcgcgcgcacggccggccacggcgcgccggggttggctgctacagggaccgcggtggcggcggcggcctcgacagcggtagtgccttctactccgcttttttagtttcctccgccccctcccgtgggacgctgttgtgtggctgccttaaaaaaaaacgcaactttattgttcctcagccccacctccggctcggcgggcgtcctcaggatgcactgaggctgaggggaggggaggcggcggagggtcgaggtcgcggtccctctcctccgagcgcccggctggaggggagggagtcacgatgtctggtagccgccaggccgggtcgggctccgctgggacaagccccgggtcctcggcggcctcctcggtgacttccgcctcctcgtctttatcctcttccccgtcgccgccttccgtggcggtttcggcggcagcgctggtgtccggcggggtggcccaggccgccggctcgggcggcctcgggggcccggtgcggcctgtgttggtggcgcccgccgtatcgggtagcggcggcggggcggtgtccacgggcctgtcccggcacagctgcgcggccaggcccagcgccggcgtaggaggcagcagctccagcctaggcagcggcagcaggaagcgacctctcctcgcccccctctgcaacgggctcatcaactcctacgaggacaaaagcaacgacttcgtatggtgggtttgaagagcactccctccttgtccctaaattatgagtttctgccgcttaggcttgggggcggggggtctggtgt

SEQ ID NO: 3331 - DNA, 2300 bp, Homo sapien
atctcttaaacaaaagggggtgggggggccccatctcttaaacaaaagggggtggggggccccatctcttaaacaaaagggggtggggggccccatctcttaaacaaaagggggtgggaggtagtcactaatatattttttaaaacactgaaaaatagattcagaggtcatgaagagaaggggtctcatgcttgcacacctgatgacaaaaactatcacaaaaacctgcaaaagccacaatcttttttttttttttgagatggagtcttgctctgttgcccaggctggagcacagtggcacgaccttggctcactccaacctccgctttctgggttcaagcgattctcctgcctcacactctcgagtagttgggattacaggtgcatgccaccacacccggttaatttttgtatttttagtagggacagggtttcgtcatgttggccaggctggtctcgaactcctgacctcaggtgatccactcgccttggcctcccaaagtgttggaattatgggcctcagccaccgcacctggccaaaagccacaatcttacacaaaaaatacttccgcaaaaacatctgcccagcaacttcctgtccagtttccgactggtgtcaccttgttattgatcttcgtagccaaggataacggtttaaaaacaattatgtaattctcatttttttttaaattttaaaaacctttgccttcctttacctccttgaatacgcacgtagtttactaagtcatgagtattttcacactttattcccaaataaatatataagaatcatagaatgatagaattgaaaaggataaaatcacacagttgtttctaactcccaccccttagaatgcggcaaatgaaaaaaatttttttttttgagacagggtctctgtctcacaggctggagtgtagggatctccgctccctacagcctcaacctccccagctcaagcaatcctcccatgtcagcctcccgagtagctgggactacaggcctgctgccaccatgcccagctaattttttgtactttttgtagagacggggtttcgctatcttgcccaggctggtctctaacctcaggttcagcctgatcctcacctccaggctcaggtgatccgaccccctaggcctcccaaggtgctgcgatgacaggcatgagccaccgcgcccgcctataatcaattttcaatattctaaaaaagcctaccagaaattgtatattttctggtggtattaaatgctaggtttccttgttttgtgctagaattatatcagatccacaataaacctaggttccgactgagctgggtctgattgagcaaaatctgttttcccattattgttatgttcaatttggcaaacagcttttcaaaatataggagtgaagtcgtggtcgaactaataaaattggtaacacttgctacaatgtttgcaattcgcagaaaacttcactgacttcatcttaacttattcctcacaaagctgtggaatcaccatcagtagagcaggagtcgttggctcaatgcagtgctgtctgcaaccgctcggagcttctaggttctttccgtgggtctccagcttatgagcacctacattccgcgattcggaagcacctgcctacccctcagaagagagagacagctccttcttcccgttccggaatgtggtgcgttcgcacgcatgcgtgacacggctactccgcgcttgcgccgatattctccgcttggggcggataccctgggtgacccgtgagcgtccgcgcccggcgcgcgcctgcgcagtcgcttttcgagagtttccgcccgctacgttcccgtctttcaaaccaccccaccacctataccattcattccagtctcctcaattctttcactgtattaagacggcctgccctctggcacgttttctggaacgaaagcggcttgggacagacagactcccttcgccagggagccccgaccccgagggcgcgccctgagcgtctgagcgcagccccgctgcgtccccagttgtatcccccgccacgcccgcctcttccgccgctcgcgcgcgcgcgcacggccggccacggcgcgccggggttggctgctacagggaccgcggtggcggcggcggcctcgacagcggtagtgccttctactccgcttttttagtttcctccgccccctcccgtgggacgctgttgtgtggctgccttaaaaaaaaacgcaactttattgttcctcagccccacctccggctcggcgggcgtcctcaggatgcactgaggctgaggggaggggaggcggcggag

SEQ ID NO: 3332 - DNA, 2300 bp, Homo sapien
cagttggcctcgtctgagaaggagaagtgtgagtgcaatgctccttatccacagatgacagaagggactgatccactgatggggcagaactgataacaggacagagtctttaagcagcacaaggtgctttctgatgatcacaatgtattgcattttggttgggggaattctaactttttggagacattagtgtttataaaatattctcctatacctttctgtcccaccttcctcccttctacaaatattaattgagcacttactaaggtaccagtatagatattgaggacacaaccatgaacaagaggaacaaggctcctgtcttcaggtttttgacatttaagtttgcttgaggtctgtgtgtgtgaaggccagaaaataaacatataaacatttaatcttttaacaaacccatggctcaggcagaataggtgtacccatatctatttcataaataagagacctgaaactttggagaggtcaatgatcttttcaggttagccagtttgtgcattcattagcttatctatcagacagatttaccaacaccagtcatctctcagctcatctcctagacttttgagttataaagatgactagggtatgggtcctgccttccaaggctcacaatacagtggtaaagcagccacacagacaaaaatattctaatctgataactgctataatgggacctttgcttgcaaaataggggcttgaaagaagcatctgcctgagggagacaatcaaggtcagccacaagtctaaggctgggagaacgtgctcaataacacttgttggattgaattgagtcagctattcaaggctggcttcactatctggtttaaaaagtgtccccaggacatcagaatcatatattcaaataaagcaaaaataatctcattccaaaccaaaatagaaattgtttgttccacttttggtcaggcttcctgcttttatgtgattaattaaaaacagggtagccactaagctgcaatataaatgacaaattatttatgtcttatttattaatgtaaaaatgcccagaaattcctcctagagtctgtttcatccaccctcatccttcctgtatacctccctacctccattagtctggctgtaattgagaaatacttacacctagcctcaaccatagcaatgtagaaagagccattaaactaaactcaggaaacctgggtttttgtcccgggcctgtgattagctaaaattctgaccatgggtaagtaacttcagctttttttccccctttattttcctttcctttcctttcatttcctttcccttcctttcctttcctttctctatctccctctatttctttctttctttttttttttgatacagggttttgctctgtcttccaggctggagtgcagtggtatgatcaaatctctgcaggcttgatctctgaggctcaagcaatcttcccacttcagcccttcttagtagttgggaccacaagcatgcaccactacacctggttaatttttaaattttttgtagagatgggccctccttatgtggcccaggttggtcttgaactcaagtgattctcctgtctcaaccttccaaagtgctggaattataggcatgagccactgtgcctggcctcacttaacctcttgatgtttcagtttcctaaattataaactgagattgaatacttgtcctatcttacatcacatgttcttgtaaggaccaagtggtaatactgggtggtagctggagaatggagcagttagcagtttcacatgactagcaaaaggaaattgttgaaatagctgcataaactaggggctgataagatcctgaaaaccagatgtaggctaagctggctaagaccaactggacccaaaatggtgctggatttgacatgggtttcacctataacctcattatatgttcattaacttactaaatcacacacccaccagtgccgtgatagtccgggaacacccaaattggtgtaaaaatgggtggtaccacagttccaggaaatgttcaccttttcccaggaatcttcatgaatattccacctcttagttaaagaaactcataaagatggaaaccctgaaccccactgggcatgactctctctcttgagtaggcacacactcccttttctcgggtgtgtactttttgctttgtgatacatctctgcactttcagtattttccaactcatccttaaattccttctcacaacagtgtcaagagcctggacgccagccaggattgaggtcctacgggtgtttggggacctccccaagcccacgagtatca

SEQ ID NO: 3333 - DNA, 2300 bp, Homo sapien
atagtcataaaactaggctggattgttgcccaaagccagtgcctgctgaataatcatgtaatgttattttattgtgtttcattttatttctttgtaattgaaccattttcacattcagtttcttgtaaactctcataccataaatggaagcttgctctatatcttaatattctctgtaatgttatcattagggttgacccatttcaattaatagaggtcaattcagccaaagttatataaatgtatttatttaataaacatatatttgagcacctactttgcacagagaaccctgggtgtcaggtgttggaaaaagaacaggatacccgacctgatctttcccctcaaaggagtttacagtgggacacatggtcaggagaatgaggaagatgaggcagtgtgaaaggggaagctgtccagatgttcaaggtggactgagagggaaccagccagcttcagaattcttcctagaaacactgtgctattgctcaaggaaggaaccacttcactatcttgtcccagacctaagctggtgtcatggaatcctctgggaatcttgagtcacatctatttcctggactaatgtagtaggacctggactggatttctttcctgtttcaataagaatcagacacacgtgtgtttagcactatctaaggtactatatatagcgtgccgaagaagtccttgatttgagattcttatataaagaccaaatcacatacatttataattaaagagctctaatcacacctgttcacacaaatatataaatggtaaatggaaaaagcagttaaaggtgcatgaacatgggcctcatttgcacctctacttctacaaatagtaatatttaatgaacactagctatgtgttaggcactgcataagctcattacatgcagtctctcaatcttctcaacaacccagtgaagcagctacttttttcccatttctacagttttggaaactgaagctcagagaggttaatcagctggcccaaggtttccatgtaaaggacaaagtcactgctattacaatattgcttctcgctatattattccttgttcctctacataagacagagttctttatcttattataacagtgactgtggataggaataaatgatgtgctttaatatcatgagcatctttaaattctaaatttggtttatgcccaatgagagacccagattaaatcaatattcttttttaatgacagccttatgagaaaagttcttactttagctaaaaaatgtaaattcttctcactataactacaaataaggtccaattaatgacttatgagttgctgacccatatttactaacattgatgttgcttttccatcctaatgaggaggatgccaaggaagcagttgttggttaatggtgcacatggcattcacactgtgtgccctagggtctatttagttcaggaaggctactcctaatggaggaggagtttttatgggttgatattgtgtttggatacattcaaacagtacagtgccaggagatgataaatctttctaatttcttagttgacttatcacaggaccagattagaaagttattaatttcttaagcatggtgtcattccttttgctgccttattacccttcaaacaaatgcagggtctgaccatgtagatggttcttaagaaaagctctagaatatcttggatttaaatgtgctaactcatttgcaagcttatcttcagtgattcttaccctgacctatttgggtaactgtacagttattagaggagaggctactctaaagttctgacagcacttctctgcacagcaaaggtgagagatttagtctgatcacatgatgaaaggagcctcagtttacaggcttaaaaaaacaatgagtcaaaatcaaattggaatataacttggaaatctaatctttggtgatccaacatgctgtcaaaggcatttcctcccaatatacggggttgacttgcctgcatgggtcattgatggaataacttcttatattgagctctcctctgtgctaggtgcatcgaggactacaagcttggtgtggatggacgctcttgccaactcatcacggagacctgtccagagggaagtgactgtggggaaagcagggagcttcccatgaaccagaccctctttggggagatgttctttggttacaacaaccattccaaggaagtggctgccggacaggtgctgaaaggaacattcaggtaaacctcatatacatagaactgattgttcaagactgttggtggactttctctaaagagtttgcactagcataaagct

SEQ ID NO: 3334 - DNA, 2300 bp, Homo sapien
ggcttagtcatgcactgtggaggcactgtgtcttctaggcagtgttctggggggtcccaggagctctgtgtgtgtgtctgcagggctgccaggatggatgggagtggaggtggcagttagcaaggacctagaatacttggctttggactcatacccataatggaacctgagcatgtttattctttctctatacttgcataagagcttgcaccaggagaaagggttctgcaaaaaaagaaataattgaaaaccaggaggtcagcatacatctgtccccaacaagccacatgatataggctgtcacttggcagctgactctgttgcctcgtgtctctgctcctctgtgctgcctgcttgaaagtggcagtgtgtgtgtgtgtgtgtgtgtgtgtgtgtgtgtgtgtgttcctttgctcacagcgatggtgagagggggaggataaataggaagattttcagggaaagaaattttataaatccaaggtataattattatgagactggaaaagccccctttaatgtatttggaggcatactcttgacctagctttatgtgggtgggccctctgggaattagtagcggatttttatctctagcttatttgatagggaggtatgattgaagcctaaggttgagagaagaaccatttggcacatgctggcctaatgaaataggtttggaaagatattgaccaaaataaagggagtgaatagagattgtgcacgggaagatttatgcccaccgagtgccatgcagcaccaagcttaaaggctgtccctctaaatgctgccccggtgatgtcaaggccatgtgttcagtctcactgagttctgcatcctcacctctggcagtcgacagagtggtgtcctgatttgtaaggaatgaccttcgaggtgttggcctttgagcaccagaaggtaactcctccaccagcctgactccaggacttgggtttcaatcccttcccctgagctttagtaagaagacggaacatcactcaggactgtgtggttaagggaaagctgtgacccaaaagtcatgttcagatgatgagattcctccccacacttggtggtaaattcctgatggatgtaaatttctattcagatttgtcaatggtttttcctgctgggccagttattcagatggagacatttaaggttatgctgagaacagctttgattgtgtgagatatattatgctaggcactttacatagttagctaacctaattcttacaaccaccctgggtggttaagtggtgtcttctccattatacagatgacgtatccgaggtttagaatttataggacccactgataattggtggaaccactgttagaatctatgattgatgtttagacgtgagacaggaagaaaccagatgtcaccccatattgctaaaaaaaataaagtcctgaaaccagcgttatgtgtggcagatttaacttaatacataaaagctctcccctgtttttgcagctgaaatcacgcacacacacacacacacacacacacacacacacagacttgtttcttcaaattgtttgctaagcccgaagcaactggatcacttgaaatgatgcactggtcatcccagctccatttttctctcaccctaaataccagtcacagtagaatttccctttgctgctgaatgatgcttgctgtaaatgcttaatacagctgaatgaatgaatgcataaataagtgatgaatggtggtagcagaaggagcagtgactctttgtgggaagagcctacccatcttcccacatccatctgtggtcctctcttcctagggtggcatgatcgctctgctgctgtccatcttgtgcctggtgatgatcctgtatactcgccggcgctggtgcaaacgccgccgggtcccgcagccccagaagagtgccagtgctgaggcagccaatgagattcactacattccttctgtgctgatcggcgggcacggacgggagagcctgcgcaatgcccgcgtgcagggccacaactccagtggcaccctgagcatccgggagacacctatcctggacggctatgagtatgacatcactgatctgcgccaccatctgcagagggagtgcatgaacggaggggaggactttgccagccaggtcacgcgcaccctcgactccctgcagggctgcaatgaaaagtcggggatggacctcacaccaggtggggatgggagaaaggcaaggggctgtttggtccttcatctcaaggagctggggagtgggtaggaacagctgtgtgacaacagctggttgtcctacatagtgt

SEQ ID NO: 3335 - DNA, 2300 bp, Homo sapien
aatggtttacttgggctttctaacatgactcaagaatcttcagaaaattagaaagaaagatttcaaagtgacagtagattatatgctactcaaaagcaggagtagtatttttctggctgtgcttagcctaatgcttatgatacagtaggtacacaaacatttgctgaattaattactgtggtccataaagcccagtgattatccatgggtgcaccctagtgtaccataaccatatagtggaaagagcagtgggcaaagaaatcttgttcatggtcttagctccatagaagatagatcactctttaatgggtctcaatttccttatctgttaagtgagagattggatgaatacatgatcaggtacttacatgccatttctcacattctagtatcaagggtgtgttcctgacatccactataattattcaatggcaaataaccttgcataagtaagtttaatactagatttttgtttatgctagggataacagaatgaaagagatatcatggggtttttgtctcactcagtatctcttaggggagcaatgacgatcaggatgagttttcaaaagtcgttagctggtacatcttttttacagtagtttacagtagtttgcaatgctgcatggtaagataacttggggttaattcccagataagttacatataaaaactcaactaataaagtgtctttgttcttcttttctttgcatatgtggtaaatgatctttcactacttaaacattaccttaaatatggcttattttctctattcaattagataaactttgtaaaatatatggcaaaagcttttttgtcttttaaagaacatattttcacatatgccaataaactgacaccaggtagaatgaaaatgtaattgtttcttaagtaggggtcctcttttagaacagtagtgcattaaatttctagagtgagaactacaaataacacagtcttcacagcacctagtattgaagttagcattgacccaataacaatggagggacacacttttgaaataagttattggttatcatgtgagagaaagttcagttaaatgtcagatttcagaatacacaatgtcacttttctaccactgtttattgcatattgtcatcatttttaaaaggcaacattgttgagcactactgggaacagatcttacatgggttttggtggtggtggtggtggtgttattcttcagaatacttacgcagggtgctgaacatcttccctgttgtactcttgactggattgggattgacttagctcatacccaaggatattcttttattacttttccatctgttaagaatgcttaggaactttggtttttctcacaatttctttccagctttgtcctatttactagattgtctaaaattaaagtttcaagatttatttgagctaaccctactttttttctatcagctataatattccccaaatcatctttttattggttactacagataaaatttgtgatagaaatgaaatgaagcagagagaagttgcgagtaaaagtttcgatctcctgcttaactgtgcaccttactctgttgtgcatatctatccatccatctaaaccagtataacaaatattttctttaaatattttgcaaagttagtgctaagtaaaaatatgcacatgtgcattcccagctcccgtttatcctatgtacaaatccaactagtgggggacggggcggggtggaagcaagattcggacaagctataatacatccacaaaaccactgggggaattttcatctcccctcaccgcgcagctttgcagaagcgccctttaaggtgtatgtctgtgtgtgcctctctcaagccttctggatgatgatgcgagagggaagattttacattgcaaagatcaatgtattaaaaatgccgtgcaggtagttcatagccaagagccttgctcgtgttggaggatgcaacggaggagagaggcaggagcaccggcagccagctgggggctgacctgattccctagaatcctcagctcccttcctctttcctttcgacgtccttccttccctttttctcctctcccccctcccccgctttcccttctccagataagcagctccgggaaacaaagaatccggggctctccagacatcagagcttaaacccaggactctgcaagcggcatctcattccggggtccagggctctcccggctctccatcccctccctaacctcccccgcctcccgcgctcgctccctcgctccctccccgctcgcttcctcccccaccatcgcagcgctaggaggaaggcgg

SEQ ID NO: 3336 - DNA, 2300 bp, Homo sapien
cagcagttgggtagcaatagatttaggctctcagtggttctcttggttattttattctagaaagagagctcaggaccctgtgggaccaccattctctgacatgttttgtagcttaggcaaacagatacttgcagtatgcagaaggaagttcaacgttgtataagatacagagaagaaaatataggtgaaagtgatagatgtgtgagtctgaggggatgaatgaagaaaatttctaatttttctttattcattcagaacttacggctacttgatgcagtttagctaatctccatgtgtacttcttacacattcattaaatctctacatactttttttttctagttctttacaaaataatctccgatgttgctctccatttaaggaaactaaattgaaagactcctctcgctttctgactatatatttatcttcttcatacttcccccaccacatgacttagcatggatctcccaagttccttccccagctccagcccccagctcttcccttgaattggatttttcttcaactattactctttttcctatgctcctgccaaaatctagtttagtatgctagttagcgggacatgtttcagttttgtaccctcattaggatatcaaaaatatatacttcacacttcaatgtaaagttaatattttcttcccttctcctttcctcccttttccctccacctccctcccttttttcctccctccctctctttcaattcacaggcccagcaacagcacctgcttcacagaaacaaggctggtcctgttctgatttctctagtcttcctttaaaaactaaacggagatgcacagtccctcttcctgacacacacagaagtgaaaggagacacacagagggaaaacaccacaggcaaaacaattcccttttttggagggacatttttgaaacttaatctctccccagaaacctgaagttctcctctttgcctttgtccttacagtcctggtgtgggggcagaatgtttcctgatttagctgtcctggcctctaaatctgtttcactctctagccatcttactgggttcttgctctcttttgcctctctctcctcttgggtctctggggtgtgtgtgtgtgtgtgtgtgtgtgtgtgtgtgtgtactatttctcacttgggggctcatttctaattaagtaatccaagaggctaaaaaatgcacaaaacaaccaaatgaaacctcaaattagatggaaaatggctcagatgggtcccaatctctgggagttctagttaagcaagcaaacaaaatgggctgggataaatgattattgtaactcaggaagattagaagaaaatgtaattagctccccagctacttcttgttccccagcctttttaagagtgtccaacgccccacccgtgaatgtacccaaggcttccttatacacaccaaaaagtccccactgcaacgctgggagggttaacagagctggtaccccagcctgccagctcaccaaaggagagagcggtgaggctcagagcccgccccctgccaagccgcccagccaatgggcacctgtggggagtgtggcgctgtgtcccattggctgccaacctacatgcataagaaagaaagagagaggcaggcagggcagcattgttatcttaagacactcatctggtgtctgagtctgcaggtgacactgcttaggtacggagcgcggagtcggagcggggacgcgccgggctgcagctctgggatgcaatccgcctgcctcgcaagctgctcgccgctgcgctggcagcgcttacgctgagctcggaggatcccattaggacttgcccggggatgtgcacctgccgtgcgctccgaggtcagtggcaggtctgcaggcagccgagggagcggtgaagccggaagacctgtctctgcccatgtgcaaggcagtgatttcgggtgagagagcgggtgggtgagtctctttagagttggaaagaaggcaaaatcttgggtttctcctcggcggagggacaggggactcccccagttgggtcttgcacttcccttacctctcccaccccgcgtgcgccccggcccagtgccgaagccccacttcaaagatgctctgggagaccgggatcctggctgctcagcgggaaggcagcaggcaagtggtctaacgttggcggcggtggcggtggcggcggcggcggcaccgacagtaaagcggggagcaagagaatttgaaaagagacatccgctccctctcacacgctgagggggaggcattcgcgtttccccaaatgagaaagaaccacaagaa

SEQ ID NO: 3337 - DNA, 2300 bp, Homo sapien
aaatttaagcttttaaatgaaaattcaaagtttagaaaacttgcattcatcctcatgaacttgacattttcctaatatttaaagacgttgaagagattggtcatgatattaaatagtgagatgttttaatattatataatgaaaagtgtcaaaatgtggaagatctgcataacttggtgacctgatattttccagatgaccaacacatgatgttacaacattatgcaggataaaaagatccattcaaattacaatatagaacactggatttaatgtaacaaagcatgaaaagttcactgatatgatttcagattccatattgtaactaacctttaagaaactaccatctgtttagtttagtgtagtaccaaagatgaaaatccacaattatgaaaacagattgaatgtagaagcaaatatgagagtgcagctcttttctgctaagcctgatattaaagagatttgcaaacatgcaaagccatgccactctccttgctaaatttgttttgtttcagaacatacagttgtcatgaaaatgttatgttatatgtaatgggtttattaatgttatctctaaatgaaataacaaatgttgattttctcggttttgatttctaaaatggtaaatctcaatagctctaagccacatgtacaaatatggggattcaataatttttaacagtatgaaggggatcagagatcaaaatatgagggcagtggttctagagcaagcttcctgacttcacaggtgagtaactgaggccatgagaggggatgtgactcattcacggtaagacaactgtgattagatcacatctttgcaaaccactgttccaatgtttgttttttctactactcaacactgtaaaccatgacttcatgtgaataagctaatcaactactgtctgatgagaaagttggctgggagaggctctgatgtagatcagtggagacagagctttcttacagcatgtgaatgacaggccaggtgagaggccaaggggcctcttccaggctctgggcacctccagctgaggggatgtgggctgagaggagatgagtggctgcaagtggaggaagaacattacctacttcagattttatgcctcttgctctgaaacgaggtcagcttttccttatcccttggcttttcccccagggagtttgcccgttggaaggtgaacaacttggctctggaaaggaaggacttcttcagtttgccattgcctcttgccccagagtttatccggaacattcgcctccttggaaggagacccaatctgcaacaggttacagaaaatctgattaaaaagtacggcactcatttcttactttctgccacccttggaggtaagcaacatcacaatcccaagctaattggttgccagaccattggaaataacgttaagactcgtgtagcgtagctccaacagtcttatcttcttccgggccttttattgcctgagaagtctttctggtgcatttgaaaacagtgcagtctcttgacatctcaatttaccccagaacatctctatttaattattccctgaggaggggaagttgggtatggcggttggaggtggacaggctcctaacaagcacttgccagcagggggcactcccagttttcgctccgctgagtcacccaacccctgaggcttcgccactttctaatgtttgctgtggctacaatggtcagacccacaggcaaaaaagtcgaagtccctggagtccctgacccctcttcctctctataacgattggaaactgtccaaaccaactccagtagttctgggctgatgaatcatcctcttgtggggcggagagtgggggtagggtggagcaatgtgggctaggacccagggcaggatcaaaatctctgaagatgcagagctccctctgccctgggaagaaggaagcaggatttattataacatttagctcactgtccaatcgactaaaacaagctctcccagggctcgggccagctgtcggcacgcggcaggtgttgagtgtttgatggggaggagggagatgccccttcaaggcttttgcccttcctgagggagcagaaaaagccacgaagactcctcgtaaacaacttgagagagagaattgtgtctcccctatgaagatggattgcttgagacagagttcaatagaagatgttaaacagataagctgagggcagggggactgagctttggaagagggcctttcaggcagcgaggccgctggcctgtggctccctctgatgagcttcttctaaagatggtaagggctgggggaagagcttggca

SEQ ID NO: 3338 - DNA, 2300 bp, Homo sapien
actgcatgttctcactaagaggtgggaattgaacaatgagaacacttggacacaggaaggggaacatcacacactggggcctgttgtggtgtggggggaagcgggagggatagcattaggagatatacctaatgtaaatgccaagttaatgggtgcagcacaccaacatgtcacatggatacatatgtaacaaacctgcacattgtgcacatgtaccctagaacttaaagtataataaatatatatatgtaaaataaataaataaataaaagaatgaggcaaaattaaagaattttcagattttctaaaagtgagaactcatcaccagcagattcacactacaaataataaatgctcctcatcctgaaagaaaatgataccagataagagctcagattcttaggaaggaatgcagaacattggaaatagcatatatctgaatatatataaaatactagttttctctaaatttttataaaatacataggactatttaaaggaaacttgtaacattgtcttatagggtctatgtggacttaatacatatgacaactatagcctaaaagacctcattgaggttgagggagataaatgggcctatacacttacaaagtttcatattttacatgaattggtataatattaactccttgttgactatgaaaagtgaaggatgtatattgcagtccttagaataaccactaaaaatgcaaaaaaagtaatttaataaagtagaattgtaaaaagtatttagtctaaaaggagacaggaaaggagaaataaaggaacaacaaagtgtgcaaaaaaatccaataaaatggcagatgaaaatccaaaaatatcaataattacattaaacattaatgaactaaacactccaaaaaaagtcagattgtaagaataaatttaaaagcaagactcaactacatgctgcctacaagagatgcactttaaaaataaatgaacagataaaagtaaattaatggaaatatatatactaggcaaactaaaaaataaggtggccagggatattttcatatcagataaaataagctttcaagatagaaagtaacattaaagaaggacacttcaaaatgataaatggatcatcttatcaagaagacataacaatcatcaatgtggcatgtgcctaataataagctacaaccaaataaagcaaacatttacagaattaaaagaaacagacaattctgcaatcatagcaggagattttagcacccatcttccaaaaatttatagaatgcttagacaaaaatcagtaaagacatagtgatccaaaccatactttcaaccaccttaaactacaactgtagaatatacatttttcaggtgtacatgatattttcatcaagatagaccatatgctggatctcaacagttttaataaatgtaaaaagactgaaaaaataatactcagcactctgtggaacctgaaatgagatcaggtgatttagttttgttctctgctatatctgttgattagttaaggttctccagagaaatacgtgaatgtgtgtgtaggtgtgtgtgtgtgtgcatacacatacataaacatatataatatctatcatataccatcatatataccacatacatatgtaaaatatacttattatatatatatatatatatgtgagttttattttaaggaattagctcatgcaatggtgaagactggcaaattagaaatctgtgggacaaattaacagaatgaaaactcaagtagaagtttcaagctgtagttttgaagcagaatttcttctctgggaaacctgtttttgctcttaacattgtcaactgataaacgaaattatcaagtataatctcctttacttgaagtaaactgaacatagatatcaactacatatacaaaatactttcacgagaatacttagattagtatttcagtaagtagtcgggtaccatagcctagccaattgacacatgaaattaattcatcaaaatctccaaagccaataacattgactgatagttttcaaaaacatttgttgactaataaatagataattatgagatcacaagaccaaaatatgaaggcataaaaccaccttagagactatctgtgtcagaattctaaagctcagagattctccatgctgcatcccccataccatctatatctaaggctggggtgtaaagtaagaaatggttttcaacaagcatgctagggccaccacaactaatcccactgccctgcaagcatctccagatgattttgatgcagttggtccacaggtcacagcctgaaaaactctaag

SEQ ID NO: 3339 - DNA, 2300 bp, Homo sapien
atacatatttaacaggttataggaggagctgtgactgttcacaaaggaggtcctcacacatggataatgaactaatgtgcgtgtaacacatgacccatgttcaccttggggtggagacttatcctttaagtgtattacagttaggccctatgcgtcaaaagatcttttcgggacacagaagcactgaagtggggagcctctgtaaactggccagacccagttcatggttggtggtcttcttatctggagaaagttactgatatcagtcttgtccaatcaaagctgtggtcatggctgatggaacggaggctcatttagtcagcatttgtgaatggaatgagttgtaattgttctaacattgctcatcttgaggccagtgcttgttgagctgccagagaaaaaaaaccttgtggccgtgagaacgcagttttttcttaaggtgtaggggtgcgggacttaaccattgcctggcagggctttaggttctgtgtatagtttggtatcttatggccaccaagagtcttttctgttagtcttaagatctctgttttaacattaatgctggtcagttgtgtctaaactgcaaaagagagggggtataatgaggggtgtctcacctcccatcctgtcatggctgggaactcagtttttaaggtttttctggggtccccttggccaaaagggagtctgttaagtcaatggaggagcttaggattttatttttagggtacactagtgaagaaaaaaacaaacaaacaaaattctgtaaacagcaatgaggatgttacaatcactgtgttttacttgtcatcatgttactggaagccgcattagacagctcgtccttgtgactgctttccaaagaagacataagcaggaatgtttctggtgtgatcagtatgcaaatgccgcatttcaggtctgacttctttacctttgttccacgtccttagaaaacactttctaccaggacttttctggatgtcaaggctactctgaagcccctgggtaccgctcagctctgtggctgacacctgagcagacctgcctgctccagcccagcccacagcagccctttcccctccagccgggctcctacccagcaggagggggtgcagggcagacagggacaccgaggcctttttactcagttcctgagacccatctaccagggactggcagcagcgtggcagtgacagaggccactggaggaacagtctgggaggaaatgctgcagacacacctgggccctggtaagacctggccgctagggtggccacattgaatgtagggtctgggtggggaggaagcaggaaagggaggtggtgggaccagtcagaggaggtagggttggagctgggaaagacacagatgcgtggatgtgtgcccgttacggagggcctgctagttttcagccactgtattggtgctttgcatacatctgaaggagattgctatcttccagcccagtccatctctccactgggtacagcagggcaaatggagccactcctgccatccaaatgattacatagtttctaggagagagattacagggtggaaaaatataggccaagttctctttctccaatcatcctgcactcaagagcttactatcaggctctccagcagaaacccatgtttctgtcttggtcccgagtttcttcaggcccatcagaccttcgacaacaagggctgagtatgggtaagcaatgctgagtgatgccagggagatggtggaagccatctagaatgattagctcttagaccttccaggattaggtcctgtccaagatggaggctcagatggagaggagtggtggaggatccctgtgacctagcttgatgttgctctgatttccaagattcctgaagagtggctttggaagtagaggatgagttgaacagcatgtcctggggtggctgggattgagatgagctacgtgagcattctttgtatttgctgtgattggcttgggcttatgggctccgagcttctgctgcagttaagaaagctgattgtgtcccagttacccttcttcaggatagatgggaaaagcacaacttccaattgctatttccatttctgtttgtgatgcaggagagaacacagtgtctcaagaaacttcccagcctcctgatggccaagaggtcatttccaaaccacaggtgagagcgcacagcataaaagatgccactgcccactcaaatgcttctggtttttaccagttgccttggtttcccagccacatgcaagctcctcctcagtgttgcagcagctttctcttccacatctcgcc

SEQ ID NO: 3340 - DNA, 2300 bp, Homo sapien
tgaggccaaatgggctgtgggaggaggagtggggtttaggggtctgtgactcacgctatgaaaggctcattcatttagtcccatgtggcttctcccctctgacccccgaggccactcttccatctgtctcccatcccacccagatgatggctccccatacgggtgtgctccgtgattgggtcttgttctcttcctcccgcagctgggaaggggcttgtggaggcagctcacttctgctatctcatggctcacgtgccctttggccactacaccgtgaagacagaccatctggtcttgctgggcagcagccacaggtatgcgacctgggagaaaggaaacagtaaggacattttccaagggactgttttagcccttgttgggttttatggatccatttttcattttctcatgtgaatttcagctaccgccggctcccttatttgggattgttatctgtgcaggtctgtgcaaggagatgccccgtgggccccacattacagcattggcgggggcctcaggccacaggtcctcctctgcaaagaggtgggctgatgcctttgtgtggtattgtgccctttggccactgggtggcaccctggctccacaagctaactttgttcctttaaaaaaacaacattttacatgtggaggcttgtgggtccgtgttaggcagccctgggcctgttctgagagcctacccaggcaaaactggaaaatggaagaagtttatgtttagtccctctttggggccctagcatccctacaatgacttggtgcacaagctacttagagtcccactggtgacattctctgttggccatagcattaggcttttcctgcaggaggccctcaatcagctctcagtgaatgaatgcatggacagaacgatttgctccctagaggccctccctgttctgtatctctctatccccctccccatacgtgttaagagtcactaagctcttacgttgtgccaggcattttctttgcactatttcctttaattattacacatttaccctatgaagaagtgaagtgaagcaaagattttaatcgtcacttatggaggaggaaaaccaaggcacagggagatgaaataacttgtctcagatggtacagtgagggtgtgggtgagttggattcggaatccaggcagtcagcctgcaaagcccttttaactgttgcaccacactgcctaccactgaggcagtgtacccagctcattgcctgttccttccaggttcctggtctctgatagcacatggctagcttgtcaaagaatcccttctgtgccaaatgtacaataagtgtgtatgggctaatatgtctcccctcctatgtttacgttggtttatgttgaatgaggaaattcttggaaataaagtcctacccccaggaataacctggtgattgtggtttttaaacaccatagcaagttgttgatgggagaaattttgggtcacatgagactcttgtgcccaccacctgccccaaccagatcacattcactcagtccccatcctcactggtggaatgaacatccaatgtatggacccgtgtttgatttctggctcagcagtcctcacctgctctgccatgccttttggtctcagtgctcccggagtgttacatggctcccctcttttgtgcgagtttgctcaaactaggggtgcccttcacaggtacatgacaggctttatgggcatgggggccagctctctgtgtgtctaagagtagggcccagtgtccttcgaggtagcctgccttgagttacccttcagcaagaaggcaggtgaccccccttttctgcagcctccgcctcccagtgcctctggtgcagagttctgttttgttccttcctcagcctcaaggagggagagggagaggaagtgaaacactcactctgggagcccagagtctccttcttctcttgaagccgccgcaggcatcagcccaggatggaaactcccccatgaaaggctgcagctggtgtttggagagccactaggatttaactcctgcgtcccccacacctcaatctcttttattgttattctctggttttagtcaagagtttttgaaatttgcaacaactgaggcaatccagaggacggaaatcttcgagtactgtcagatgctgggccgccccaaatccttcatcccttctttccaggtaactgagcccagatgaggccaccaccgtcactgtcaggcagctgcaggcagctgtatttgcagctttgctttttggcacttagtacctggggctaagttatctactgaacttttcctcattagct

SEQ ID NO: 3341 - DNA, 2300 bp, Homo sapien
cattcatttcctgttatctaccatctatttcctgagctctagtaactcagattatgctcttgcttcatagatgcaattgcttcattattttacttaaattcatgacaaaatgtttggtgataatttttcatttgttttgtggtaacatttttgtagtgaatgttctctctcctctctatttttcatgttaccttcctctttctgtcttagggtgtatttgtatacattctgtgcttgttttctcatattacataactttaaaggagttgactcttccctggatttttatttccagttatttatattaggtttgtgcagaggatgggccaggccatattccaggccatccgacattttctgcaggacccagttttccatgtgagcctgagttgcctttgctgctctccagccagtggggagagctgtggggtcctctccctcgtgtcctcttggcttcccgggacatggaggcacgtctgtccaatctccattacttttggtaatggagccttttctcgtatcttgaggcttgggtttttggtgaacactagtttaaataaaaatcgacctcacacttttcattttttttttttatccttcttatggcttgtggctaattccaagaaaagagaaatgattttcatgccccatcatcaaatcaaccggctattttgtagcacagagtgtgcctcacaattcagtggaatggcctgtgctccagaatggaattgcattatgtcacaaagtactaaatgcaggaaatgatacaattagctatggttcattttttttttttgtaatagtagagttagcttaatttcccctatttttagatgagaaaacggaggagccagaggtgatgtgccaatgcagtatttgatcttagggagtttcccagcactttagcatctactaaaaggctggacttcagttccatgtgatgaatggggtggtggaaaagcatggcaacaggacaacacagacgtgggtttcacacaagtttaacctggactctatgtacatctttctgccaggggaacttggctttgtgtcttaatttcacagagcctcagtttttaatctttatggggattttggtgcccagtagagttattgtgaaaattaagggagagagaacatctgaacatatcaaccatcatgcttggcccattttcgttaattaataaatgttggtgctttctctctctctctctctctctactgtgtcccctccgcctctccattgatctgatttatagtgatcttttcaaatcaccagcgaggagacagaataatgacctctaagtttttctttgtgtgtgtgtgtgtgtgtgtgtgtgtgtgtgtgtgtgtgtgtgtgtttagcaagggatttccttcccttttgctggtttctgtagatccagcaagaagcagtttggcttacatgttaaaatgcaggtcataataggacttagcacatgtgattattggtaggagaaatgcttagcacaggatatagttcatggttcgatgtgacacatgagaactgctattattatgatttatcatcaccattattgttatcatcctcttctcactgcattgaccagatcaacaaggactgggtataaaatggagttgaataaagcatcttttattccctgggataattacaaagaccaagtaattatgaatggttttaactccaaatcttagttattattggcaatcttctgccctacctatctatataacaaattggaaggtaggcggctatgcaaatcacctctttcctctgctgagcttccaactgtgtgtgtgtgtgtgtgtgtgtgtgtgtatttatacctacatgtaattgattaagtgcaaaccaaatgtgaagcaccatgcgatgtgctttacacaactatcttattttattatcaacaataacctgttaggtagaaattacgatctccattttagggatgagaaaacaaaggttcagagacattaagaaacttgctcaaggtaggtaagctagtaagatgcaggactcgagttggggcctgtgttgtttccatgacattatattgtttctttattgatattttctgccttgaaattctcctttatttagtaggacagccttagggagagattgtggggaaaacaccattgatgcggggctttgtacatttccaccacgctgcttactcttttttgccccctggtggaattctgctgcctctgcatcgtcctagctgggccacttggcttgattttcttattcttaaagtggcagtaggaactagacttcatagggttcctgtgaa

SEQ ID NO: 3342 - DNA, 2300 bp, Homo sapien
agtaagagtttggggttcaaatcagtatgctgctaaacaggttctctgaaataaaccagcaacccaccaacaaccttgctttgtagcagttgccaatttctgtggtgtaaatactcccaccatggtggatttcaagttttccatggtttaacaaccggctcacacaattcctgaatatttaataatcagctcttactaaacttgcactggtgtgcaaggcagctagagcacaccagtgtaattttcactgaacttctaggtaactttgtgatcttgggtaaatcatttcacttgtttggatcttggttttatcatcaaaaaagcatagttgctaaaataacctctaaggtccttttcaaagttaacattcccataatgcagctggtgttacagggcaagactaatgtcacattatatgccaaaagagtgacatcaagaacttttgtgaatgttgttgtgatatatcagaacatataatttgatatcacgtcagtgtaatcatcacccacattctgattcctgctgttaatgtgcatgttcttctctagttcctcttcccagaaggattaaaaacaacagtgcagccattagagagccaaacttcacagcccaagagtgaggtaagaaaccattagtggctaggcatggtggcttacgcctgtaatcccagcactttgggaggctcaggcaggtggatcacaaggtcaggagtttgagaccagcctggccaacatgatgaaaccccttctttactaaaaatacaaaaattagccaggggtggtggcacgcacctgtaatcccagctactcgggaggctgaggcaggagaattgcttgaacctgggaggtagaggttgcagtgagctgagattgtaccattaaactccatctctgggcgacagagaaagactctgtcttggaaaaaaaaaaaaagaaaccattagctacagtcagagaattctatgctcagttgctgggttctagagtcagctgaggggctgagagaaaatcttgtagcttaggtacatgaccctatatgaccatgagacccaagaggggtggttttccctggactagtaaggacagacatgagagactaatttgtgtcttttatatttatgtgtgtcaaatcctggcccttaataggaacacagtaagcatttgttgagagaaagaataaaccatttgggattttttaaaagagcaaattcagaattttaaaatattaattcagaagtagtcatgtgcttttctgcgtttaccttaataatgcagaagaaatgtatatttcaagtgcgagaaactactttcttgttataatggaaaactttttagtgccttcagttcagtactggggatataaatctgccttccagctagatgacagaatttattacataaccagaacccaatggtgagaaatatacataagaaaaacccacactgggcaaaccaggtgtttgctcccaccagtgagcgtgtccccttccccatgtgcctcaaccagtggaattaacttgtctctttgggaaggaaaagataatattgatctgcagggcatacttacctatatatcatgtgctgctttaccaacatttcagccccgtaatgaccctcataagctaagcattgccattcccattttaaagaaaaagaaactgaaactcggagaggttaagtaacagaaccagctagtggtagagccccgagttaacaccccaaaggtggtgcttttctcgccagaccaggctgccttggggcttctggacttcctcttcctgatgtctctcttccgtgattgctgtgggaatttggatgatttctcatgtgagtgaacctggctcagcccatgctcaggcaaacagaagcgccagtctctgacagggttctgagcaaattcgtcaagtcaggcgggtcctgggctgcggtatctgggctgtactttgccctaatgaatcagctccatggaggttgggcagttgcaaaggtaactgacatgatgtagatctgagggcctggggagtcttggtagatgtggcacctggactttgacagtctccaagaggagaggaggcactcttgggccaggtccctggagcagcgctgaaggaaggtgggaagccatcagagcaggtgtgtgggaacactcgctcccttctttcccctctttgagctggacgtgctgtgccgtcagattaggaaaggcaagattgcctttactggggctaggaaaggtcatctacatgaatgtgtgagtctgatttgtcatcatagatgtaattccttcattttgagaatcga

SEQ ID NO: 3343 - DNA, 2300 bp, Homo sapien
atgataaatcctaaaccctttggagtggtgagatcccatcacaatctagttaattttgtgacccatataactgttgtatgccatatgtctatatagaataattaaagctaattagaattaattttggttggtgagtgtttgaagagtttcataataactctagagataattagagatactttgggatgtcacaaaataagcatttagaataatttgactagatgtttaagccagggttgtgcaatgaaggctagtaacagaatgacaattctataattgcaagaatgctgaatcaggaagtaagagtttggggttcaaatcagtatgctgctaaacaggttctctgaaataaaccagcaacccaccaacaaccttgctttgtagcagttgccaatttctgtggtgtaaatactcccaccatggtggatttcaagttttccatggtttaacaaccggctcacacaattcctgaatatttaataatcagctcttactaaacttgcactggtgtgcaaggcagctagagcacaccagtgtaattttcactgaacttctaggtaactttgtgatcttgggtaaatcatttcacttgtttggatcttggttttatcatcaaaaaagcatagttgctaaaataacctctaaggtccttttcaaagttaacattcccataatgcagctggtgttacagggcaagactaatgtcacattatatgccaaaagagtgacatcaagaacttttgtgaatgttgttgtgatatatcagaacatataatttgatatcacgtcagtgtaatcatcacccacattctgattcctgctgttaatgtgcatgttcttctctagttcctcttcccagaaggattaaaaacaacagtgcagccattagagagccaaacttcacagcccaagagtgaggtaagaaaccattagtggctaggcatggtggcttacgcctgtaatcccagcactttgggaggctcaggcaggtggatcacaaggtcaggagtttgagaccagcctggccaacatgatgaaaccccttctttactaaaaatacaaaaattagccaggggtggtggcacgcacctgtaatcccagctactcgggaggctgaggcaggagaattgcttgaacctgggaggtagaggttgcagtgagctgagattgtaccattaaactccatctctgggcgacagagaaagactctgtcttggaaaaaaaaaaaaagaaaccattagctacagtcagagaattctatgctcagttgctgggttctagagtcagctgaggggctgagagaaaatcttgtagcttaggtacatgaccctatatgaccatgagacccaagaggggtggttttccctggactagtaaggacagacatgagagactaatttgtgtcttttatatttatgtgtgtcaaatcctggcccttaataggaacacagtaagcatttgttgagagaaagaataaaccatttgggattttttaaaagagcaaattcagaattttaaaatattaattcagaagtagtcatgtgcttttctgcgtttaccttaataatgcagaagaaatgtatatttcaagtgcgagaaactactttcttgttataatggaaaactttttagtgccttcagttcagtactggggatataaatctgccttccagctagatgacagaatttattacataaccagaacccaatggtgagaaatatacataagaaaaacccacactgggcaaaccaggtgtttgctcccaccagtgagcgtgtccccttccccatgtgcctcaaccagtggaattaacttgtctctttgggaaggaaaagataatattgatctgcagggcatacttacctatatatcatgtgctgctttaccaacatttcagccccgtaatgaccctcataagctaagcattgccattcccattttaaagaaaaagaaactgaaactcggagaggttaagtaacagaaccagctagtggtagagccccgagttaacaccccaaaggtggtgcttttctcgccagaccaggctgccttggggcttctggacttcctcttcctgatgtctctcttccgtgattgctgtgggaatttggatgatttctcatgtgagtgaacctggctcagcccatgctcaggcaaacagaagcgccagtctctgacagggttctgagcaaattcgtcaagtcaggcgggtcctgggctgcggtatctgggctgtactttgccctaatgaatcagctccatggaggttgggcagttgcaaaggtaactgacatgatgt

SEQ ID NO: 3344 - DNA, 2300 bp, Homo sapien
agcagtgagcaaggctccgtgggcgtgggatccactgagccaggcacaggagagaatctccttgtctgctggttgctaagaccttgggaaaaatgcaatatttgggcggcagtgtcccgtttttctaggtacagtctgttacggcttcctttggttaggaaagggaaatcccccgaccccttgtgcttcctgggtgaggtgatgccctgccctgctttggcttgccctctgtggactgcatccactgtccgaccagtcccagtgagatgaaccaggtacctcagttggaaatgcagaaatcacctgtcttctgcatcaatcacgctgggagctgcagactggagctgttcctatttggccaccttggaacagctcctaaaaagttattttggaaacagttgtacaattcagaaattttacccaaatcaggactcttccctatttaacattgagaacttcctccattccagggtaataaatacccaatacatatgtgccttctgcttcacacttgtatgtacttcatacacagccattaaggtgagtgaaaacttgaattttctataattttccccattaaaaaaagcttctgttgtctatataattaagataatttaacatccaagtacattcatatgcctcacataattttctttttttgagacaaggtcttactctgtcacccaggctggagtgaagtggtgtgatcttgactcactgaattcttgacctcatgcctctcaacctcagccccccaggtagctgggagtacaggtgcacgccatcgcacagggctaatttttataattttagtagagatggggtttcaccatgttgcccaggctgatctcaaactcctgggctcaagcgatctgcctggctcagcctcccaaaatgctgggattacaggcatgaaccaccttgcccagctcacttcattttaattcaaaaaagtggctgagaaatacatagtgacctctcttatgttctaattatgtaagatgcattggttatttggtcattgatcaataagtgcttatttcccagtttttggctggtgctaaaatgcagggattggttgatcaattctaagtctcctcttttctgcaatcggtagtttttaaaataatttctgaatcacccctggaggcactatctgagacagtatggattgaacagcactgtcaacaacatgttctggggtccctgcctctgtagaaaggacgtgaagagttgacctgcctctgagaacaatctcaaaagagggaagggctgtgtgaggtctgggctggaagaggattttacattgtctcttttgcgtggcttgtcttttccagataagcagaagacatctttaggattcttttgtgtgtttggaacagagagaggaaaaacccagatccatttaagattcagcagagggcttggaagcctaagagttcaggcaagttaccacttgtcagtgattcttacctaataaagacagctttattatttcttctgattatataaatagtcttctttgatacctacatactcataaataaactgaaataattctgtatatgcatatataatggcatgtgggataatataccttttcactcaataatatgtcatagaaacccttccaagtcaactggcatagctttattatttgttattaggtatcctaatgcttcacaacataaatatctcattatttatccaactatttctttattcatgagcattcacatcttcacttttttgctactccaaactaacaattttataatgaactaacatctgttatgctgagttcctaattttcactttttcaatgtctaatcccgatggaattttttcccaattattaacttgctgccctgattgtttaggaattcaatgtaacagttaggttctctttggaactctcatttagaaatacaaaggggagtgtgtggtttctgtaatgtcagagagtggcctcttttttcagaccttctcaatatggtggtcagatcatgtttccagcctcaggagctgcctattaagccattccgatgggaaactgctgctgaagcagaaaggttctgggcagctgacgtggcaacacagtttacagtatctgccagctgtgagtaacagcaggctgtcatgatgggatatagcagaagcagcagcagcaactcctgatttaggggcaatcgatgtaagtacttattttcaccattaaccaattaacccaaaccaaatgcaaattgaagaatgctaagagggaatacagttctcactaaagacccttctagcagactcat

SEQ ID NO: 3345 - DNA, 2300 bp, Homo sapien
agtcctcctccctcagcctcctgagtagctgggtgtattagtctgttcttacactgctaataaagacatacctgagaatgggtaatttataaaggaaaaaggtttaattgactcgctgttcagcatggctggggagacctcaggaaactcacaatcatggtggaaagggaagcaaacacgtccttcttcacatggcagcagcaaggagaagtgctggagaaagccccttataaaaccatcagatcttttgagaacctactcactatcacgagaacagcatgaaggtaactgcccccttgattaaattacctcccactgggtccctcccacgacatgtgaggattatgggaactacaattcaatatgagatttggatggggacacagcaaaaccatatcactgggactacaggcatgtgccacaatgcctggctaatttttttttttttttttttttgagatggagtctctctctgccacccaggcttaagtgcagtggcactatctctgctcactgcaagctccgcctcccgagttcacgccattctcctgcctcagcctcccaagtagctgggactataggcgcccaccaccacgcccgactaatttttttgtaattttagtagagatggggtttcatcgtgttctggctaatatttttattttttgtagagacaaggtctcactatgttgcccaggctggtcttggcctcctgggctcacatgatcctcttgccttggcctccaaaggtgcttggattataggtttaagccactgcacctggctcaacagcctggattttaagtgggcccccttataaaattgtctagttcctttggttccctaatactttgcttatggtatatatatatatatatgtgtatatatatatatatgtgtgtgtgtgtgtgtgtgtatatatatatatattttttttttttttactgagaagcccaaagtaataaatgatggttcactcctgccagtctgcaaggtcaagaggactgcccagctgtggatttaatacatgttggtttttttaatgttggtaaaatatactataacctaatatttatcattttaatgatttgtaagtgtgcaattcactggcattaaatacagtcataatgttgcataatcatccccaacaaaaactctgtgcttgttaaatattaactgcctctttccccttccccaacccctggtaacctctgtcctactttctgtctctgtgaatgaatgtacattgctctttttttcattttactttttttattgtggtaaaaaacagataacataaagtttaccatcttaaccattttcaagtgtacagttcagtagtgttaattatattcacattgttatgtgacagatctcaagaactttttcatcttgtaaacctgaaactctatagccattaaacagcgactctcctttcctccctttccctagcccttggtaaccaccattcactttctgtttctacgaatttgactactttagatatctcatataagtggaatcgtacagtatttgcctttttgtgtttggcttatttcacttagcataatgttctcaaggatcatccatgttattgcatgtgacaggatttccttcctttttaaggcagaatagtatttcattatatgtatatatcacattttgtttatcatttttctgttgatggacacttggactgcttctacctcttggctattgtgaatagtgctgctgtgaatatggctgtgcaaatatctctttgagaccttgctttcaattcttttagatatatatcagaagtggaattgctgaacctatttttcattttttgaggaaccttcatactgttttctatagtagttgcactgttttataatcccaccaacagtgcacaggtgcttaaacttcttcacatcctcgccatttgtcacttgttattttacgagactagccttcctaatgggtgtgaatgtatgttgcttttttatcatttctttttcttcttctctttctcctcagcctggcatgggagggcaggattgtggtggtgggatttgctggaggaaacattgcttctgaaccagccaaccttctgctcctgaagaatatctctgctatgggcctgtactgtggtcaatacaaagatatgaactttcccgtcttctccaagagcctatcttcagtgcttcagtactgccagcaagggtgcatccagctatatgtcagaatggttttcaagctggacgaggtgagacacacttaagggatgtgatgcagatgaggccaggaaataacttgtg

SEQ ID NO: 3346 - DNA, 2300 bp, Homo sapien
tgatgataacattagtatttctccattattcctggtttgattttatatgtctaatgattaacagttcacaaagtgctttattgtctcattggaaacacaagttttttcaacttctcagcttctagtcattgttctagtcttcctcttgtgggaagggggagaggactaaaatgacttctcaaattccttgtgagtgctattaaaataacagtaagctctgttgtatatccaaggtgaggaccttgctcttgtactccttttccccagagcctttaggctataatctcagaagttcattcctacttcatttttgctctccattttccctttattccattcctgatcatgccttccaggtcatgctctatctgggaattctgtttctgtcaaaaaatagaaggaatttagaacttagggattattctgcccgatgtgttcattttacagaggagttcactgagacagagagccaagaaatgtcaatgttaaacccgcaaataagtgggagagctgggcttgaacctgagactactcttctgccagatgtcttttaaagacatcaggctgtctttaaaagttacctgtcaaacgaaatattctctccaacataatgtgtgcttctcttatatagctagcctataaatatttggttactgttgcaatagagatctacccaattttataatatttcacagattatattgtatattttcaattcttccagagtgtgcttattcgcctagtgtgaatggtctgtgttggtcttcgagtcaacaatcatttattgagcatctactatgtgccaagcataatactggcattggggacatgagaaccaatgctcttccactctccccgtggtgggttttggtctgattttaactggaagtattatttggatttgtgtaggctcattcaacattggatcattagtaactctttggatttagtgtaaatggtcctgcaaatgtgagaaaattagtaacaagaattgaactctaacaaggtgttcaaatgctgactttaaagccttcacctaggcaggtgtggtggctcacacttgtaatcctagcactttggaaggctgaggcgggcagggcgcttgaggccaggagttcgagaccagcctgggcaaaatgatgaaacccgtctttaaaaaaatacaaaaattagccagatatggtggcgcacaactatagtaccagctacatgggaggctgaggcgggaggatggtttgaccctaagtggcggaggttgcagtgagccgaaatagtgccactacactccagcctgggtgacagagaaggacactgtctcaaaaataaatacataaataaagcctttacctgtgcatttaggattttttgcactggcagaggacccaataacctttatctatgtatcatctgtctgtctgtctatctatctaatcgatagagaaggtctcactctgtcactcagggtggtgcgatcatagttcaccgcagcctccaactcctgcactcaagcgaccctcccgcctcagcctcctgagtagctgagaccacagacactggccaccacccgccttggcctccaaaagtgctgggattacaggcgttaaccacccagccaagaaccactatttaaatgtcgccaagtgtggtttaaaaagtttcccaattttgaggggggcaagggttgaaaaactattaggtactatgttcagcaccgaagtgacgagatgattcgtaccctgaaccttagcatcacacaatatacccaggtcacatctgcacatgtagcccctgaatctaaaataaaagttgaaactacaaaaaaaaaaagtctcccaaatttgttataaaaatgccaaagaaggttaatctcgggtaatcgaattccgtttcctggtgttttcctttattctttttttcttccagccggctccacctccagagaggcccaacagggagctcgcgcggtcgtttggtctcggcggccgtagaagccgggcgcactggaccggagctgccccgccggggttgggtcgtggctgccagggcgcgtcgccaggaggcctcgcgggccgcccttccgctctcccggggctgggcggcgctgtccggctcttcctgccgcgctctggccactccccctcgcccctcgctgggcttggccttggcggccgtgctctgcaggcagtgcctccctcgggcgtgggtctgcaggtgcaaccccgactcctccctgagccccgcaaggcagtcccagggtgctcccggcggggctgcccgactgacccttcccttgttttgtg

SEQ ID NO: 3347 - DNA, 2300 bp, Homo sapien
ctatgcagccataaaaaagaatgagttcatgtcatttgcagggacatggatgaagctgggagccatcattctaagcaaagtaacacaacagaaaaccaaactctgcatattctcacttataagtgggagttgaacgatgagaacacatggacacagggagggtaatatcacatactggggcctgtcggggcgtgggggaaaggggagggagagcattaggacaaatatctaatgaatgcagggcttaaaacctagatgacgggttgatagatgcagtaaaccaccatgtttactgtaaccaccatgttacataggtatacataggcacatgtatacctatgtaacaaacctgcatgttctgcacatgtatcccagaacttaaagttaaaaaaaaaatagtaggattactaaaaaagcaggattactggcggttggcagaggccttttcttgagctcaggaatggatgatgccactgaaagagcagatgtggaaataaattctggaaatgtttcgcataccacttgtaatgctgtttttaagataattgcttgggtaaataaattccttatacattgactagtaaagagatactcaactttgtacatttgatgccatattcacttgctgtctaacttatgttaccatggcattaatttagtataaataaaaatgctctaggtctactcagtgctgagccttgaaatctcagcactcaacatctcttatccactaaagcacacactgttgtttacacgtggaagactgactatgcagccagtctagtaagcaagcaagcaagcaagcaagcagggtcctagatattaaaaatgaccattcctgtaaaccatcaagccacaaatcaacaagcttaatcacaaaagtttcttgagggaacaaagttgaagtaatatccattgagtcattgtggaactatctgtacttgtggttgattagccaggtaagctggtttttcctcagtttcctcacctgttaaacaagaggcagaatgatgttctctctaaaacacttcttgctttgaaatactattactctaaataagactttggagaaactcacaaaatacatccttgttaactctcaataagcccaaacaatattccaggaccccacaaaaccagaaaactaacaggaccccttgtagaccagtctctttgtgcaacgtagggagaaagggcgggggggactaaagaacctcccaaaaggtattaaaaatagcaacatgtaattatgaaaaatcttgttccacattaggtagccacattcaagaaaaactgttggagatctactatgtccaaggcacggtttaagttattactgttcaattttgaaattattattgttaacttgtcagtaatttcttaaacctaaactggtgaaactctccttgggtggacataaaagtaaagccatggccaaggagggagacagtctacaaataaaccaaaaataaaatacaagtgacatcattaaaggaaaaaagccaacacactgcacaaagatcaaagacaaaacagagaaacatgtttggttaatactgggctttgagtatttcatgtgcctgagaggcccgtccgtccatccacaccacacttcttcaccatgctgttgcaaaccaatgacaagttcagcttcagcgcggacagggcgcagggcgcagaccctgtgcatatcccagaatcccggacccactgccactccactctgggaaggaagaaggcgctcccccttgggtgactgtaagataaagcagcttcttcgatctctttgtccaataagaaagaaacgttggcccataaagaaagaaagaaacaaataaataggaaaggtgtgagaaggaagggaagctcctttcttttctgtttaaatttcccgcacccttttacctccccgccttctcaaacggtctttactttgagcagcagagacccggaccgctcaatacccggctatccctgggagggtacttggaaagtaggcgggacaggccggatgaataattcggtgtccgacttttcctgcctgcggcgcagtccctccccggcttcgttactcgagtgcacacgcggccgggctctcggccctcgattgcttcagcctatcaccctgggatgccgcctgccgctgccgccgccgccgccgccgccaccgccaccgccaccgccaccgccaccgccgtggctgccgggtttgtgggatccgccgcggagcaggagccagagctgtggccggagctgtggcctgagagtcagggggcgggcaggctcattccagaagtggg

SEQ ID NO: 3348 - DNA, 2300 bp, Homo sapien
actatgcagccagtctagtaagcaagcaagcaagcaagcaagcagggtcctagatattaaaaatgaccattcctgtaaaccatcaagccacaaatcaacaagcttaatcacaaaagtttcttgagggaacaaagttgaagtaatatccattgagtcattgtggaactatctgtacttgtggttgattagccaggtaagctggtttttcctcagtttcctcacctgttaaacaagaggcagaatgatgttctctctaaaacacttcttgctttgaaatactattactctaaataagactttggagaaactcacaaaatacatccttgttaactctcaataagcccaaacaatattccaggaccccacaaaaccagaaaactaacaggaccccttgtagaccagtctctttgtgcaacgtagggagaaagggcgggggggactaaagaacctcccaaaaggtattaaaaatagcaacatgtaattatgaaaaatcttgttccacattaggtagccacattcaagaaaaactgttggagatctactatgtccaaggcacggtttaagttattactgttcaattttgaaattattattgttaacttgtcagtaatttcttaaacctaaactggtgaaactctccttgggtggacataaaagtaaagccatggccaaggagggagacagtctacaaataaaccaaaaataaaatacaagtgacatcattaaaggaaaaaagccaacacactgcacaaagatcaaagacaaaacagagaaacatgtttggttaatactgggctttgagtatttcatgtgcctgagaggcccgtccgtccatccacaccacacttcttcaccatgctgttgcaaaccaatgacaagttcagcttcagcgcggacagggcgcagggcgcagaccctgtgcatatcccagaatcccggacccactgccactccactctgggaaggaagaaggcgctcccccttgggtgactgtaagataaagcagcttcttcgatctctttgtccaataagaaagaaacgttggcccataaagaaagaaagaaacaaataaataggaaaggtgtgagaaggaagggaagctcctttcttttctgtttaaatttcccgcacccttttacctccccgccttctcaaacggtctttactttgagcagcagagacccggaccgctcaatacccggctatccctgggagggtacttggaaagtaggcgggacaggccggatgaataattcggtgtccgacttttcctgcctgcggcgcagtccctccccggcttcgttactcgagtgcacacgcggccgggctctcggccctcgattgcttcagcctatcaccctgggatgccgcctgccgctgccgccgccgccgccgccgccaccgccaccgccaccgccaccgccaccgccgtggctgccgggtttgtgggatccgccgcggagcaggagccagagctgtggccggagctgtggcctgagagtcagggggcgggcaggctcattccagaagtgggggccgaggacaggcgggctagaacccggggccaccgccccctacccctcctcaggctgagggaacgggcactcggagcttctgaggcggcggcggcgggagccggtcagagggggcggcccctggcggcgacgcccccaagcccagccctgcccggccccgctccatccccagccagagcctggtctgaccgcgagagacgccggcggggctgaagaaggcggctccgaggaggtgggagggcgagcctcccctcccgggttcttctgcgtcctctcccgggagggacccacacacacctgagcccggacccacccttggtcggggccacgctggatcctcctcccggcctgggtcccgcccgccgactgcaggtgggctgcatcgcccgagcctcgggcagtgggcgacggggaaggaggtgagaggtgtccgcgccggctgccgctcgggtccctgccctcgctgcgcgctctcctcctccccttaccgcaggcagggcgcggagccgcgcgccagcccgccccgaagccgccgcctcgtccccctcccgcctcggggcaccatggagctctctccgtcgtccggaggagccgcggaggcgctgtcctggccggagatgttcccggcgctggagtccgactcgccgctgcccccggaggacctggacgcggttgtcccagtcagtggagccgtcgccggtggcatgttggatcggatccttctggagtccgtgtgccagcaacagagctgggtccgggtgtacg

SEQ ID NO: 3349 - DNA, 2300 bp, Homo sapien
aaagtttttaatctaatttgctgagaacaaactgggtgaccttgcatcgtctcccactcctttgctttaaatcttccggtacgtagagtaacatcaagaaacagccagcaaaatacaaagtggtacacaaatccttaagaactggttataagaagaattcctggatttttatgattaaaagggtcactagtgatgatttaatccaatccactcactttacagatgaggaatcacaagccaaaaatgtgactcgatctgccccaaatcccatagccatttagtggtagaactgagacaagaactgagatctctggactcctagttctatgatctttgcgatggacattaagtcttcaaatcaactgaactacacagaaaaaaacctaagtcttggtcactcttgaatagtaagcatataccctgttcagaaagatgaaagaaaaaaacataaggtacttgatcactacaggcttagatgcacaagactgcaggataacatcttaacattgtgtttgatcccaggtgcttcaaatttgccatcttatactcagccacgttactaatgtcttctgcagtcacgtgagctaggcgataaacatcttgccgtttcaatattttggaaagccacagctcagtcctgaatgccaggctataaatccttaagctatgagttttcaaaaccagcatggttttagtgctgccacaaggctcaccctaatagaatctcatcattcagttttaattaaagaggtggttaccaggaatgcagaaagggaaagttttagtgtgttcatcacttttaacctgctgagtggcaacccagtcactttacaacgagattcagaaacaatagtgtaatctgaaacaatccacacccgttggaataagtggttgcttttagagagagtgaggttcaggcagaggttatagattagtcttgctcccaccaaatacatagtttgcatttttttcattcattagcttatcctctgctttttcataatatcttggtttccagtcttgcctcattcaacaataaaaagagacgaaaatccattcacttggtttcatggagtttttccatcataccttcttgaagattgattgcctggctgttcccttgaagtaatcgcctaagaattacgtcttggatagcccaactcccgcattaaacttactgcaggtgtctgaagaggtccaaagaccatactgagtgacatccctgcccaagtgatagtctgaagaaacttgtcagaaatgcacccccagaacaaaaagggatgtgggaaactgacctagcacggatgaggactgggaatgagcctgtgacttagggaatgaatttcagcccaagcaaaaataggaaacaccagcctctaagacggcctgtggtccttaccgtacacccggacccagctctgttgctggcacacggactccagaaggatccgatccaacatgccaccggcgacggctccactgactgggacaaccgcgtccaggtcctccgggggcagcggcgagtcggactccagcgccgggaacatctccggccaggacagcgcctccgcggctcctccggacgacggagagagctccatggtgccccgaggcgggagggggacgaggcggcggcttcggggcgggctggcgcgcggctccgcgccctgcctgcggtaaggggaggaggagagcgcgcagcgagggcagggacccgagcggcagccggcgcggacacctctcacctccttccccgtcgcccactgcccgaggctcgggcgatgcagcccacctgcagtcggcgggcgggacccaggccgggaggaggatccagcgtggccccgaccaagggtgggtccgggctcaggtgtgtgtgggtccctcccgggagaggacgcagaagaacccgggaggggaggctcgccctcccacctcctcggagccgccttcttcagccccgccggcgtctctcgcggtcagaccaggctctggctggggatggagcggggccgggcagggctgggcttgggggcgtcgccgccaggggccgccccctctgaccggctcccgccgccgccgcctcagaagctccgagtgcccgttccctcagcctgaggaggggtagggggcggtggccccgggttctagcccgcctgtcctcggcccccacttctggaatgagcctgcccgccccctgactctcaggccacagctccggccacagctctggctcctgctccgcggcggatcccacaaacccggcagccacggcggtggcggtggcggtggcggtggcggtg

SEQ ID NO: 3350 - DNA, 2300 bp, Homo sapien
ccccatctctttaataaaaaaaaaaaaaaaatcaatcaggccatgcacgatggctcacacctgtaatcccagcactctgggaggctgaggcaggtggatcacctgaggtcaggagttcaagaccagcctgaccaacatggtgaaacgctgtctctaataaaagtacaaaaattagccaggcgtggtggcgggcgcctataatcccagctactcaggaggctgaggcaggagactcgcttgcacccaggaggtagaggttgcagtaagccaagatcgcaccactgcattccagcctgggcaacaagaacgaaactgcatctcaaaaaacaaaaaaatgttaatcatagaattacattatctatcaattccattccttgatgtctatatacacaagaaaaaaaaaacttgtgtctgcacaaaaatttgtacaccaaagtttacagtagcattattcttagccaaaatattaactggtgaaaggccaagcaaaatatggtgtattcatacaatggaatactattcaggattaagaaacaaccagtcattgctacaacatggatgaacctcaaaaatatgctcagtgaaagaagccagatacaatagaacacatattgtatgattccgtttatattaagtatccccaaaaagccaatttataaagacagaagtagattagtggttgtctacatctgggggtgaaaataaggacttactataaataggcacaaagtttatttttagagtaatcaaaatgttctgttgaattagattgctgtaatagttgtaaaactgtaactatacctagttcacttaaaaccagtgtattttatgttaaatattatgcacatttcacctcaataaagctaatttttttaaagtcatcttaccaaaaaatgtctaaatcagattaagcttgtggatctaactataaacatagagaacatgcaggggagcaagaggaacatattaatgataccacaaggataaaaccagcaaaatctacactatgggaaactatacaagataatcaaccctgtttctttgacaaaacattacaaaaagggggttgggagagagaaagaatctataaattaagagagatctagaaatataacaactaccaaaatgtatgaaatttatctggatcacattcaaatacattaaactgtaagacaataggggaaataaatatctattggatattagattatttttaagaaatgattactaatttggagggatataataatgatatatagattatcttttagagatatatactgaattatttactgaaataatgtctgagatttgcttcaacataatctgaaagggtgtgactggaaagtaaacaggttcaaacgaaacaagactggccatgagttgaccactgttgaagctgagtaatggttacatgggactcattaaattattttctccacttttgtgtatgtataaaattttctaccgaaaaaggtggcttttttgttttgttttgttttgtttttttgagacagagtctagctctgttgccaggctagagtgcagtggcccaatctcggctcactgcaacctccgcctcccaggctcaagtgattctcctgcctcagcctcccgagtagctgggactacaggtgcccgccaccacgcttggctaattccaggcaccagtctcaagtcctggaggggccacccatacttctgactgaccagctataaatcaggggtctccacaacaacctcttcatattcaataatttgctagaatgactcacaaaacactgtacttatatttacgatttattataagagatacaacccaagaacagtcaaatgaaagagatgcgtagggcaagttaagatggggaagagggacacatagttcccatgccctctccatgtgaaccaccctcccagtacctccacgtgttcaatccagaagttcaccaaacactgctgttttaaggaagagctcctacaggactcaatctccagcctctacttcccccagaggttggtgagtgaaactgaaaatttccaccctctaatcacatggtctgtctggttaccagccatatcctgaggcaattcagtggctccactctaagtcacctcaccagcataaatttaggtgtaatcaaaaggaacttcttatgactaacaaaacactctcctaacactcaggaaactccatgagttcaaggaactctgtgccaggaacagagacaaagaccaaacataaaatttactacacctcagccaggatgttaagttcctctccaggtgggcctttccacagg

SEQ ID NO: 3351 - DNA, 2300 bp, Homo sapien
gaactcagaagtttgaggctagcctggtcaacacagtgagacctcatctctacaaaaaatacaaaaatcagccaggcatggtggtgcgtgcctgtagtcccagctacttgggaagctgaggtgggaggattgcattttttcttttcatcaacatgttcacaacagttttaacaggcattcatgtttaatatcatattaataggccaattaacaagtttttggtttttttttttttttttttttttgagagggaatctcactctgtcgcccaggctggagtgcagtggcgcgatctcagctcacggcaagctctgcctcgcaggttcacgccattctcctgcctcagcctcccgagtagctgagactacaggcgaccgccaccacacctggctaattttttctatttttagtagagatggggttttaccgtgttagccaggatgatctaaatctcctgaccttgtgatccgccagcctcggcctcccaaagtgctgggattacaggcatgagccactgtgcccggccaacaagctattttttaaaaggcagttctttatttttttaataaacaataaaatccttgcccctgacatgcagatttaaaaatatggcatacacatggctatcttctatagacaatttctgatataatagaagaaataatgttagagttgttacgtggagatgattcttaacaatgtcaataactgtaacaggctgggcacagtggctcatgcctgtaaccccagcagtttgggaggctaaggcaggaggatcacttgagcccaggaagtcaaggctgcagtgggccatgatcacaccactgtactctgcctgggcaacagaataacaccttgtctcaaaaaaaaaaacaaaaaaattgtaatgtggttgaggagtagtccacaatatactgcagatttatgctcaaattattttataaatgtattaatgttgtctgcttaagacctagtgtagttcccatcaactaagtcactctctttcattcttaaagtacaaaaggaaaggaaaatccagtcaggtcacttaaagtaaagtttaattttacttattttatcccttcattaccttcccaccctctatattctgtcaaaatgtcagaaaataacatttccagaacaacaaacaaaaattttcttagactgataaccacccaacacacagtacctgtgaactttgctttgtcctgacacacaatgaacatttgggctggcaaattatattatagttcatacaaataaatggcctcagtggatttaaatatggccaccctcgtaccttgatgagtaatatggatactaagtaatcattcaatatgtttaagatatagtcattaggtcagaaatggttgccttcatggaaatacaagtcttaatccttacattaccataaatttactatgagaccacaactatttgccgaaataaatttatattgtgtcttttaaccttagctaaccactttagtttccttgtcaactacaaaggcttaatttccgacctacttgatcactggtgtctagttagtaaatccactatgctcattatcacccttgttaagagaaggagagagcaggaaagagataacatgtgatacttctctctggtgagtaatttcctttagtctaacatttgcagagttctgctgctgcttccctctcagtctcagctgcatcacagttcagcatgaatgttctaactctgctctatcacaggtcagagtgagttatctggtaaaaaagtaataaattccttgaaggcatgacttatttatggcagacaacttgatatttgataaaggtaacacttctctatagaagagctcattttagtttggtgccattacttattttaagaagatggtaaggatggggaacaattcctatgatagttctaccttgcttctcccttccacatcactacaacagtttgcactgtcctgatcacatgtgccgtgaaatgcaaacaaagcagatcatatagttttcttccacttcttaaatatgcacttgaagaaataagtcctgctgggatatcagggcatgcctctatagtcccagctacttgggagctgagatcacttgagctcagaagatcaaagctgtagggtgcatgactgtgctctcaatagccactgcattcaaaccggggcaacacagcacaacccagtctcttaaaagaggtaagtcccttaatttccacattaagccaagtctgcttaagcaactatgtggcctagttaactgaatggagtcttatgaatggtgccagcagtaaga

SEQ ID NO: 3352 - DNA, 2300 bp, Homo sapien
agcttttgggatagagactgaagtgactggtaaaattgtaatcttttcctgcagcatgagtgagttctccaagaagctggagaagcacgagtaaatgcttcactatttagccatgagctcaagctagaaagtggccgaaattcatgtctctgtagtgaatccctcattggttacgaatagcctcatagagtttgatggagttttgaactgttgcattagatcacacaatttgaccactcaactcagcaccaagcctgttcattttggataggtgaggccactttagccattttatttctacaaatagtcactatgttataattatttggtttcacatttctcccctgtataaagagttgggtagggttgtcttgactaatccatcttatgtggtcctggcccagcaccaaacttaataaatgtttgtattaggttgaactgtataaaaatgctgtgtttgtaagtcaaaaaatagtcaaatatcagcaatggtcaagtgaataataagaaaaattcaagcagtgaatgactggttggactagatgattttaaagatctcttccggttctgggatttcatgaccttataattcaaacataaataacatcatcagtcagtttcaatacttagctaccaacttatgaaaccatggtgctcatattgtacacaaacctggcaccctgttcttgtctttcttggaacttatcacagtgatttagctatttttatactagatgactatgtgctcctcattttaatgtgtataatacatatctaatgtgtaagatatataatacatatatacataaatataaatgggtagatagatgatagatacagtgtatgtgtttccatcagctgttaaaaggtagatgatagattaatactgtgtcattttcatgtctcttctgttctactgctttaatgtggcaggtggagtccactgtgattcaaactatgaattttttcattgatcaattctgacatgctaacctcagcaactgagcacctgcataatatgttaggtcatcatattaataatgaagattacatagttgacttgcctttttattgggggaatatagaaaaaaaccctagaaatatgactgattttaaaacaaactaaaatgatgattgagaacagtaatactatctataatttcattgcatctagtagaaaattagctttggaaagccactcagtttataaaattgttttgattattctttatttaaaaaatgaagttctcagttttaatctcaacaggaaatctcttgattacagcagagcagatttttatctgtcaataagttaaaaaaattttgaggaggaaatcaggcatcagcttccaggggtctaataacttcctaacttaatgggacttgcctaacagtagatgaacttttcattttaagactttgcctttagtagtcaacactgtcctcagcacagctacagactatataatacagagtccatacaatacagggcatttctgtatgaataaagtattaaatattttttaaaaataacttttaaaaaatgaagttctagcctaagacctgaattaagggctttagggaaataaaaactttgttccttttctaaattttagatatttccgttatggtaagttaaactgatcggtttaagaaggtagtttaagatagtaatgtatatgtgttaacaggcttctatctctgcgtcagctgtaagatttacctggtttttatactctgaagagtttatatttaaattcaacataataaaacattcaaaataagaatctctgaacttagttttattttagactgcttttgaaaaaatcacttcttaaagtgcacagattcacacatccaccctcccatcctttgtgatagaaaaaatgaaatacttagcttggtaaatcacattgcttctcctgaagtagactgccttcacccagtgctgtgaaagaaagcccagtgagtgagtaaggaagggtggctattgtttagtgctctctagcaaaagaatgggattgggggcggggttggggcgaggattgagtttaactggcattggctctggcttttctgcattccaaactgtctgaggcacgaaatgagagcaaaaagggagagagcaggaaagcgagcacaggcgagtacagtatacaaagtgttttgagtttctgactggcgtgccggaaagatcatgttagcacacccagaaacttcacacgatgcagaccccaggtaagagtttgtagagtctgagaccgaaatgaaaagtcacgtatttaaggggaatgtggctt

SEQ ID NO: 3353 - DNA, 2300 bp, Homo sapien
atcacacccctgcactccagcctgggtgacagagcaagaccctgtctgtctgtctttctctctttctttctaggtatctatatatttgtatatattaggatagccaaaaactcttttagaaacctaatttaggaggacttgctctgtcagctattaaggctctttataaaactatattaattgagacaaagtggtattagtgttagaaatagaccaatggaacagaataaagagtccaaaaacagacctgtgcatatatgtacattttacttatgataaaattgacactgcagagtggtggggaaattaagatcttttcaataaatgatcctggctcatctggagatccatatggaaaaataaagtggaagtggattatttcttaacaatttacataaaaatgaattccatctaaattgtagacctacgtgtaaaacaccaaatagtaataataccacttttagaatatattatagcatcttcatgacctgaggataaagaagtaattattaaatcaaatagaaaaagcaccaattataaagaagaaaaaggtgataatgtttattaatattaataacttctgtttgtcaaaagacactactgaaagtgcaaaaagtcaagctatataaaccaacaaagaaattataccagaatatttcaagcatcccgacaaattgagaaagacaaagcccaatagaaaaatgggcagagacttaataggcacttcacaaaagaatataaccaaatggctgtatacatttaaagaggtgctcagccttatcaaggaatcccaagttaaaaccacaacaatggggccaggcgcggtggctcacgcctgtaatcccagcactttgggaggccgaggcaggtggattacgaggtcaggagttcaagatcagcctggccaggatggcgaaaccccatctctactgaaaatacaaaaaattagccgggatggtggcgggcacctgtaatcccagctacctgggaggctgaggcagagaatcgcttgaacccgggaggcagaggctgcagtgagccgagattgtgccactgcactcctccagcctgggtaacagagcaagactctgtctcaaaaaaaaaaaaaaaaaaacccacaagatacccccacataatctccagattggctaagatttaaaatcagatgatactaaagttgtcaagcatatagagcaatgggaactcctacattgctagtgggagtaaaaacttgtacagtttcattggagaacactttagcattatctaataaaattgaaagtaatgctaacccaacataaatacatgcttatgtacatgaggatgcatgtacaagaataaacaagcatccataatggccccaaaatggatacaacctggaaaaaaatcagtaaaatgagttttaaaaaagtgacatcatcatgtagtaaaatgaacaaactacagtgacacacagcaacattaataaatctttaaaatataatatttagtaaatcaaactaaaaagtatatcttcttatactatttatataaaattcaagaaaaggaaaaagaaaacatgttgagatatgcacatttcagtgctaaaactaaataaaagcaaggaatgtttaccccggaaataggtatagtggttatctatagggtgaaaggaattgggatcaggatggagtatttggggaatcatttgttgcagacaatgttctaattcttgctatggcggtattataattcattaaactctacatttatgttttatgctattctctgtggggcatcatatttcacaataaaataaaggcatatattgaagacatttttatttcatcatatctatacttgttatccttaaaggctgcatcttattccattgtagatttatctgttcccctccttttgaatagttggagtgtttttgttttttgcagttgccaactttgagttaagcatctttgtacatatatctgtgttcatttgcttgtgctggtatttctgtaggattggtttccagaaatagaatcaaaagataatttgcatttcatattttgatagatgctgttaaatagccttgcaaatttgttcagcctgtcttttgctatttgaagcttttaattttttattgttcaatctgtctctcttttccattgtaatttctcgcttttgtgtcatgcttagaaagcctttttcaacttcagtttatgtctttatccggaatttatttttggttatgtgaaatgagattttttttcagccatatagctagttgtttcagtgcttttttttttttcgaatggtcagtt

SEQ ID NO: 3354 - DNA, 2300 bp, Homo sapien
gacttttccaggccccacagtcagttaaatgatggatccggatttgagcctagatctctgacctcaatgcctttaatttttctgtgcaccactttcctttctgtataccacattgtttcctgttctctaagcatttttcctcaaaattatcgcttctcatctcctgtcacgggtatttttaaaagctttcatttatccaaatactaaccactttgatagaaatgctctttctgctgctgatgctgctacttagttttgcaggcattattgttcactttcatgaagtctgttataactagcctgaacctcaagtaataaacacatatttaggaggatctttgaaagatccactcctctttcataaagacctataaaaaaccaagaatacatactgccatctctgataaatatttattgagcacctgtaacattttgggagctattcagaagagtcaagatttgaacatgaataaaacctagtacctaacctctgaaggtattcatcctaggaatgaaacaaacacaaataatgagaaatatgaagtagtcgaagatatacaaggtatggtgtatactagaggataaacaggtaaggtaggaatttgttctttcagggaatagtgggtgtatcttcatagagcataggccgtatgaacacggcttctaaactaaatttatatggaaaagcatatacagattatgtaaggagatctgctatattattgtgcaatgttgaatgactgtctccgttacaagaggtaaacatagaagatagatccttacttgcatccgtgtttggcaccaacattagcacttaaaaccttcactggactattcaatcaagcttgggtcatttgttcttctagaataacaataatagtcacctaagtagagcgagccttaaaacataacaagtttgtactaattaaacatatatttagtttaatacattttttgagtagcatcattaccacttttataaatactgtgatgatgatgttagtgattgctgttattccacttccaggataagaaaaataaacatgatatgtaggatgtggcaactcttgggttccaaagcaatgaggcttcatgggccatcttttgtgccctccctgtcagatctagaaaagaattccccattatacgttttaggacagaaatcataagtccttttattctattcaggaagacactgtttatagctataccgttatcttctctcttcaaataggggagtttatcaaagctttgtatgagtccgatgagaactgtgaagtggatcccagcaaatgttcatctagtgaactgatagaccatcagagcaacctgaaaatgtgctgtgagctggctttctgcaagatcatcaactcttactggtgagcttatcttatcctctgccttacattttttcatgtaaaggtcatcacagtggaacttacattttttcatgtaaaagtcatcacaatgttaacaattattttacaaccaaaggggagggtcttggagaaaaattgaaagtttccctaatacagtcccgtctaaaattgaaatctctattgtaagcagaagtacttttgaactggctatctacataaatataatctctctaatagaatattagtactatagcctctaatatcaaaagtatttcttttgctttctaaaatatttactagtgttgaacagatgtgttcatgaattttgatcattgctctaactccagcaattggcgaaattttggaagatttttgataaacagtctttagagagattatggtgagttatactaaaccagatggtttagtcaggagcctcatgccattttcccactttgcaaaactaaatttaaactaatccagagttctgtagccttgggtttccagtctccatctggcctctgtgaattttccaccgcctctcagccatgaatcaggtaaaacctcatcccggaatttctactaggtcctcctcacagcctgactcttaagcaaaagtatattgggtcagggtggaatcacttgtgcttgtactggtacttctgtgtttagaggttttggtacttctttccttccctagtgttttccctcgtgagttgaaagaagtgtttgcatcatggaagcagcagtgcctgaaccgtggcaagcaagacatcagcgagaggctcatcagtgcctcattatttctccgttttctgtgtccagccattatgtctcccagtcttttcaaccttatgcaggagtatcctgatgaccgcacatctcggactctaactcttattgccaaggtcattcagaacc

SEQ ID NO: 3355 - DNA, 2300 bp, Homo sapien
gcaggaaatcatttttatccaaccactcattcagtcaacatataccgactgcccctccttgccaggcatggcaacccacacttataacagaggatgtggaaacagatttaggttacaagccgaataaacagttcagagcagggagcaggaataaagggaacaagctcctcaccgcagacaccctacctttcagggtgggcaggtgttcctaagagctgcccctccatccaatgggacatggcctgtggctctccagtgtccacaaaatgaacaaagtgcagccgagcttgaggtcctgcggtccttgaggatgatctgaacccacgcagctgatggagccttcggaggacacaggtgctgtccccgtactgccctcagagcacagccctggtctccagttcacagcgcctcccacagggagaggagaaaaccttcctttctctgaagaaatggaaggaagtctagctgagcctcttctatgggtctgggatgaggttgagtgctttatagacacgaggcaggataagcttgttaggtagtaatttgtgtttttttcccagagccctaggcgggagtaggacctcagagaggagcagccatgtgggggtcccagattctcagaacatcctccgtcactggggtggctcatccatggcagagctggctgacctcaagtcaccctaaggactggaaacgggtgtctcagtggtgagcagtgcagacaggcccaaggcaagacccagtctcttgttctttctctacagcctgtgagtatgtgtgcaagagagtgtgtgttgggggaacagccctgaaaaaagaggggctctaatttcttccttgcttggcagggtgagcgctcagagtgaaagctaagttgctttactggttatcaaggcagcagaataactgggattatcatacattggggtaggagtagaaaatgagacacccactctagaaaagaaagtgtttcctgcacactggaatttgtaaagtgcatcatattcatgacaaggaatcctcatgataccgtaatgccattgtcaaatagctatgttgactctcatcttgtagatgaagaatcaaggctcagagaaaatctctcaagctggccgcagggctgtttccactgtgcctgctccgatggttggcaggggtactgcggccacggcacacaactttagcaaaagcactgtgggaaacgcagctcccacattgggaatgcagatctggtggttctgggagaaaaggtgtggattgtaggaaagtgaaagttgtctgtctataaagaagggttctttaagcctgggtaaaaatggcattcccgtgttcggggataggaaaagagtggctgggagtttccctgaaccatttggcttcctgtagctcatgcaaaccaagtgtttgttcctgggccacttaggaagcctgctcctccctcactcttggttcctttgacccttgcctagatttcctggcacagccaccaatgtaactcacacactgggtgccaaggctgtcctcccccgccttcaccatcggccctctgtgtcttgttcaagccatctccttcattcatgtatttaaggtctctatgtaccaggcagagcactgcgtagaagctgcaatctaaagagaataataatagcaaatgctactgtattagtcagggttctctagagggacagaactaacaggatagatgtatatataaaggggagtttattttatttatttatttatttatttattttcgagacggagtcttgctctgacccccaggctggagtgcagaggcgcgatatcggctcactgcaagctccgcctcccaggttcacgccattctcctgcctcagcctcctgagtagctggaactacaggcgcccaccaccacacccggctaattttttgtatttttagtagagacggggtttcactgtgttagccaggatggtctcgatctcctgaccctgtgatccgcccatctcggcctcccaaagtgctgggattacaggcgtgagccaccacgcccggcataaaggggagtttattacggagtatggactcacatgatcacaaggtgaggtccaacaataggccatctgcaagctgaggaaaaaggaggccagtccaaatcccaaagctgaagaactcggagtccgatgttcaagggcaggaagcatcgagcacgggagaacgatgtatgttgaggccaagccagtctagtttttccgtgttcttctgcctgcttttattctggccgcgatggcagctgattagattctgcctacccagattga

SEQ ID NO: 3356 - DNA, 2300 bp, Homo sapien
ttacctagaacaaagtcacaccacagcaataccaacactgcaacactgcttcaacctcgtttctcttgcaggtgcaaaagcttcttaaaagaatatgagaatcattattcagactgggcatggtggctcatgcttgcaatcctagcactctgggaggccgaggtgggaggatcccttgagctcaggagttggagatcagcctgagcaacatagtgagaccttgtctccacaaaaaaattttaaaaattagctgggagtggggtggcgcatgcctgtggtcccagctacacaggatgctgaggcaggagaattgcttgagtccaggggttcgagactgcaatgatccatgatcataccactgcactccagcctgggagaaagagcaagatcctgtctcttcataaataaataatcagtattcaggttcgccacgtggattcccccagccccgccagaatatatcgataaaacaatggtgtacaatgtttgagaacatgaatagtaaacgctgtgagaaggcacaagcccagagctgtggctctgtagttaaaattctgcccaaatgataataccatgtgtacttgtgtatatatacatagataattttttactttataatgcagctttgcattgagaccctgatttctcttagaccttctttcctaatagataggccagtgggctcatgtgctatgcttggctagaaggcagctcatttaacaactgctcagccaagcaagggaagctctactgcaggtccaggaggcccccaagccaaaattagcagaaggaggtggggcacattttcacggggctggtggatgttgagatggagtcagtcattttcactgtaattcccttagaggaagggcattcctaccacgaggccatcagatctgagagggctgaattaaaaggtccaaggaaactgaaaagttccagcccctcatttataagtggggaaagtgaagcctgggaagctggtgaccacccccaactccctctccttccgctgatgcagtggcagacacattctcctctggctatggtggagtaagacccacagctgtcaccagtgtcagggctgggaaatcaccacctaggaaatgcatcagaagtgctgcaggtggctccagaagttccagtggcctccaggaaggatagtcccaagcaggtgtgtgaaatgggagggtaagtgtggtcagtagtggcctgcatggggatgtcattcacatgcaatttgcattagttcctgtactcctgtgctgtctgtcctcagatgtccatgttggccttttctgtgcaactagcagttgaaatgagagggaagaaggaagtgaatgaccagtgataagaggaaaagagaaatcaatttcaccaacccagatccccagtgattttttatcccatggggtgccatgttcctctgactgtctactttagcacaaactatggctacccgcagaatggccttttctttagtattcttcatttgcccgaaaagcttcttatctttagcttcttgtcccaaccctcttcccggatgatagaagaactaggaaaagagaatttttaggtgggcaggggtctgggggtggttgtgggacaggggcagtgtgaggtcagaggcatcagaaaccatcctgctgagactggctaccccacctcatacagagtaacccaggttaagtgagacggtgcatgcacgttgaaccagagagacttcatggcatcctccagcccaaggtggcttccggtccgaggtggggtcggttcgcgcgaggagcgcacagcagaggacatgggctgtgcgctcagaggaggagctggctgtccctggaggacgtccttctgagtcagtaggtgagtcctgctgcagaaggagccactgcttctgacgcgtgccttgcacttcgaccgtagcaggccatgatcctcctcagtgtggactttccttctgttgcaagagggaggcctggtgggactctgaaacctggcctgaacccctcatctcagtggccgaagccccccaggcctgaagctgtggtgacgctctggaccaccatgtgggtcctggcattgtgacctcagctgttccgtacacaaaggggtggtcaccctgccctcaccttgacctgtaagttgcctaggacagtggcctggtcccaggggctgttgtggggagttgaagaacaccctggcctcctccatcatgtcggccaagagggcagaattgaagaaaacacatctggtaaaagagagacattgctggacagtgtgggtcctctctgagctcctac

SEQ ID NO: 3357 - DNA, 2300 bp, Homo sapien
ctgtcctcatccgttcacatgcagcatttaatcccacttcccagccttctgccctcttctcctgtctcctctccatgcttaacacgccagccccagatgctcctccttgccacccagggcctgagtcatacatccatctgctgagctaaatatctctacttggatgtttaaaaggcacctcagcctgaattcattccaactagaactcttgattcacacccccacggaaaaaccccattcctcccccgggctcatctagctcagttcacggcatttctctttctgtaaagccggggaagtgtgcagtggtgaagtgctgggtccaaattccagcttttccatttgctaatggtgggactttatgcaaactgattcaactctctgggcctcgattgcctcttctgtaaaatgtgggaagaactaattcctaattcataggagtgttatgaaatctagacaggttaaactatgtgaagggtttagaggagcgcctggctaaccgtattagccactgtcattctttttcttccagttgctcaggacaaatcctaagaatgatgcttatttctctctttccctcatgcaccacacccaagctcatcagcaattcctgtccattccaccttcagatacagatcacaaatctgacctcctctccccatctctgttgctaccctactcgcctgggccgcatggtcacttgtggtggtctcctaactgctccccttgtgtctaccatggccatcatccccacaccagctctccaggtggcagccagagtgatcttacaaaaccgtaggtcaggtcattgccccctgtcagactcaagcccatcacagcccttgctatgctgacaggcccatcccaccccagcccgctccccccaccacctgcccccctccgccacctcacctgtgccttctgcacgcctctcccaccactccccctccctccctttactctggccactctgaatgtcactggtcctccttgagccctcctgagccctctgcccagagtaatgccagagtggaggccacagctgaaggcagaggctgttggcctggggtggagaggggagattcctctgggtggaaggtgacattgggcagccttggatgaagtgaatacctggtgtggggaagcaaaaataaatagagaaacaaacggattaattttgcttctttccagggacttgattttctacaagtgctgctccaagaggcttctacacccccgcagggaggcaagcaccgttttgaggtggccgggctggcgaggaggtgcagaccccagccagctggaggggctctgccctgatggcgttcccactcccacctcattcgcagggcgccggggagggctgcaggtgttctattcccacccggcttgcagcgcaaggaggggaatcgcctgacaccttccccttctcctctgccccgcttcctttctctgctcccacaggtggaagtcaccagcggaaacaacccttcactgtatggagggctgggagagaggggccaagagggccccgggagagccactgggcggcaggcaaggggcggggcagtctcccttccggcttccgggaccgaagggtgaagggcaaggggagctcagggaatgaacgagtgctcccgactaatgtttaacccacgactccgagactccgactggtcacagtcctgcagacctccaggtcctgcacaggcgacgcagcgctccactggcccggaatgcgcaccccgggggaaatggaaagtgccattgaaatgtcagatgtcaccgtcttcatcagcactcttggaattttggccaaagtggcttcttcttttgctgagacttgactcactcccggcagagggatgatagcggccttgccccgagcgtttatccggctgcaggcgtcattcttggtcgcctgtgtgtccagagccccagcgcaggaagggagcgcaattcccaccgcgcccgctgggtggcgctagcgccgcaccgtgtcccgggatgaggggaaaccgcgctgcccagtcagtaccccgacgcccccgcgcccccgccgggccccgcgcgctgcagccaccgcctcttctcggcttcctcttgctttacagtaactctcctcctggggaaaaggcttttcacggagcaggctcggagcctacggggctggcctcggactggatgggggtaaggacgggtggcggcgctcgcgccgagcgaacggagggctcaggcggccggtgatcagggacgggctgcggccgccgtctggggtgagaggcccacccagagctctg

SEQ ID NO: 3358 - DNA, 2300 bp, Homo sapien
cgatcttggctcactgcaaccactgcctcctgggttcaagtgattccccagcctcagcctcctgagtagctggaattacaggtgcccacaaccacgcccggctaatttttttgtatttttagtagcgaccagcttcaccatgttggtcaggctggtcttgcactcctgacctcaggtgatctgcctgcctcagcctcccaaagtgttgggattacaagtgtgagccaccacgcccggcctatatacaaattcttaatcttaccaagttcacaaatttgaacttaacacaactcttaaggttaataaaagtattgttttataagttatcaatgtgagaaacagatttggggtaattattcaaactcaaattcagtaggcataagaatttagtgtatccatggccttgctcatgagtcatatgtttttttcttttcaaagtccaagtgaaaacttcactgcttttacaataagctgtgaaaattattggcagatgtagggaccctgcctcatttatatctatgaaaccctaattcaagtttcaagtaattgtatgacatttaacaacataagagttccgttcctcagttttcatatttcttaagagcagttaattatgtgtgataatggtatgtatgttgcatgtattattgttggcatatagccaacgacattttccttaatctcttagtaacactttaagaagactaaacatttacccaactcaataactggaaggggtttttcctccaagtgctaattcatttagttgttgtttatttgggacttgaagcaactaacatctatgcgaaaactttctgtatacataatgcacttccctcctttttaccaatcatcttcctttttcttttcttttttggactcttgtcatttgaaatattgggtgggggggaacgctttttttcttcttttgattgctctacttcttctagtgatttcgtcatgattcaagactttctttgaaagtaaaatggaataaaaatgaaacactacgaactttgttgcctatcctcgctgtttttctttttgacttaactttgcgttggggtgctttaaagtaaccctatttgagagaaggaggttgaagggcattctagcgtccccaactagagtaaaagggctatgacagaaggcaatcaaaggaggaaataattagcaatcttcaacgttcaagattaatcagttctgtttagcggttattaaagggaagaaagaaaccaaatgggaatagtgaattattggtcctttcatgttttacacttaatgctggtacatagtattctttccacattctactgcacattgcctagagaaagaactgcagatcatcaaataattatccatttccaaatggtctaatgacagcagatacaaaggcggctcacttaaaaccttccgttaacagtcacactgcatcaaatggtgctagctttaagtaggccacccatttagtagactctgaaacaacacctttccgcccaatttctgtcatttgctccttaagtcaagggtagtaccctgcgtaacatcttacaaaggcctacttctaacacttcccgaatcttaatgtgtgaggatgttgatcaccataatttatgaccttatctaagacagtggggtgactctccacattgggagccccctcatttgtcctcagtgacttctaaaaacaccgctggcgtgggctggatatttgatcttggggccaagtgcttccagactttgttctctggccttaaaggtgaagagcccggcgctgaaggccacagacatcacggcggatttcacagagggccgcgttccgggagcgggtggccaggcggtggcggacgccccacctgtccatcctcctaccccttcccccccccgttgtttggccggtgggagcccctcctttcagcaggcgccgggcggtggggttgcggatggctgcgcgcgctgcgggcaccgatcaccggcggcagttgggctccgcggggccgaaaagctgcgggcgggaagcgcgaggttaagaccctgacggctgcagctctcagagcccccgcgagcgcgctccgttggtgcgcgcgcgcgcgcggctccgccccgcccgcttggcgcgcgcccccgccaggtccgctctcgtcccccacccctggcgcggacggggtggttccagctcactctcctcccccgagcggcagcggcggcggcggcggcggctgctgcgggcgctgaatgagagacggtgactgttcgggtcgacgagtgctactctaggcggcggcggccgtggcggtgaa

SEQ ID NO: 3359 - DNA, 2300 bp, Homo sapien
gcattaataactttctcattctaagtcttaaaacatctctcttggtctcccctccctatgtaatgtctctgcagtattgtaaccattctcgtctagttctcaggttttccctaccttgaactttcgtatcttccccctaagcccccaccattcttctttttcctcatgtttcttgtaagctggtttcctggaaattggtatcatggtctgtcattaaccttcctttacattctacatgtactttctctagtatcttagttccatagctttagctactacctaattgctggtgactttcaaatctctccatataactgagctcctgactttcattttcaatttaacatatctaaccataatctgtccctaaatacctgtcattccaatttcctaccctggctagtgatattactaagtgctcaagttagaaagctccaaactgctgaaagtttaaaagctcagaaagaatttattatctcttatttttcccagatttaagccattagtgactacaacataattactgaatgctcaagaaacgatacataatacaaatcagaggccagaagctggcagcacatctgtcccaatgttttttaaaatcaggaagtattacaggaaaaatctaaatggctcttttttcctgaataatgggaagatctggcaacactgtctcataatccttcatggccacaagcacagctgagaaggtgcaggcagatccctttaaattaaccaaaaggatgccaacttgccataaacttcatttccctccagtatcttactactgatttacttcactgatttatattacctgctccattcttcttgtgagcatttgcctttctaggcccttgtgtttgcaacctctggtatacctatatatggcataggaattcaaataaatgattctgtgaaagaggtagaaaataagctcagactttaaataaaggatgtggatcaacagtgtggcctaacagaaagagaaacacagcacaagctacagcaataaggaagggaaagcacaggtatgtagagaaagcccaaaagttttatctagaagcagcttacagcaactaggtaatcaatgacagagagtgtggcataatgctttggcattagattcaaatcccagttccactacttagtacttaagtgctaagctaagttacttaagcctaagtttgtgtttcttcagctactgagttatttaacatttcttcaattaatgaaatacaatagtatagttgtactcaacacttattcatttcttccaccaccttatttcatagcagaagaaccttgccagaggcaggtaaagtgatttgtctaagttcacatagctggcatagagtcagagcttccttgttttttactcagttcagggttatgtttgtttttaaaccacaccacatcaattaataacaagaatgaccttttacagagaggagaggtcattttgtagaataggaggatatgacattatgtaacaccagaatgtaatatttaaaagtcttaagcatctgaaagaatttcacttatgtttggtaattatatataaaggctgttttatcttaagacacattacacagtaagacataacatactacaacaacatcaagtttcttgtaagtttaaaaccttcattagcaacttagtaaaatgtttacaaattcttctaggctataaagagtatttattacattatttaggtggctgcctcctgacaaagtctagctcttgttctttgttaacaaaaaccaaactcatcagcctgcaactacttctaagtgaagtggagcactattttttttttcggtattcaacttaaaagatctctggccagcagactaaaatgtttgttttataattgcccgctgaactatgatagtttgtttccagatggtgcccttccttcaacctgcacacaatctctccttgttcaaaactattcaacctcctgctgatcccacccccctatttaaggctacaaagaggaaatcctaaggagattcccgcccccagtctccagcaatttttggtgatgtaatatgtgggctgaacttgagtctactgagaaagagggaatcactattcaggggtactgtatatacaatctgggtcagctgcagctggttactgcatttctccatgtggcagacagagcaaagccacaacgctttctctgctggattaaagacggcccacagaccagaacttccactatactacttaaaattacataggtggcttgtcaaattcaattgattagtattgtaaaaggaaaaagaagttccttc

SEQ ID NO: 3360 - DNA, 2300 bp, Homo sapien
gtcattcatcaaatatctttaaatgtgttccatggtttggcaactttggggtaattggggagatttttgtgtttttaaatacaactttttaatgtattttcccttcctaatatttcctaaaataaccataagatcagctttgtatgaaagagataagagacttaacatcttaattaaaaattgcccttggccaggcttggtggctcatgcctgtaatcccagcactttgggaggccaagatggaaggatcgcttgagcccaggagtttgaggcttaagtgagattccctgtctcttaaaaagaagaagattgctcttgaagaaaagtatataggtcagattatttcataaaaatgtttttagtttttttgtgagaaaatacacaactttaatcttattttgtcaaatgttaattaatcattgtatgtattttgtctttttaaaattcaggctttcattaaagatagaaccagggacaagcaccccacgttctgctgcttccagagaagatttagtaggtcagtacgtagttttctcttgttaccaaatctaaatcagataacctaataaggaagaatatactccaaagtaaataaaaacttagtacatcttatactgcatgtaaaatttattttgatattaaaatctgtcctttctgggttttttggtttttaatttaaaagttgctggccgggcagggtggctcacgcctgtaatcccagcactttgggaggccgaggcgggcggatcacagggtcaggagatcaagaccatcctggctaacacagtgaaaccccgtctctgctaaaaaaataacaaaaaaattagccgggtgtggtggcgggcacctatagtcccagctactcaggaggctgaggcagcagaatggcgtgaacccgggaggcagagcttgcaatgagccgagatcgtgccactgcactccagcctgtgtgacacagcaagactccatctcaaaaaaaaaaaatgttgctatagtttgtcagtagtgtacaaacaagtatgctacctaatcaaggaaaatagatagatgcaacagatggaaaataatagataagtagttatgaatattcatttttgattaagaatgcactgtcctaggcaatgaaggttgattacactagaaatttctgtggtctaatgggaaagtctactaatttgaataattatagaagtcaattttagtgacgtaattttttcaaatgttcactttaatactagaccaagtattaaaaatgtaaaaatcatagttccttactttacctgttacattgtaatggggatattatgcatataccacaaataattttttaaaaaacataaaattatcattatttaagaaatccctgataagtaccttttttaaaattcccaatataggccttcgcactaagtttcatgtatattctaaaaatatttgatggctaatctgataagatgtgaagtggagaaacaaaccatgacaatgtctatggggaagaatattccaagcagaaaaaacattgcagtttaaatttcttaaatttgcttttctttttattcttaaagtgctgttttgcacttttataatattcttttatttattcccataagcctgaacagtgtcagtgtagatttaatttctgatttgagtgtttgacctaccctacacattctttatctaagaggaagttgaaactaggagtaaagaagtaatgtataaaattaaaagagcactgaacctaggactcagaagacctgtgtgtttagtccagattttgtctgtgatgtgaaagctagtctcttctaattctacttcttcctatgtaaatggagaaaatatttacactgcctctacttagtataagtaagataaaaattaatggattttgtatggtttgggattttgtgttttaggacttagatatatttctcatcttcaagccaattaaatagaactaacatcagtactatctcaaaatttgaaccacatttaatattttctttcaagggactgaaaaataaagtaatcatttgaaaatctctttaaatttaacccttaggtcctgaagtaggagcgtctccacagagtggacgaaaaagtgtggcagctgaaggagccttgctcccacagacaccgccatcccctcggaatctgattccacatggacataggaagtgccatagtttgggttataagtcagcatttttaattttatctttcaaatttttaagtcttttgtaattggatttattgtcgatttattagttcagtagaaaatggtatccttgaatagttttctt

SEQ ID NO: 3361 - DNA, 2300 bp, Homo sapien
tggtgactgtggccttacggtatagtttgaaatcaggtagtgtgatgcctccagatttgttcttttcacttagtcttgcttcggctgtggtgggctcttttttgattgtatgtgaattttagaattgttttttctgattttgtgaagaatgatactggtattttgatggcgattgcattgaatttgtagattttgcttttggcagtatagtcattttcccaatattgattctacccatccatgagcatgggatgtgtttccatttatttgtgtcatcagtgatttttttcagcagtgttttgtagtttccttgtagagctctttcgactcctttgttaggtatattcctaagtggttttttgttttgttttgttttgcagctattataaaaggcgttgaattcttgatttgattctctgtttggtcattgttggtgtatagaagcctactcaaaattttgaattcaaagccccagcctccttcccatatcaaaggcataattcacgaaattacatttcaagatgagagcattttcattggatttagttaacagattctttgttttcttcagtttctcttagcatgcctaatagaactacttcaggtagccaaaattttatgaagtctatctatactaatggttttttgcgggggaggggtgagtatgtaaattgtagctgtggccagctttattgtagatatggctttttttcacattgacctaatgtctgtgtctgagttcagcaagtgtaacggtgttacttgactaaacatttggtgaagaaacaattacttcagaaagtgaaaaagttattttgagtgttagaatctcaaggaaaagctgaataatgcttaaatatagttaggctcttgagccattgaatgcagttattaaggaaagaatagaattcagcacaaattgtgaaataaaaagaacttaggtcaatgaaaaaaggaaataaagcttaatttagagcagcctatagtacatggatcctttcttttctcaatttgttttctcaccttaatacatataaccatttaaaatatcctcattatatgtcagtcttgaattaaagtcaatatagaaattacaaaatacacacagcacaaatgaatatctaatttcttaaaagagagaaagttgcctcctagactttccccaagagccctcaacagaactggaaatctgtaataatattgacaaatatcttgtaactaaagactaaaagcatagtctatcaatgttatatgactaatccttaattatactgaatagctagtgtttaagtattaaacatattgaagcattctggcatgttaaaacttaacattaacatctactaatatttaggccaggtgtgggggctcatgcctgcaatcccagcactttgggaagccaaggcaggcacatcacttgaggtcaggagttcgagaccagcctagccaacatggtgaaaccccgtctctactaaaaatacaaaaaacttagctgggcatggtggtgcacacctgtaatcccagcttattgggaggccgagacacgagaatctcataaagctgggaggcagaggttgcaatgagctgagattgtgccactgcactccagcctgggcgacagagcgagactccatctcaaaaaaaaaaaaatctaatatttagatcatctaagtagtaagtattcagaaccaatattctgcagtcttatccacacagatctagagatgccacacagttattttatgtaggtgtatttcattctaaagaatatttaaggagacaaaattatttcttctaattcataagcagcaaaagtgactttctgaatatatgatagcatgtaaatgtgttgcatcgagaactctttattgtattggaaatacaataaaaataggaaatacaataaaatggaggtgttgaatagaattctaaaactgaaaactctagtcatgtttaatttgctcattattatctggcagaattattatgtgtcgtccttacatttttaatatttcccccttattttggataattttaggaaattcgtacaagtttcaagctggcaatagaatgaatgcaatgttatggtttaagcatttgagtgcagcctgccaaagtaacaaacaacaggtaagcatttctcctaattctcagaatagtccataatttgggaacatatgtaaaagagttccaagagaagtaaacagactagttctgaattaactaggagaatggtggtgtttttattcttgttgattacagttaataagatatgaaggtctacatcttagtgaggagct

SEQ ID NO: 3362 - DNA, 2300 bp, Homo sapien
gatcacagagtctgtgctgcataatttaagtgtccctattccttgcagctgcttcctgtgtgctagtcatgtaaacgcccttcttaaatgattgcatccctcacaatacttagaatatattgactgttgattggttggaaaataatcccgtacaggcggagggggcagaaactgacatcatggagtgtcaggcacggtgctggtgctatgcatacactcaacaagggcctgggtaatgcaacatggagaagggaaaactggggggcagaacaattttgtcgtctgaaagcctttcacagagaggccctgaacccatagctctccttctctgaggacagaaaaggaggaagtgtgtctgtcctgcagtatgtgggatggatagatggatgcgaaattaagcactgaagtgggttgcttggagaggcaatgactgccccctgccctcacctgaaaatccttaaagacagaagggatcatccgcccaggaagctgaggctgcaggataagctggccttttcctgaacagtgacagttggagcgttcaccctcactgtccttgtcagagttacaggcaagaaaggagaatccttttggataaagtgtcttaaaggaactgttgatttacccttttgctttatggtctcctgatgtagtgagcaaggttcagggagattagctaactgcaggcagactgatcttcctgtgcagagaaataaggtagattctcattatcttccagctcattttcccaagaattatgtattctccggccagaaaacgacctccaaacctccaaaccttttcaactacacgcagcaaaaagctaatacaatgccttctgcatttgactgtacgtctcctgcagtgattaatgctgcctccctaactacattgtccggagcaagtgtcaagcccaattatttctctaggatctcctgatagtaaatgctcagcaaatatacagacgaataacacctaatcatacacaataatcttagagtactttccccatacatttcctaacttaatccttacaacaaccctgtgaagttattaactcccattttccagttaaggaaactgatgctcagcaaagttaactggcacatccagtatcatacagccagtaagaaagaattctgttcagtacgccttactgattaaatgaactatgtggcctgaagaaaaagtgtcagctcagtctttccccatcacgcatcttattccatggagtaacctgcattatatttcagggtcaggcacactaagtttgcgctttagtatatggtgaataaatggatggacacagtggcggctctgtataagtcagctgaaagcaaacaaagggaaggcagaatctttcattcacacgatttatccgcgcccactgggtgcactacggtcgggcattggcgacccaggagcgactgacctgccctcatggggcttacggtccttagcaaaaaacagatgtaaaacaactaatattacagtaaatgaatcataattttgtgagatgctcctgaaagtatgtagcaggacgctccgctctggtccgaatgaagagccatttgcactcagtgtggaaaggctagcctttttctgggcaaaagaagcgggggatacatttagataggcagaagttccgagcagaagtcaaggcaaattaaaaaggcaacaggaggagggaaaatgcttctcacaaacagaactcgacctaggggaccgcaactctccagtcctgctgcttggctgcctacctacctaagaaaagcaggaaagaaaaagagaagacggggtgggggatggaggacaaatacagaaaaagaaaaaagagcgaaggaagtgagaagtgagaggccagtttatgtaagcgggcagggcggcgcggccggcaggagaccggcgccggcgccgagggagttaagcggacgggcccggtatggaagaggttaaggggggcagtccggagcgggtccggtaggggccgcctactgggcgggggcggggccgcgccgagcgagcgctgggattggccgtcgggcaggcgctacgctaggacggtaccaacagccgggggcctcggaggcgggggggtgggtgtgggactgccgctctgcgcggcgagaggtggcctgggaatggccgggccgggggtgggccggagccgctgtggcggcggcggcggctgggggcggtgagcgcggcgtggggctgcccctccccggaggcggcgggggcggccggggccgcgccgcaccgcaccgcgcgggcggccatggagcgagcctagggcccga

SEQ ID NO: 3363 - DNA, 2300 bp, Homo sapien
cctacataaaagttccaagtacagataattctttccacaacatcttaaaacttggattgttttaataaactattgttactattaattttttcaccataaattcacttataaaccaccagtattaactaaagccatccttgcctcctgtgtagaccacccagagcctcctccatggctgggtagatacaaaaataaaactggccacgtattgagtgttgatgatgtgctcattgaatgagctcatttaatcttcacagcagccctatgaggggactattttattatccctttttataggtgaggaaacaggcatgggacggttcagtaacatccatggttgcacaaatagaaaatggtaatcactatattagactgccattcagactcaaacgacatttgttgagtgagttaattttttttcttttctcttttttcttttttttttttttttgagatggagccctgctctgtcacccaggctggagtgcagtggtaccatcttggctcactgcaacctctgccccctgggttcaagccattctcctgcctcagcctcctgagtagctgggattacagatgcgcaccatcacactcagctaatttttggatttttagtagagactgggtttcaccatgttggccaggctggtctcgaactcctgatctcaggtgatccgcccgcctcggccttctaaagtgctaggattacaggcgtgagccaccacaccctgcctaattttttttggttttccaataagcactgtggtgtatgtgctgttaactgtctccggtggactccgcaagctcgatgtacacagtgctgggctggtgccatggctgctactctatgaaaagtttttgacatcacactgaatggctgagacactataaacattttacttttcaactcaacctcgtgtcctagcaaaggtgctttatctagtttctgtagctgttcgaatgaaaggcacaaatttggtgagctgctgagaatggagcagacctggcacggtgtgatctaagagactggggtgaacagatgaatcaagttgcctgtgacatttgtgagacacggtgctagtattcaccttactgtctggagggcccaacctcaaagccactaaacatatgacattagccaagtcctctgatctctctagacagcagttttctcctaagacaagacggctttttggcttggctgaagtaagccaggtgattttaaacaatgcattaagctcttctgaaatctaacagccttgttccatgctcctcgctatggagaagagagcgctgagggaaagaggccctgtagtcttttgccaatggtgtcggatgggctgctcagtcccagcacttgaaagttgcaaacctagtcaagaaagtgcacacagtacttcggatttttatgagatataattacattgacatgacgcctcatgatttacccatgactcggggggtttccaaactccaaacacctccagactggagcccgtcaatcagcttcctcttgcttttcgtggactcccactgtggaaacctgctggtgttttgctgcggtttcatttccctctgcggaggagccagggcaaccttggccagacaggcacctagctgtgcccttctttccagggcctcttctccactcagctgactcccctggcctgcctaacgctcctgactgagacggttttccggcttcctctaacaggttggcgggaagttgatctgcaaacgcgaggcaaagcaggagtgtccttattcggtaggcctctgatgggccaccagagccgtccgaaagtcctagcggagtgattgacagtggccatttcaaagcctgagttcaccttctttgcaaccacaatcacgacccagaataaactgcttcctggaagccggctagttgcacctggcctgaagtcagtctcgggactgcctctcaggaccccagacagggtttcgggttcccgcctgggtcacgtgtacggaggctgccagtgcgcactcagcccggcccgccggtcgccacagcaacaccaatcccgggttcaagcccgcctaggaagtgcggtccccgcctgaccgccccgggcttaagggagcctggctaggccggcagccggatggtcccgcagctcggggccggccatgcttcgcggtccgtggcgccagctttggctctttttcctgctgctgctcccgggcgcgcctgagccccgcggcgcctccaggccgtgggagggaaccgacgagccgggctcggcctgggcctggccgggcttccagcgcctgcagga

SEQ ID NO: 3364 - DNA, 2300 bp, Homo sapien
caggcgtgagccactgtgccatggcaaccagtattttctaattagtttgggttgcttgatttgcatatcgcagttgatttgcattttcactctcacaaggtgatctttggccccatgttctgaaacctgttcagacatttgcaaaagcttcctctcttttccccaggagcaatttcttgcccagagttctcctgatcccaggtccttcaatctccataaatgaggcccaccccagatatttaggtcacttaattggccaaaatgccaataacacagtgtgtttagggacacagtctggctcaggacagaagataggactacatacaggtcaggaagtcttaatttggatcactgctgacttggataagaccctaggtagcaattagcaagttactttctgtcctcaacatgccttttgttcgacaagggcctggatatccaaattgttctggccagcggattggagacccctcctagtcgtgcctcttccttgctggcaaactgaagagtccttcccaagtgtccgtttcctcagctgtattttattttattttttttacttatttattttgagaccaagtcagtctctgtcacctaggctggagcaatctcgtctcactgcaaactctgcctcccaggttcaagcgattctcttccctcagcctcccgagtggctgggattataggtgcccaccaccatgcccagctaatttttgtatttttagtagagagggggttcaccatgttggctaggctggtctcgaactcctgacctcgtgatccgcccgcctcagcctccccaagtgctgggattacaggcgggaaccacctcgcccagccagtttcctcagctttaaatgggaataataatgcctgccttgcagaattgtgaagaccaaatgtaaaacacttagcccagttctgaatacagagaaaaaagcagcaaatgttaattttcttctatgtcactactacttttggagcaatgtgtgatgccctcaatgttttatcatagaccttgacctcccaaggctccagaatacctgctctgggctggcttaaggtgttcaaccaattgatcctggatttggaatgctcacccacagctggccgcacaccctgcctgtctgcactgtggctcctggtagcgccatctccaaatcctacaacctcacgtctgacaggaggaagttagacctagcagaaggctttgcacactggagctgctctcaccaagtgttggctgaattgaatgagaatgaataaaatcaggcttctccataaaacagggagccctgaaaccaagggatgggagcagcctcaggacatgggggacagggttcctccctagacaggtctgtgccaactgttctgggtatctgcaggatctttaggaagggtgattccactctccctgagtcccatcttgatttcccaaactcttcaaaaagtagtccttgaggctgggcgcaatggctcacgcctgtaatcccagcactttgggaggccgaggtgggcggatctcgaggtcaggagttcaagaccagcctagccaacctggtgaaacccgtctctactaaaaatacaaaaattagctgggtatggtggtgggcacctgtaatcccagccactcgggaggctgaggcaggagaatcgcttgaaccagggaggcggaggttgcagtgagctgagattgcgccactgcactccagcctggtgacagagcaagactccatctcaaaaaaaaaaaaaaaaagaaagtagtccttgaatcccttctgctacaaagtctgccctctggcttcttattctaaggccaaacaggaggagtaactgattccacccgagagagattcagagttgcttggtttcttggctgttggctgttgtggtggatgggcctgtgtgtgccttttgctgtgactacctctttcctgtccttaggcttagagtgggacctgaatgtgcggctgcatggccagcatttggtccagcagctggtcctaagaacagtgaggggctacttagagacgccccagccagaaaaggcccttgctctgtcgttccacggctggtctggcacaggcaagaacttcgtggcacggatgctggtggagaacctgtatcgggacgggctgatgagtgactgtgtcaggatgttcatcgccacgttccactttcctcaccccaaatatgtggacctgtacaaggtgaggccgaccagggctggggtgaggcctctgtgctgggagggagacccttctgccagcccttccttgcaaggaaatgggctctggaga

SEQ ID NO: 3365 - DNA, 2300 bp, Homo sapien
tgtgagcaaactggaactcagcctgcaggagctacaggtttcttcagcagctgctggtgtgcccgggacaaaccctgtccttaataacttattgtcatgtgtacaggaaatcagtgatgtggtgcagaggtagccactgttagcctggtgggaaaatgcacacatttctgaggggagagggaaaaggacttgttttcctgtgttcttgttttcagaaaatgaaagactcatacttgagtgtgtttatgtgaagtacctcagatccctgagttctcacgtttacagtttcatctcaaaaataagaagcaaaccacataagtataggagaggtaaattaagtgggggcaaggcagtagtggacagggttggaaactgcactggaaaatagggaacatgtgtatgtcataaggaaggcaatgcagcccatccctacctggaatgctgggaagtgctaggcagggctgctctcagcaagactgcagcagctgcacccagacctggggctctggtaggtactaatggtgattatgctccaatttacctaatgaatttggtgggacagcagaaaagaaagctgggaatgtaccaagagaaatttttgttcagggctgttggaagtagctgttagccttgcttccacaaggccattgctgctgtaataagaactgcaaatcagagtgctacaacataaaactgggaaatatggccctatctgaatgcctctgtcctattttccgctggtgtatcagttagtgcaggaagtaaagaatgctggaaagttgaatcagaaattgaaaaccttctaaaatcttacacagattagcagaagtcacttctcccagtctggtatattatttcataatggaccaggatcggcttcctgcctgttggtggctatctgtaaaccataagtacaggggtctccctagtggttcttctctgtcttttgctgggcaggctgtcttcctttattcctggtagcattcagagcattaaccagtgttgattttgaaaatagtagtccctacaggttctcacaaaggaatgaatcctgttctgatacagttcccctgcatactgacatactggccaaggacttgagcagctgtgtatttttctttatcaactaaaataccagggagatggtcttttcttgaaacccagtggcctgtatgtgactgagaggaaaagctggcttggtcctaatggctgtttctctgtacctttcccttcccttaccaccttaagcccaatccaggtagagaatagggagaggcattctcctctctatggatttgaagtgaatcacccccacattattctcacatgcttttcttctctcacatattcctccctactcccccacccaatcattgtgcttatttgtacagatcttattgggaatattctttatttattttgtcatttcacttctattttaagaatgcataattgaaggagtagtcattttcagggagcaccaggtagaccctgggaacctaatgacttaatccttaaatatgttttgcccttgaaaaataggccttttccttccttccttagttataattgtggaagctaattaggatggcatggaagtgaatctaatgagttaggtattattaatgttcttggtatcgggtctaattccagttactgcttcattctctttttaaagctttatgaatacttcccccatcctccccaaggagagctcaatacacacatatttttattttattctctcaaaggaatattagcttaggaagataggaattcaacattgagcactgagttttcttctggctctgtcattgatacactgtcaaaccacagcctcatctcttaatctatttaattaaggtaacagtacatgttctcaagggtgttgcaagtaagtgtgcagctatcccttggagagcctctctggaaagctcttttagtgcagtgttgttatgctgaattgttttccattatcttatttgctgagtagaaaatattaatgaaattaagaattgttgagattatatgaattgggctagaatactaaggggaaaactatgttttgaatagagtttggcatttttgaccaagaacaaaattgagttttcattggaaagaaaggaaaccttgattcttaccattgctgctccaaaggaggcccaggttaagaggattagaggagacacgcggtgctgggcattcctggcaggtgttgggtgatccccgcagtatgtcacctgcagttgcagcacaggcagctagtgattgggttcatctcctcctagtggttggaagag

SEQ ID NO: 3366 - DNA, 2300 bp, Homo sapien
atttcatgtaagtagaattatataatatttgccttgatgtgtctggcttatttcacttagcatcatattttcaaggcccatctacattgtagcatatatcaacatttcattctttttatggctaaataatacttcattatatgtatagaccaccttttgtttatccatttatctcctctttattccaaattatgctataagtaattgaaaatgtaactactaattattggtaatttaaatagaagatttattgattaaatagtaaaccatatggtatagagtctacatatggatagaatgtggatgatgaagatcctttcccatacctttttttctataatccggagaatgagatattcaatctggtatttgaaattcttagtcataattgtggtaacctttagtcatctaactcttttatttgtcccttgatgttgaaagtactggctttataaaggataattttattgaaaacataagctttgttattttaaatagttaataattacctacattaaagttattctttctctaataaggttaagttaccattttatttttcaattttctctaaggctgtttcagtcctgtcatcctattatcttaccctgttacttatattgacctagaacaggggctggtacatagtaggtgcttaataaatatttattgagtgaatgagtgttctcagatacacagttaaacaaacactcttttttttgttttttttgagatggagtctcgctctgtcgcccaggctggagtgcagtggcgcgatcttggctcactgcaagctgcacctcctgggttcatgcctttctcctgcctcagcctcccgagtagctgggactacaggcgcccgccaccatgccgggctaattttttgtattttttgtagaggtggggtttcactgtgttagccaggaggatggtctcgatctcctgaccttgtgatacacccacctctgcctcccaaagtgctgggattacaggcgtgagccaccgcccctggcctacaaacgctctttaatattatttttgtagatcatacattaaagtcatgtattatttgtaggttttactagtttaattctcataaagtactatcattttcaggtttttaaattttctttaactttgttcctgtttattaacaaagattgggctttttgctttaaaaacttttaacactcaggctgggcatggtggctcatgcctgtaatcctagcactttgggaggctgaggcaggtggatcacgaggtcaggagtttgagaccagcctggccaacatagtgaaaccccgtctcttctaaaaatacaaaaaattagctgggcgtggtggcgggcgcctgtaatcgcagtcacctgggaggctgaggcaggataatcacttgaacccgtgaggtagaggttgcagtgagccgagatcgcgccactgccttccagcctgggcgacagagcgagactccgtctcaaaaaataaataagtaaataaaaataaataagtaaataaacttttaacactcaaaagttttcaacactatattgccatgtttttaacctttattaagctatagagccagattgttagcaaaggcagttatttcttggcttctgtgctcatgaatcagatcacagctatttctttgactttggctttgtggtttcttgaactatttaagtgatgtaaaagatgagtcttgttaggcgtttcctttcttttaaaagtgtatttcgtgttttattgtaaacagattttctccaaggaaacttttctctctagtctcacctcatcatctccctataaaatagagatatattaacttctacattgttttattattaggctatttgttatacatatatatgttggtttttattttacttacattttaaaagtgttctcagagattttgaagtaactccattctgactcagtcttttgcggattgctggaaattttcctttaggtcactctccacccactttgggaattgtgaatgctcaccattttattggttccctctggccactgagtacatgagtaaatgtcacatgcatgtggtattgcttgtcagagaatggaattctaagacttcctctttacacagaacagtttaacttttgtgcttctgggcagaggtatggtccttgggacagttctccttccacctaatagttatggcagagatcaggacacttcactttgctgcctgtgcactgaggcctcagaatctgctctacccgacttaacaggtatggttcagagttgatagtttcagggaggcttgataaccac

SEQ ID NO: 3367 - DNA, 2300 bp, Homo sapien
atgtactttgcccagatcaaatagtccataagtatcagggccaagttatgaacccaagcagtctggcttcagagcccctgcccttagccactgcactctactgcaggctgagcagcccttatcagaaatgttcggaccacaagtgtttcagatttgggaatatttacacacacataatgagatatcttgggcatgcgacccaagtctaaacacaaaattcatttatgtttcatatacacctttatacacatagcttgaatgcaatttaatacaatattttaaaaattttgtgcatgaaacaaagtttatgttaagtacttacgtgaaatgttccacctctggcatcatattggtgctcaaaaaatttcgaattttgcagcattttggattttcagatttgagatgttcaacccatatattcatctatctttatatagtatgcatgaattagcagagaaaccaaaccattatccccaaattaaaattttctcccataataaaaatcaaacagtaaaccaaattccggctctgtgacatctttatccctttcgaatgaatttttttcagtagttgcaaacactgggaattagaagaaaagacaggtattttaaacacagggaaactttaatccaaatggaaagttcatattttatccagtgtttacacatagtgtttccgttcccattttggagttaatttcagttatttctggctacaccctagatggcaatggaataatttcatagtgcttttacaacaggcaatatctacgtcagtggatggttcatctaaggtcaacctggttcaggaaagatatgcaaaggagagcttcatccacctcttctcccaaccctacatttccagtggttgttttgttccttctttgcagtggctcccgtcctgtctaatttaagcaaaatttcagtgtagtacctccattaactgatactttttataaagcaaattgggaagccaaaagaataacaggagaatgatcaagatttgagaattaaaaaaaattgaattaagatgcaagtaaacacagtgggagagggggatggcgagtcaattgtatatagtatatgtgtatgtataaaacgcttcttttctgcctcattcactctctttagactgcataagctaaaatgagtaagttctgactcagaaacagggtcaaagatatatattttttctcctttgtcatcaaaagaagacctgaccacgtgcacagtgtataaaggatgccagtgggaagattaactttactgtcaggcattgtaaggaaacagaaactcacatatggtgagatggtaaaggagttcaagaggaattcatggtaatataatatgaggaatggggctacaattgcgtccccaatgagactatagaaggcacacaatccaggccagtgcgatttaacatcatgaaataatctccaaaaattaaaatcaaataaggtagcattttactctcttcttgtaaattttataccattttaatttttactggaggcctgctgctgacaagggtgtttaaaagagatccccctgggtattttagagctccttaactggatggcaaggaccaaataaatgccttgtgcttttctgccccacctgtgcctgcacctgagctgcgcacgcggtggcactgagccctcgactcactcatttgacaggtggaggtgggatggggaaggccggagaccgaccaaccccaaaggcggtagcgtgtggagccgaacgcgggagggggtcggctgaggcggattgaggggggggacgccgaggtgcggcgacaggacgcggaggacgaaagacctcaagcagcggtggccggcaaatgaggtgggcactgggggacccaccctgcgaggaggcgggggcggggacggggggcgcggcgcggcagggcggggcggcagccgggaagccctccttccccgcggcggaggtgactggcgggcggggggcggggggcggggggcgggagacgctctgtcccacgctttcccagcgctcggtggtttaaagatggcggcggcggtggcggcggcggcggcggcggcgttgggggcgcggagccgcgacaggaggagggaaaagcagaatctgtgagtcgcctggaggcagcgcggcggctgccgtgaggaggccgggtgcggagccgccggtggcccagccactcagggccagggcctgggctgggagggagagaccggagcagcgccaggagcccgaggccggagccgaggaggaatgtgaccaggggtcggcgggggcgcgggagtacgcgagagc

SEQ ID NO: 3368 - DNA, 2300 bp, Homo sapien
tccttccctgaccattctgttttgttttctgctcagtacttatcactgccagtgattatctcatctattcgttttattatttatattcttcattagaaacataagcttttgttgtttgagacagagtcccactgtgttgaccaggctgcagtgcagtggcatgattttttggctcactgcatcctccgtccctcaccccccatcccccaccacaagcaatcctcttatctcagcctcccgagtagctgggaccataggggcctgccacaattcccagcaaattttgttgtcattgttgttgttgttgttgttgtttttaaattctgtagagagggagtctcactatgttgctcaggctggtcttggactcctggcctcaaagtgatcctcctgcctcagcctcccaaagtgctgggattataggcttgagccacctgtttgtttcctttcatacctagtcctgcagaacataagcctctaagtgcaggggcttcttctgtttattcaccactgtatttctagcaccaagaatactatcaatattttttgaatgaatgaatcaaacagtgaaaaggccagtcatcttggtgtatatagaaggtagccaacagagacccaatagaaatgagtgcctatgttcctactgctctataactagtgggagtggggaggggaagcagctgggggtctaccagaccctgtcaccaactagtcagcacacgtggcaatcacagttgtagaagaggccaaacggagcagatctgccaatgacagccagtactaaactcgactggatgctgagggccatttctgctttgagtgaacagtgcagcctgctgggtggccaagggaacgtgtacaaatccactttgtttaaaggacccagagagtagtcagttctgctaaacctcatctgtttgttcagggatttttgtcctggggaggagtggggaagaagcgattagtcaggccaggctagctggtattagtttgcaggctgtgagtgcgactcttcagtctctgctcctctcatcattgccttttcacctacctttaccctaaatttacgtacacctctgccttcacaaattccaagcgattaactgttgtatttaatctctgtcccaaatctctctgcatcattcttcttttgattatgaagtcacgagggccctttgtttattttatttttaaaactttttttgagaaggagtttagctcttattgcccaggctggagtgcaatggcacaatctaggctcactgcaacctctggcttccgggttcaagcaatcctcctgcctcagcctcccgaatagctgggattacaggcgcgcgccaccaagcccggctaattttttgtatttagtagagacggggtttcaccatgttggtcaggctggtctcgatcctaacctcaggtgacccagccacctcggtctcccaaagtgttgggattacaggcgtgagccaccgcacctggcctcaagggcccttaaatattacttagttgttccattatttggtgtgttttattatttggtgcaggttttttccccttatctagtttgaatgttgctgaaggacgctggttttcaaacggtaaggaatctcctgataaaggcacgaatcttggtgtgcagataagccagcgattcttgcttctggctagttctacgttgttcctggatggtcagttcaaactgcaatgatccacagctccagaagcggcttcttccagtcggcctaggagccaaacgcccctgcagctccatgctaccacgcagggtgccgtttcgggcttgcagggagttgtcgcagtcccgttttggctgcacattctactgctggggtggaagtgtcaagcaagatgttgtcgccggtatcatgatgtccgggtgagaagcttccttggcaggttgccagggccagcctgcgagcactggcgccggggacccgcgcgcccgggaaggggcggggaggtgggcggagcctggcaacctggggaccaccaataggatgctcagccggaggtggccctgcgcgtgacgcagcggtgctcggaggcagggggcgtaggggccgggctgtccggcgctttagcttagcaggcgacgttgcgggccctgggcgccaggagagcttcccggagtcgaccttcctgctggctgctctgtgaccgcttcccggctctgccctcttggccgaagtgcccgctgccgggcgcgggcctcaggtaacggtggtgctcccgcgcctctcctcgcttcccgcttgggtccaccggcctcagcccgcggg

SEQ ID NO: 3369 - DNA, 2300 bp, Homo sapien
tcaccataccacagcacaagacagaaaagagacctttgatgtctcacagatctaatcacttcctaaatcctttagattatactttatgtgtttttctagaatgtgttcacttatttctatctgctttcttaatactgtacttggatttttttgaactaggttaagaatacaaaagatggataattttgtgtgctctataatgctattatgtgtattttaattctttgaaaaattagggtaatgggagataaggctaaaggctaaaatgctaacacacccaacatgtttgatcggaagagttcaaagggaccatgtagacttgttttgaaccctttgctcgaatttctcacagctattacactcaaaaccagaaaatagccgtaattctgtcaacacagaagagaactgtccaactgattttcatgtttgtccaggcactctacttggtgctaaggaatatggtgattgaataagataaagtttcctccctgtctggaagcaactagacgctgggcttctcccagcgattcattatttggcactaaatctctgccttaatatgaaacgatccggctcatgcctgtaatcccggcactttgggaggccgcggcgggtggatcacctgaggtcgggagttcgagaccagcctgaccaacatggagaaaccccgtctctactaaaaacacaaatttagctgggcgtggtggcgcatgcctgtaatcccagctactagggaggctgaggcaggagaatcgcttgaacctgggaggcggaggttgcggtgagccgagatcgagccattgcactccagcctgggcaacaagagtgaaactccgtctcaaaaaagaaaagaaaagaaatgatccctcaccgaaccgagcctcagttcagtgcgaaggctctgatgatactctttttttttttgagacggagtctcgttctgttgcccaggctggagtgcggtggcgccatctcggctcaccgcaaccctttcctccccggttcaagcgaatctcctgcttcaacctcctgagtagctgggattacaggcgcgcgccacctctcttggctaatttttgtgtttttagtagagacggggtttcaccatgttggtcaggctggtctcgaactcctgacctcgtgatccacccgcctcggcctaagaaagtgctgggattacaggcgtgagccaccggccgctgatggtattctttcctgagggcagattttcacgccagaagccccgacaattatacctgagctggttccacctaagctcaatcctccttccctgccccaagggggtgaaaaatctgggcccaggaggccttccttgtgctctggggggaggcatttaagggtccaaggaagacgtgaccgaaatgtaaagcactggacggcttacccaataagggacccagcgtttcttattacccaacatccccctgagtctggcttttagaaaaatatgcaaagcgtccgggcgcagtggctcacgcctatgatcccagcactttggaaggccgaggcgggcgcggtcaggagtttgagaccagcctggccaatatggtgaaaccccgtctctactaaaaatacaaaaattagccgggcatggtggcccccgcctgtagtccctcgggaggctgaggcaggagaatcgcttgaacctgggaggcggaggtggcagtgagctgagatcgcaccattgcactccagccagcgcgacagaacgagactccgtctcaaacaaaacaaaacaaaaaacaaactacaaaattagccgggcatggtggcgtctgcctgtagtcccagctgcttgggaggctgaggcaggagaattgcttgaacccaggaggtggaggttgcagtgagccgagatcgcaccattaaactccagcctgggcgacaagagggaaattccgtctcaggggaaaaaaagagaaagaaagaaaaagaggaagaaagagaaagaaaaatatgcaaagcaacaaaaaagagagctagaaagatggaaacaactcagaagacccttgcttaacccgcgtgcgtcacgggctacaggggtcggcccctcgagctaacccccaccggcgcctgcgcactggcctggcccgcggcaggaagccccggcgtgagacactttcggattccgtgacaacggcgggattaaacgtttttcttctcctttgctactgaacctatgctgtgacttagaacataagaaactccaagagggtgtagggattgtcttagctgtctccctcctccgccggcaccgctgaaggcagcccctatggagg

SEQ ID NO: 3370 - DNA, 2300 bp, Homo sapien
gaaaggttgccccttttcctgatacataaattcaggtgtcaaatacattaatcaacgttgctttaggtcattaacaaccttcctgtctgaatcaagaagcaggaagtttgggtttttattggataggctactacttttcttttttttttttttttttttttgagacggagtctcgctctgtcgcccaggctggagtgcagtggaaccgtctcggctcactgcaagctccgcctcccgggttcaagccattctcctgcctcagcctccgagtagctgggactataggcgcccaccaccccgcccgactaattttttgtatttttagtagagactgggtttcactatgttaggcaggatggtctcgatttcctgacctcgtgatccacctgcctcggtctcccaaagtgctgagattacaggcgtgagccaccgcgcccggcctaggctactacattttatttttattcattcattcaagaaacatttactaagaacttactccctgataagtactgtgtggtatgcagggataagttgatggctcatgtcttacagacaggttaattgaggagatagatgtgcaaatgactataacagagatatatacaaagtactgtaaaaacatgggaaagggagcaaattagagccagtggaaactggtaagtcttctcagagtagatcatgtttaagcctagagaaatactccagaactaaccaaacagcgaaagggagtagggtatttgaaaagtatggtgtgtctgaattttgcatacaggttttctgcattttatttctgggacctagcctcagcaaatactgtcatgcagaggttctcaaactttctctattcacagtgccctttgggtttcaatattttcacactcctaagccaaaagaaatacctcacagttaagtttattaagtaggtaggttcaaaccgcttactaaatatttaatgtcctaacaatttattaaccatttggaaaagtactacacatacattgaaagaaaaaaccttttattttattctcatttaatcaataccacttaccaatgtaaggcatgtacttttggcatggtacagcttctctgaccttggaatcagattggacgttaccaccttcatttcctgttccatgttaattttcacacagtacttgttttttttttttttatcacacaaccaccaatcaaaccagtttcaaaaagatatgatgtcatcaaaattaatatagggcatctaaagttgaaaactgtgaattgtgttaagttcatgctgtgtctggtagatgttacatattactgttatttccctcaatttaaaatcctatggcatccttgtgagtttgctgtggagccctggaatgccttgatgtgcaatttgagaattgtaggttctcacaggttattatctatggccaggctaaagaagagatcagtggctgggcgtgtggttcacgcctgtaatcctagcactttgggaggctgaggtgggcagattgcttcatcccagcagttcaagttcggcctgggcaacatggtgaaagcccatttctacaaaaaacacaaaacttagccaggcatggtggtcccagctactcaggaggttaagatggatggatcacctgagcctggggaggtcaaggttgcagtgagctatgattatgcctctgcactccagcctgggcaacagagtgacaccccgtttcaaaaaaattaaataaatagatatcaataaaaagaagagagtagcttagtgtcatgtagtgagcaaaagaaaatagggtcatgctagctgatgacttgatttcattaagaattataatgttgaaagttggacacaggcacgatcatttctattttaaaatttggtgtgatttttactgtttgatttatttaaagtgggtcatttgtattatactcattttttaacagatggatgagttacatatatctatgatccagtggatggtaaacttgctgattttaatgatacccaactttactgaccaagactgtctcctaaagttggaggaggaaagtgctgagaaacatgatataggagttgcgcgattggagctagatgcgattgaactgacaaggaagttgtaccaatactccagctatttgagcaggtgaagcggttattttattgttgcccttttgaagaattgaatgtcgcatataacagagaagagacagtgaagtagtagcaataggagttattttaaaaccttgaaagaaatactagttcagtttttcaactagctttaacactgtgagcagttataatatgagat

SEQ ID NO: 3371 - DNA, 2300 bp, Homo sapien
gaagacggtgaaatgatgtaatgacagagaaggcagacaacatgtttccgtgactcatctagtcagagcaattatgggaaacagctttggtcaacattctactttggaaagaattttgagtctagatgtggttaaattttgacttctgggaacttggttcagatgtccctttcactgtatgtcctctgacccctttggcaaggttgccacagctcccacagcccttcctacaagcacctatcattgggcttgtcacactctattgctcttctgtcccaaagatgcagtcttctctccaatgatactaccaagtcttagttttcctcaaccacactcaatctttttgctccaccctgaattcctcacacctaaccctgatagttacctaaagtgacacttaaatgtttcagagtgaatgcaaaaaagagagatgtacttggagtcggatatacaatttatccctaattaaagcatttaaaaggaattctttttgtggagattccttttttaaataaagaaataaataaaaggacaaaaacatctgacacatgtggcttaaaatctgagggagaatcactataaatagtgggccagagagtaatctattttcagtatagaacttaccagcttgtttatttcttcgaacagtaataatattaggtaacctacacatgccctgacatattgttttcttatacagatatttcttaatatagatacatttctctaagtcttattttccattaatttgcattatacaattagaaatgcatatctgcagaaaaaataagccaataagaaagcatatctatacttacagcaaattctctataaacttaaaaaagtcactaacattataaaacattactaacattactaaaataatgttagtaaattctgaagccaaaggaacaggcaaatctctaaactatgcaggggtgccgaaatatggaaatccaaatgtggaatccaaatggctctcatatccaaataagtcaaaggcaggtaacaaaatctaccagacccaggagtatggtgtcagaaacaagaaagcaaacactgatgaagcagcaacaggacatgggttggggaactcctaggtgatttcctagaatgtctcatcatctaggatgtggagcttgctttcatggaccagccggggcatgatcataggtggtttagcccatttaaagggtcaatggcaatcagagcactcctgaagtgggaaatatttctcattatcactgtgttggcccacacccattccagtgtattggttattggaattaagatggcaccgagggttgttggtcacttttcacaccatatatgacggttcctgatctcaggatagcaaattttggcatgtgtaatgaagaagaaggtagagtcatgctgggtcaggcataacagaagccaaaagcagaacaagcagaagtgaacaccagggtaaaaatggcttttatgactcttcatacttccttataacactggttttttgtcaaaggcagattttgcttgcatatctggggagtgcctatggtatctcctattgtttggtttcctctgatgtctggcacaggtcaatatttaaatttctcattggcatgccagagggctttcaggtctgcttgctggcatgcgttgtctttcaaattaaccaactgttgcagttggtgggcttgataagaaggaaatcatagcgataagttgctataaaactgtgtttaggtgaaagagtatagtggatagtcaaaggtaaaattcttcagaaactggctaggtgagctgacccaggtgctgcattccaactggttactaattgtgaaatgatggctggaggacaagctggagagtacaatctaaaaccatgatatgttctaggaatagttttttttttcctgataatttaatattaatagagtggcaataagctgataaacagggataagatgttccagtttggcattggagcctgccatgaccaaaatgacatgcccctgagagtgggagaagtctatggcacactctatgacaatggtgttccagggcatttggagctgacagtgatgtggcattggtgtattcagacctgaatttattatgcaagcagctagcttaagggctggtatactgcagattgttgggctcaaaatcatcagaaatgtggaggctttgaaggccttccttagaaattcaagggccaccatggctcaccagtggtgttatggtgcaatgggcgctctgcagtttggactctcctatctagaaggctcagcaggtcattctgccaatacgcc

SEQ ID NO: 3372 - DNA, 2300 bp, Homo sapien
aaatgccctggaacaccattgtcatagagtgtgccatagacttctcccactctcaggggcatgtcattttggtcatggcaggctccaatgccaaactggaacatcttatccctgtttatcagcttattgccactctattaatattaaattatcaggaaaaaaaaaactattcctagaacatatcatggttttagattgtactctccagcttgtcctccagccatcatttcacaattagtaaccagttggaatgcagcacctgggtcagctcacctagccagtttctgaagaattttacctttgactatccactatactctttcacctaaacacagttttatagcaacttatcgctatgatttccttcttatcaagcccaccaactgcaacagttggttaatttgaaagacaacgcatgccagcaagcagacctgaaagccctctggcatgccaatgagaaatttaaatattgacctgtgccagacatcagaggaaaccaaacaataggagataccataggcactccccagatatgcaagcaaaatctgcctttgacaaaaaaccagtgttataaggaagtatgaagagtcataaaagccatttttaccctggtgttcacttctgcttgttctgcttttggcttctgttatgcctgacccagcatgactctaccttcttcttcattacacatgccaaaatttgctatcctgagatcaggaaccgtcatatatggtgtgaaaagtgaccaacaaccctcggtgccatcttaattccaataaccaatacactggaatgggtgtgggccaacacagtgataatgagaaatatttcccacttcaggagtgctctgattgccattgaccctttaaatgggctaaaccacctatgatcatgccccggctggtccatgaaagcaagctccacatcctagatgatgagacattctaggaaatcacctaggagttccccaacccatgtcctgttgctgcttcatcagtgtttgctttcttgtttctgacaccatactcctgggtctggtagattttgttacctgcctttgacttatttggatatgagagccatttggattccacatttggatttccatatttcggcacccctgcatagtttagagatttgcctgttcctttggcttcagaatttactaacattattttagtaatgttagtaatgttttataatgttagtgacttttttaagtttatagagaatttgctgtaagtatagatatgctttcttattggcttattttttctgcagatatgcatttctaattgtataatgcaaattaatggaaaataagacttagagaaatgtatctatattaagaaatatctgtataagaaaacaatatgtcagggcatgtgtaggttacctaatattattactgttcgaagaaataaacaagctggtaagttctatactgaaaatagattactctctggcccactatttatagtgattctccctcagattttaagccacatgtgtcagatgtttttgtccttttatttatttctttatttaaaaaaggaatctccacaaaaagaattccttttaaatgctttaattagggataaattgtatatccgactccaagtacatctctcttttttgcattcactctgaaacatttaagtgtcactttaggtaactatcagggttaggtgtgaggaattcagggtggagcaaaaagattgagtgtggttgaggaaaactaagacttggtagtatcattggagagaagactgcatctttgggacagaagagcaatagagtgtgacaagcccaatgataggtgcttgtaggaagggctgtgggagctgtggcaaccttgccaaaggggtcagaggacatacagtgaaagggacatctgaaccaagttcccagaagtcaaaatttaaccacatctagactcaaaattctttccaaagtagaatgttgaccaaagctgtttcccataattgctctgactagatgagtcacggaaacatgttgtctgccttctctgtcattacatcatttcaccgtcttctcatggatggtgcattgtgacttcgtgcattccatggccattccatatggcaaccaaaggaagggcagggaatgaggacagagtgtctccctcaggcatgtgacttttctatggcaggcccctttacagtcacattatgccccatccttcctataacatgggagagtctttctttttaggatttagtggctcaacaggtttggaaggacttgggaaggggaggcttccctgagttctgttgctg

SEQ ID NO: 3373 - DNA, 2300 bp, Homo sapien
gcaacactttcaattaaaaaggaatctaaaagaaaacagcagcatccttgtaaaagtagatgaggacagccagctggacttagctgctaactcagcactcccttccccaactcctccaccttccagccatgctgcattgacctttttatcatggaatggtatgcagcttctctgattttgtcattgtcactcataatcccagcagacttgtgttataagcagctgcttatattgctgttatgtatagatatagaaatgtaacttgtcagtggtcaaagaagccaaggaaactgagcaaaggtgactgagaacaagtgctcagcatgggctccaacacccagtagggccttttctcattgatttttctcctacaaggaatttctctcttattgaaagacagtacagtttggggaatatcatttgaccagatatcctgctccattcttggaatgaaaaacaggtgcaattttagtataagagtctagctagggatgcggatgaaattaatttataacaggaccaggctgaggaaaaacaccaataaatgctacaaatagtttgtcactttttctaacagggaaatctctaaaggatgataaagatgctagctgtgtttaatagcaaatgttaatttgggggaatatgaaataatcatgatatctttctctctttgagccaaacgcagctttggaatttttctcactgtagtgttgtaggcagaaactatcaactgaggcaggcccttgcgaggaaatatttatcctccttagcccatgcaatgatcaggtttagacagtaaaaaatctatttaagtgactggattgctcatcttttatttactttactcccagtggcctaacctggaacatatagaagaaagtagtggaatggtttttccagacgcacttcagttacttcaggtcctcagtgtttaataaggttttgggagagaaaaaaagctattgctgtgtgaattcaataaatatttaaaaaatttaaaaaatcagtgagcattatttctgccatcatgtgatctgaactatctgagtagtatcataaatcttgggtgatgggttaccttgaccaacctccctttcagtaagaaacaaattattaacagaaagtgaaagagaaataaacctattcaatgtttcaagtccctcagaagagggtgaggcagctccccagatcgttgctagatccagcctggccaatgaaccctgaaaaagcccaactcctgctttcatcatggaagcacgggacaaagtgtctcttcctaaaaacagaagttagaccagaccccttcctgcctatgattcttcaagaagcattgcatcatcaacatcaggcataagcattaataaagaccctaaataataacagagacgaaacacatcgcaaagagagttttcttttatcccctttaaaatgtaaatactcccaggaggaatcagccaacatcattaggggttaatgcatatgtagaataactagggccaggatataaaataagaaatacgtagggaggagagaaaggcatccttgagacgactccaagaaggaaagttggggatgaggcgaaatttctgattttaccttaaagtgaccctaattcgatgaccttttgtggtttttttcttttttcttttttcttttttacttggccctgcccaagcaggacctaaaaacaaacagacaaaaaaggttactaacaactgttcctctccacgaaaatctgcagtaaaaggtaaaagatgtattcgttttgaagagaaaccagagcttgcgatgagcttctgtatctccgtcagccctctagcatgacattaggaaccctccaggagatgagtcttcacagcccgggttggcacctgcagacacgcacttttcaacgcccgcaccctgcccggggccggctctcccacccaggcctctctctgcttcagcgccgccccggccgtgggagtcggcgggcgcagtccacagctccaccaagacacagctgtcggggttccgggtgcgccccgcccgcggccccggtgtcccgcccctcgccctcagcccccacccgacggtctttagggtcccccgggcacgccacgcggacccgcagcgactccacagggactgcgctcccgtgcccctagcgctcccgcgctgctgctccagccgcccggcagctctgaggatggagaggagggcgcggagctcctccagggagtcccgcgggcgaggcggcaggactccgcacaaggagaacaagagggcaaaggccgagaggagcggcggaggccgcgggc

SEQ ID NO: 3374 - DNA, 2300 bp, Homo sapien
ggaggggcaactttccttaactggcagttaagcacatcagtactaccaagcggaacacttggattccatcccttctctgaggagcttgatggcataaatcagaagcaagcacagagtttgtcaggtttgaagcccttatgatggtatgtgtcaagtcagttgtagctaatctgtccagggagaatactggcttcattacacttgtacagttgagttcttccagcattactgctgtttaatagaagaggattagtcatcaccaagaagacagcagattagccaaggaggtagttatgcggcatgctccggtgatcgccacaatgtgattgcagtactcttagaagcatcatatcatcccagatatgttctttcaagcccttggagccctcctttctaaattcactgtcataatttagtatctgtttaatttttcagtccaaagagaggaaatcagttgctgagtaactttctttttgactgcggtctccttggtgcaaaaacaaaatgggaaaaataaataagaataactcagaaattcaaaaggaaatcacaaattcagctaataatagcattttgagtatattttgtaaaccaaataaacacacaaaaggctattttttccaaccataagagacattgtctgtccttttgccaaggtggatgtgttagtctcaggccctcctgggccacactgccaaactcacacggacttctgcattttatgtatttagataagatgtgtgaaaatatatttgaataaaagaagttcataaatatgcattgatttttgtacagacaaaaggcacctttcttaatttataaattgaactggatgtgaactaataatgtgcaactagttgagataagagggttacaaatcattgtacatggaaaatattcccagcagtaaacacttccattaatgtgatctacagcttttaaaaaggagcatctcagaataagatggtggtacaatttgcttgttaaaattgagaaaaaatagacacattggaatatattagaaagggaaaagaaggaatgtgatttcttctgattgaaagcatgatttagatcagatacagtttttgctaaccaagaccaaggggctctggcaagacagggtggttttccgaatgccagaccgaggtgccttacgaaggcagctgccgatggttctgtggcacagactggctcctgagaacccagacgaccttgaccctgcacccccgccctccatgctagtacctcgtctgattcccatcgccacagtatccagctgcttgagacatcagctgccttcagtggtggtagtcaaacatagtcagccaaaccatggcatcccttaggttaaaagaaaacggggcagctttgcccagagcctgttggcactgtgggcgggggagagggttgggggagagagaagggttgtcacgatggaagatgaggacactagtctcatgtagcacagaaacacgaagtcacatgcgctggcagcctccggggtgctccttgctgtcatatattaaaccttacattttataagaaaaaaaaaagaaggaagataaggtcattgtgtgtgcttaagcctctttgttgattcaaattctttggttattttggtttgtcttgtttctttaattagactgtacattttaaggtacaagtctttatattatacaatgcccctccctattctatatctcttaaactactgttttctggttttcaaggactttataaatctggctcattctaccaaaccaactatacatccaaataaatctctagtggcacctagaatgttgtccgctcatttaaaaaggtctcctagccccacccattccttcatcagggagccagagttgcctttagctctgcagggattctcagccaagaatcagaattttctgtctgtgattttcctcaaataaacccagacctattgaatgagaatctctgcttatcagacctgtgcatccttttcgcctcttacatagccccacaggtgattctgaggcccacgcggcccgcttcccctccctgcgtcaggcccggccctagctctggaggtggttggattggttcaagggctgcagccccacctcgcgtcttcccaccgcgtcggaggacgtaggcgcctgggatcctggaaggcggccagcctctgcagccgggcccagcggctcctgagactggggcggacctcacacctgaccccggagcggctaatcctgcccaaccgtcccacctgccacgtgccctcggggctggaacgcggcgccccgggagaggcctgctgg

SEQ ID NO: 3375 - DNA, 2300 bp, Homo sapien
agccaaggaggtagttatgcggcatgctccggtgatcgccacaatgtgattgcagtactcttagaagcatcatatcatcccagatatgttctttcaagcccttggagccctcctttctaaattcactgtcataatttagtatctgtttaatttttcagtccaaagagaggaaatcagttgctgagtaactttctttttgactgcggtctccttggtgcaaaaacaaaatgggaaaaataaataagaataactcagaaattcaaaaggaaatcacaaattcagctaataatagcattttgagtatattttgtaaaccaaataaacacacaaaaggctattttttccaaccataagagacattgtctgtccttttgccaaggtggatgtgttagtctcaggccctcctgggccacactgccaaactcacacggacttctgcattttatgtatttagataagatgtgtgaaaatatatttgaataaaagaagttcataaatatgcattgatttttgtacagacaaaaggcacctttcttaatttataaattgaactggatgtgaactaataatgtgcaactagttgagataagagggttacaaatcattgtacatggaaaatattcccagcagtaaacacttccattaatgtgatctacagcttttaaaaaggagcatctcagaataagatggtggtacaatttgcttgttaaaattgagaaaaaatagacacattggaatatattagaaagggaaaagaaggaatgtgatttcttctgattgaaagcatgatttagatcagatacagtttttgctaaccaagaccaaggggctctggcaagacagggtggttttccgaatgccagaccgaggtgccttacgaaggcagctgccgatggttctgtggcacagactggctcctgagaacccagacgaccttgaccctgcacccccgccctccatgctagtacctcgtctgattcccatcgccacagtatccagctgcttgagacatcagctgccttcagtggtggtagtcaaacatagtcagccaaaccatggcatcccttaggttaaaagaaaacggggcagctttgcccagagcctgttggcactgtgggcgggggagagggttgggggagagagaagggttgtcacgatggaagatgaggacactagtctcatgtagcacagaaacacgaagtcacatgcgctggcagcctccggggtgctccttgctgtcatatattaaaccttacattttataagaaaaaaaaaagaaggaagataaggtcattgtgtgtgcttaagcctctttgttgattcaaattctttggttattttggtttgtcttgtttctttaattagactgtacattttaaggtacaagtctttatattatacaatgcccctccctattctatatctcttaaactactgttttctggttttcaaggactttataaatctggctcattctaccaaaccaactatacatccaaataaatctctagtggcacctagaatgttgtccgctcatttaaaaaggtctcctagccccacccattccttcatcagggagccagagttgcctttagctctgcagggattctcagccaagaatcagaattttctgtctgtgattttcctcaaataaacccagacctattgaatgagaatctctgcttatcagacctgtgcatccttttcgcctcttacatagccccacaggtgattctgaggcccacgcggcccgcttcccctccctgcgtcaggcccggccctagctctggaggtggttggattggttcaagggctgcagccccacctcgcgtcttcccaccgcgtcggaggacgtaggcgcctgggatcctggaaggcggccagcctctgcagccgggcccagcggctcctgagactggggcggacctcacacctgaccccggagcggctaatcctgcccaaccgtcccacctgccacgtgccctcggggctggaacgcggcgccccgggagaggcctgctggtcagggggcgctggtgcgcaggcgcgcggggccgccgtcgcagctaccttcctgcgccgattcggagagggccccctaatctctactcggcccgcaccagcagcgctggcgtcagggcgcggtgggggcaagacgggtgactggcagcagggcggtgccgggccgagaagggcgcctcacctggcgcctcctgccttcctttccacctcaggttgcagagagccgccagggcaggtggaagggccacgccccgctcccgtgagggtcaccgagagac

SEQ ID NO: 3376 - DNA, 2300 bp, Homo sapien
gggcggacctcacacctgaccccggagcggctaatcctgcccaaccgtcccacctgccacgtgccctcggggctggaacgcggcgccccgggagaggcctgctggtcagggggcgctggtgcgcaggcgcgcggggccgccgtcgcagctaccttcctgcgccgattcggagagggccccctaatctctactcggcccgcaccagcagcgctggcgtcagggcgcggtgggggcaagacgggtgactggcagcagggcggtgccgggccgagaagggcgcctcacctggcgcctcctgccttcctttccacctcaggttgcagagagccgccagggcaggtggaagggccacgccccgctcccgtgagggtcaccgagagacgttgggggtggggcagggaccccaaccctagaccaggtagggggcgggcgaagattggtggtaccttcaggtaagagggagcggggagcgccccctcggcttggggtgccagaggtgtgcggcgggagcgccttttttcgtggggccctcgccctgcagggcggaggcggcattgcgttggccttagttcctagtcctggttcccgaggagcccctgaaggcttcggatgggaagtttgcgttggagtccaacacccgacaggaaccccagttaacgcctccgcatggccaggggcagagttcttgacacctgtagcttaatcaacgcaggtggagattcagggcttgaatcgcccggccacgcgcaagccgcagggcaccctcatactactacttctgccttattacccttaaaactggagtctcagttatttgtatcccactattggtttttttttaaatcttttttcgtgggtttgcccccttttcctcagctgcgtttctgtcttcagtcctgtagggcacaatgtctgaacaagagcgtatacaggaatgtctgcggaaggaaataaggtcacttctcatttccaccaaagatggtttgagcccacaggagttggagaaggagtaccttttgatggttggcaaccatctaccactccgaatccttgggtatcggtccactatggagctggtattggacatgcctgatgttgttcgtgtctgccccggtgcaggtggtactgtaatactgaaaggtaggtttaagatttttgaaggtctataaactttgtaataaaaacaattgcttagtaaataattattctagttctgcagttattatgcatcccagccagtggattttaatttggtgggggagggagactcataggtgcttttgaggttgtgggcaaaattggaacctctgcaaaattaacaaaccattcccccaaacaatcgtgcactcacaaaagctacatttttacatatgatttcaggttcttgcaccttaagtcgagagaaacaaaaaaaggacttcttaattataaaaacatgttttaaatttcgtgaagcacaagaaaaaactattgtagggaagtttgcagttcatcccaagagtttcaaaaaatctgtcaggggtcaattagttgtaatgataatacattgagttaacttttcttcagctggcaggagagctagcaagctgttgcccaaaatgcaagaaatcgaggaaccaagagttactgtttatcgtgctgcctggataaacagctccttggagagttaaaaactgtataaacacagatactaaggataaagaagggagtaagttttcctcctaaatatgatttctatttttcacgtctcagccattccagatgaatctaccaaaggaatagcaagcttagttgcaaaacagaggagcagccataagcttcgaaactcaatgcataagggaagacctagtatttattctggaccgagatctcatcggcgagtaccttaccgaggaagggttgcccctattcttccagctgttgtgaagagtgagttgaaggacctgttggcgttatctcctgttcttctttctgattttgaaaaggcatttgccaaaagatttggacgatcattccaatacatgcaatatggatttctctctatgtttgaagtgcttaatgcggcttcagatgtcatttctgtagagcagaccagagcaggttctttgttgatgctaaagaagagtgtaacagaggaaaagccgagaggatgtccagcaggtacgcatgtgagcaaatgttggagcagtcatggcacatagaggggtgtgtaatcactaaggtctatgagttcgttagagttgaagcctggctctactacttgccagctgagtggtctcaggcgaactgttcaatctact

SEQ ID NO: 3377 - DNA, 2300 bp, Homo sapien
ttctggaccgagatctcatcggcgagtaccttaccgaggaagggttgcccctattcttccagctgttgtgaagagtgagttgaaggacctgttggcgttatctcctgttcttctttctgattttgaaaaggcatttgccaaaagatttggacgatcattccaatacatgcaatatggatttctctctatgtttgaagtgcttaatgcggcttcagatgtcatttctgtagagcagaccagagcaggttctttgttgatgctaaagaagagtgtaacagaggaaaagccgagaggatgtccagcaggtacgcatgtgagcaaatgttggagcagtcatggcacatagaggggtgtgtaatcactaaggtctatgagttcgttagagttgaagcctggctctactacttgccagctgagtggtctcaggcgaactgttcaatctacttaagccttagttttcctcatctttaaaatagaaataacagtatttccctctcagggttgtgttgaggaccttacatgaggtgagttctgtaaaatctctggcatttagtaagctgataataagtggtagctattattattttaaaaactacaagatcagctctctctagaacactgtaaatgaactttacatgaatgtgttcatataaataagctatatggaaaatgaaaagttaaaatacttaaattattagccttaacccttctaatctttgccatcactggggcttatcctaggagacactttggtaacttttgtggtgtaataataaccaccttatctgtatagcattttaccttgcattctcattaccatactaggtagggtaagtaactgtgtcttatagatagggagatcaaagctaaggaaaattaaatggcttttctaaagtcacatggctggaaaagtggtacagctagagttagatacccagctcttattgctgcccatccagtgaatttctgcccaaatgctgtgtctattaaaggctcaagagaccagtgtgaccatctgggtagtatctcccttgacaatgtacagtttacacactgagcataggcggagcctacttgggagaattctatgcttatttcagtgattttctttttctccaacttctgcatttagattaacataggtgaaccaagaggatgtgtcacaagtttataaaccaatatttacactgtggtaggtgatgtagtttgaggatatgaggatatacttggatagggaaggctctggaggccactaagtgtttcaagtctagccctcaactttatcagtattcttgaagtcctaaaacttgggaagactaactcatactattacacttgcaagagattgagttgtagaaagcactttaccaatttattgaatagtggggggtgaatattcctttccagtgattttgttcatgttctccatccatggttcctacttctgtcatcaggatatcttgaagtcaactgttgtttttttgttttttgtttttgtttttttttggtgaacttgaccttagggtaaaggaagagctaggctgtggtgaagtctggtgatgtatctttcatgtcatgcaacagaatacacctctccagtggtattcccccttcctacaaatcttgaagaatttatattttatattttattctgtagcttttcatcctcccagaactgtggtactactactagtggttatccagtttgaaaagcatagtgctaagcaggctccttggagacttttttgtctcctaaatgggatacagctttttacatattgaatcccacctctctataattagattcaggtgaccttaagtggacttttagatagccccaagcttttggtaacacttaatgatctctgtcttcctctatggatgactaataacttacactatatgtaagttttggcttgatgtaaaaatgtcagctttcttttcttaatttttgcttctaagttgaaggcagttagctcacagtagcctctgtatgtagccaccggaaaatgaaatagaagttgctagtgacaatttttctttcttcttctattactcacaaaaggtaaaatttttacccagccatttagaatgaaacaagggtcatactccacaggctttccggtagcaaagccatgcttttcacaacccacttcaaacatggaaccaccgaagcaaataatgagcatggaaaagacttccaagttaaatgtagtggagacttcaagactgaatcacactgaaaaattaaaccaggtgagagataagaatttggagatataaatatacgatgtttttaa

SEQ ID NO: 3378 - DNA, 2300 bp, Homo sapien
ttatccatgtcttctaggttttctagtttatgtgcataaaggtgtttgtagtagccttgaataatcttttgtatctcagtggtgtcagttataatatctcctgtttcatttcttgatgaggttatttggattttctctcttctcttcttggtttatttttctaatggtctattaattttatttatcttttcaaagaaccagctttttgcttcatgtatcttttgtatttttttgttgttgttaatttcatttagttctgctctgatcttggttatttcctttcttctgctgggtttgggtttggtttgtttttgtttctctagttccttgaggtatgaccttagaatgtcagtttgtgctctttcagcctttttgatgtaggcgtttagggctatgaagtttcctcttagcaccacctttgctgtatcccagagtttttgatagaccgtgtcattattgtcattgagtttgaagaattttttaatttccatcttgatttcatttttgacccaatgatcattcaggagcaggtaattttccatgtatttgcatggtttttaaggttccttttggagttgatttccagttttattcctctgttgtctgaaaaagtgcttgatataatttcaattttcttaaatgtattgaggctcgttttatggcctattatatggtctatcttggagaaagttccatgccctgttaaataaaatgtgtattctgcagttgttggatgaaatgttctgtatatatctgttaagtccatttgttcctaggtatagtttaaatccattgtgtctttaactttctgtcttgatgacctgtctactgctgtcagtggagtattgaggtcctccactattattgtgttgctgtctatctcatttcttaggtctattagtaattgttttataaatttgggagctccagtgttaggtgcatatatgtttaggattgtgatattttcctgttggacaaggccctttaccattatataatgtccctctttgtctcttttaactgctgttgctttaaagtttgttttgtctgatataagaatacttacccttgcttgcttttggtgtccatttgcatgaaatgccttttccacccctttactttaagttatgtgagtccttatgtgttaggtgagtctcctgaaggcagcagatagttggttgtggaattcttatccattctgcagttctgtatcttttaagtggagcatttaggccatttgcattcgatgttagttttgagatgtgaggtactattgcattaatcctgctatttgttgcattcatcttgcaacaatgaggtctctcagccgtgaataccagcacctgttcaggaggaggtggggggtaggagggtttgctcttggtgttgtacattctgcaggttttgacaaatatgtaatgacatatatccactattgtagtgtcatactgaatagttgcactcccctaaaagtcctctgtgcttgcgcctgttcatctgtctcgtctcttaatcccatggtaaccactgatctttttactgtcactatagttttgctttttccagagagtcatatagttggacttctacagcatgtagcctttcagattgggttctttcacttagtaatatgcatttaaggttcctttatgtcttttcatggctttataatgcatttcttcttggcactgagtaatattccattgtctggtaccacagtttatccacttgtactgaaggacgtcttgcttgtttcctcataaagttgctataaacgtgtgtgggttttttgtgtggatagcagttttcaattcatttgggtaaatactaaggagtacagttgctaaattgtcagataaagatatgtttgtttttataggaaactgctaaactgccttccaaagtggtggtaccattttgcattctcaccagtgatgagtgaatgtttctgttgttccccattgctggtcagcatttggtgttgctagtgttttagattttggccattctaatactgtatagtgatattttattgctgttttaatttgaaatcccctcatgacatgatattgaacatcttttcatatgcttacttgccatctggtatatcttctttagtgagaggtctgttcaggtattttgcccattttttaaaaattggattgtttcttattgctgagttttaagagttctttgttttgttttgtttttaataatagtcttttatcagatgtgtcttgcaaatattttcttctattctgtggcttatttctcaatcttttgacttgtcttacagagaa

SEQ ID NO: 3379 - DNA, 2300 bp, Homo sapien
tgggatattataaaagggagtcgttctgcctgggcaaggttgaggaaagcttcacaaaagagataattgagctaggcctcaaagacaagaatttgcgagtcaaggaggttatgagtgggtataatcaggtccagtcactggaaccaaggccaacattaacaaaggagtaagtggcgtgcgctgggaacaacaataaggaagtgacgttagcaccaggtgaggttgcaggagtcaggaagggggagagagtgactgatgtgatgctggaagactaagaaaaagctagattctgaataccatgggaagatgttttctcttattctggggaagcactgatggttttaagaaagccattggagtgaagggatgaagatctattagtggactagtcttgatgagagtgagactagaaaggaagagataaattgggaaaatgaaaattgccaggtgacaagaagggtgttgagaagaataagaaagagaaggagatgatgaaaactgtttgctttagagactgggcaggtttgagctggggtgaaaacttattagtagaagttcacctgtagtgtctctaagttgaccatgagagtcactggcaatgttgactagatggtatgagttaggattaggtttagccactgttagatataactttatcatagtagcttaaagaagataaaagtttatttcttcttcccagaatagtccaaatatacacaatacattctgatatgatagttccgtggtgggagggggacacagttatagaatcttgctgctccagaatagtgtgttgtccctgttcacgtggtcttgggtgtggctgaccactaccaccacccagtcatcctgccagctactgggaaggggaaaaagaagtgggggatgggagatatacctgttctattgaaagacacaacccagaattttcactcttaaaactgtgggtaaaatacacattaaatatattcattttaactatgtacactttttcttgtatcccactggccaaaatttagtattcacatagccacacctagatgcaggagagcttgggaaacctgaatgaccatttacccagttaaaatttgggggactctgttgctagagaaaagggaaagaggagaatgggcattgaggaacaactggcatgtcttccatatagttggaaatattcgagttttgaagtgcagaaaggatgcagggtcttctagagatagattgagaattaacaattgatcagtagtgtggtataagacatgaaaatgggtgagacagtatatagcaagaacaatagctaatatttgagtgcttagtatatgtgtacactgtcctaaactttcagatgttttaataaatgttttatttttatcatccccatcctaaacaaggaaactgaagcgcagaaagattgtcacagagctggtaaatgatggagtcaggatttggacccaggttattggttcctaagcttatattatgttatacttcctaaagataagtgaatctcaacatttaaggcaatacagagccaataaaaaaaataactattgacaaagaagtagagaattgtgtttgagaaactaggaaagggtttgaaacaggatagggtaacgctgcagcaagataatgtgtattgaaggctgaggagagaggctgctggatttgggagctatcaggtcactgatgtcttaaaactaatttatcctaggcagtactggggaatgaagatggggtacattctatccagcagagaatgtgagatcagaaaatgagtgtgtgtttctctttgaagaagtttgttgatgaagagatgggattcagataagagaaaacaattaattggtattaatgagcattaacaatttgacaaagtcaattttcttttctttgctttttgccaagactttctggcttgatacattgataaaaattatctttaattttttcttcccctatggatttctctgtattatggaattccacaggcgctgttattctaatcagctggtttctgatcgatatgtcatgccagaatgttttattcagccgggacatctctgttgtgtaaggatttctgaggataagtggtggtatcgggtcattatccatcgagtccttgagaaacaggaagttgaagtgttctacccagactttggaaatattggaattgttcagaagtcctccctgaggttcctcaagtgagttgaattgaattagaacaatggatgaattaaattttgaatcacagtgttgaagctctgtggggttgggatctctcttttctcttgccttcctcc

SEQ ID NO: 3380 - DNA, 2300 bp, Homo sapien
gcccagtgcctgtcacatagtaagcacatccctattcttaatattatgtttcctatccttagtcccttgtatgtccattcaaagttcattttttcctaaaaatgttttcaaactgtgattatcttatttgagtcctgggaacgtacatggtgactcagagggtcatccacagttgtgaatgactgtatctttggccactacagataaaagttactttttcaggaattgtaaatggaagggttttgtgttttaagtggcctgtcagagtgcatttggtgctggcaggatgcggtgagatgacagctcatttcagcctgaaagagtgctttgggggtgctgccaggcacataacatcaggcagtaagtgatctttctcctttttctctctgcagctcctgttgcagcttcattttgattatagcacagatgtaagagcacccagtgaattcgtggtctccagatgggttttctggcatctccatatctccctgtgataatttgggagggttgatgtttgtgggtttgtgatttgtttgtttttggtctttcatttgctcagtgtctgccaaatagacacatttccccagttttcactatttaggagcacttaaaccaccaaagattagccacagtggcaaaataataaagctattggtttaatctacaatcaaggtaaactagcggaaggcaaagatgactaaatggtttttgtcctgaagtcactgtagtgcctttcctcagagtgccagctcactccccgagacatcgatacatgtttgtgtcaagacctgggcatatgtgcagcatataagccctgttaaagcgtcagttaaccccagcttctcagtacgtgcatctgtttgtagctggttgattagctattggtctggaaagacaacatttctctcctcttcaaggacacaggatcagaacggacccttttgtttttcttcctgccagctgaaagggagcatactgaggcttctcttcttggacttcttgcctctcaaagtcttcccttgttgtttctttagaatagtctctctttccaaagaaacttggtgtatattgataatatatcctatgtatttgtgacttcaacagtcattgccttgcattgccatataggtgttctatgtatgtgttttattttgccaactataattgtgagccccttacacttatttgaattccctccagttaggtacataatatagacactctgtaaatatttttaaattagttttaatacattgttctaccctcaaggatcttagagtttcactggggaagcaagggatactcaggtgaaacagttcaataacagagcaaagcaacaataattcagtgccaaatgtggaaatgtagacccaagaggtacaatgctaaggatgtcagaggaaagtcacctagctgggccattctgagaaggctcctagttgcctgtaacagttgttacttgttctaagagaataagtcagtagctgctttcagagttggcctggttttacaaatgaatctagctatcagagtagcattactgcaattgtcattttgtcctttgcatactgatatctctgcttccccaaagggatttattctacagacaagaccagctcctggcccctagaaataccacagcgaagtttacttctgtcctcttttcccactctccaaagccctttcatcatttgtattttttttaaacttctgtttctatgaaaagatttatctttatggttcagctctctaaaagaaagagctgatagcatgagaatgggcatagcgaggatgcatatgccttcctgcactgctttctgggtgctgcacttgtgcttttaatcctgctgctgtcaagctccattaggagatttgagcatcagcctcctacctttgggatctggccttccatcagtcctggccaaaatgaggacagcgtttgagataggtaatcaaaaagaaagacaggttaggtatcacaaagagccccatcctaattcactatcctgatgtcacagtcaccttacacatcacacaggggcatttatcctcccacttgcaagcactgagtgccattaggggaagccatccgaatgccacgtgctggcatccatacagtgatttaaaacagcagaagatgaaggctaagaaatgatttcctctttctgggaacgtaggacggtgcagaaggaggagaacccccgatccccacccaaggaagcaaagttactcagaccaatcctggtgatcatggggtgacagatgttacagccttcacatctggcctcttttgtagcttt

SEQ ID NO: 3381 - DNA, 2300 bp, Homo sapien
aattatgatattttactatagtttttgcaagatattaccaatgagggaaactgggtgaagggtacttgcaatctctctgtattatttcttacaattgcctacaaatctacaattatctcaaaatgaaagttctaatttaaaaagcgactcttgatcaaaagataccattaaatgagtagaagatacttgcagtctctaactgaccaaggcatggtagcagctagactttataaacagcttttatgaatcaataagaaaaagtcagctcaaaaaaatgggcaaacatttgaacaggcactcagaaaacagaaaactcaagtagcctataaacatatgtagaagtgcccaatttcattggtaattagggatatgaaacgaagatcacagtgagacaccattacatctccgccagactggcaaaacataagaagtctaataatattatattttggcaaggatgcggagcaatggcaattaccgtacatctctgatgggagtctaaattttgtggccactttggaaaacaatttggcatgatctaataaaactaaatatatgcataccctatagtccagtaatttcaccccaaggtatacatcctaaagattgcacttgcataccaggagatatacacaaaaatgtcattagcaatagcacttgtaatagccccaatgggaaaaacccaaatatctaaagtgccagaatggacaaagaaattgtgatatgtccatacaagggaatattaagtagcaatgaaaatgaatgaactacaactacatgccacaaaagtagatgactcttacaaccaaatggaagaagaggccaggcacacacaaaaatatgcatgcaatattattcaatttatagaaagttcaaaaccaagcaaaactaaactgtagtggttagggatacattacaaattggtagaaactataaagatacgtaaggaagtaattaccataaagtcaggatagttgctttagggggaagggaaggacttgtggaagggaattggtggagcaggggaacctctggggtggtagcaatgacctgggtggtgtttggtttatgattcattaggctatgaaggtacgttgttttcacttttctgtgttacagtttataacaaaatcacacgtcctcttcatatttcattgttttgcctttgagatgaggaagaatgtaggcacgagccttaactgtgctgagaaaagacggcacatgaaaatctgagctcaaaatgtaaaacctgtgagtagagttagagtaaaaagtggagtgtgctgcaacaacagtagacttgctggaatgatgaggtggtggcttgccttgggatttttgttttttaacagtgtattaggaataataaggttgctccaggtgctaaatttcttactccccttctttagaagttggacctaggctgagggtccacagtttttaaatgttttggagttttctgtttttgtttttcaaatggattccctgatcacctttgccttgaatccccagaactaacctgcctaagaagagaggaaaactgttgatgtagtgggaacgctccctcctcgagcattaaccgggttgaccccacccctctgtcctcgctgtcttcagtccaatcaagatcggaaagcaggatcaagagaaagatgatcagaccggaacaggtaaacgttccatatagagatgcttcggaagtgcggagaagtgacagcttatcccctctcaggccgtcatgttctctcagcagaccctctgaattactgatgtcagaacttattggctgggctacagcacataagcaactcctagagttttaagacattaaaagaaggtgatttcagacaagaaatctagcgcaccattcaggtttctcctcgtgtcgaggcattgcttctctcccttcctgcctcttcctgccagacttcaccgtcacagctctaatcacaccctgactgatctgatcccgccctgccacgaggcccgggtacccctcagcggcggggacatccaggtgtccctggatttccagggcacagtgcgggccggaaataggaacacagaggagcccttcgggaggctctcgaggcagtctctttccagtggatagcgacacaccctggtccctaagattctcatgctctccgaattttccgtcctggacccgatctgtagggcgcaaagtcccctgtactgaggcgttcccagggcgcccgcctcccgcgtttacatttcttaggcaaaaaggcagcggagctaagcaggggtgtttggaaggcgcccgttgcgctgtttga

SEQ ID NO: 3382 - DNA, 2300 bp, Homo sapien
acatacctgtaatacttgggaggctgaagcaggagaatcgcttgaacccaggaggcggagattgcagtaagccaagattgtgccattgcactccagcctgggcaacaagaatgaaactctgtctcaaaaagaaaaaaaaacaaacaagaataacaaacaactagatggtgagcaattagacttgcccctcttgatttttgacttttttttagccttcaaaaggatttcattcaactttctatggttagcttttaagaatattatctaaaaactgtgtaagctttttttttttttggatggattgaaacctattatggaaaggctgtcatcattaatgttatcccatacattatggggataccatatgtggcacccatttcacagaagagacgtacaagagatcgctaagttttaccaggttagacgtgattatacagaccttattattcccaaggcacacatggagtaaagaagaaatatagtcctaagaaattaagctagtcctagtataaatgatccagaattcttcctagtgccaacatatcagttggtttgaacccatgttaaatagtcatgggaaaacccatgagacatttcttatctgccttaactaacctgaataatttccaaatgcatgtttctaataataatgtgaacaactgcaaaacccatgagtcgtctgaagttttatcatttacaggtatgtgacgcattcccagactcttcagccaactgagcatcagcttcttcacagcaattgggtcctgattaatgtcctcccaagacagacttcattggatccacgatcaagaggactctgccaggtttttctgacccctctacattgctataaagtgccaaggccttaagacttgggtacgtgtgttacaacggcaagagtgccagcgccaacaaaagacccattggacctgtcagctcctctgtttcaccaagcagacacaataaccttaccaacaaagcagagtaagccaagtgcctctgtgtgacaccaccagcagctgatgacgcataagaaaaatataactaatttagactagagccctatctcttcttgagaagctgggatttgaaggagctatcctgagatctgtactgctagtaagtgactgataacattataaactggatcggtccctgagttcagagactgagttgcaattgagtgaaaaatagacaacgaaatcttgaagaattgcacggaggtgcaagccaagtttatttggctctccaaataatattggttgaactaagaaattggtaaacgaaacctgtaataggactggtgtttgggcgtctctctctgtcactgttgtctcttgctgtcacattgctgtctgtgttgtctttctaggtccagatgttttcagataattcacattgccctgattgtggacaacagtggttccctagtttagaactaggccactggttgtaccaaactgaacttgttgaaaatgaatgttaccaggtattcttagaccgtattaacagagctgattattgtcctgagtgttatcctgataatcctgctaatagaagccttgttcttccttggtctttcccacttgagtgggctccccagaatctcaccagatggacctttgagaaagcttgccatccatttcttctgggtcctccactggttagaaaaagaatacatgactctcgagtagctggttttaaccctgcattacagttaatcttgaccagaacagataaaaccttaaacaaaaaactgggccaaaacaaatagcttctataatagtcaaaattgtcaagtctagaggcttttgtgtaggtagcccaaggaagatggaaaaataattcatttctaagtctgacccagattgtcactactttgggaactgcttaaattgttggatctgcttccgtggcctatacatattttattcacatgaatttagttagtattccagccagcctgttcatctagactgaggctaatctgttcatctagactgaggctaatccgtatttcctataaactgttttggaactaacttaccactcctaaaaaaatttctgcaacctaatgagtgtcatatgacaaagtagtcctagaggggaagtcctatactgtgtgcttcatagtggtatttctaatgataacttttgtgggaaagcagcctcgttatagctggatcctagattagtccagtgaattttaataagaaattacactgttgtaaactcacctcttatgcattggtcagtgatgagatatatatataaatagatagatagataaaatttgctct

SEQ ID NO: 3383 - DNA, 2300 bp, Homo sapien
tagagacccaagatttaattcagtagctgaagctttcactggtagctcttgtcagcagaccctcagggaaatctattatgccctgtgctatcagcaccaagtatctagtcattgagtcggaaaccaagccttttgtccactctgcctgaggaactgaattagtagccctcacccgtacattgttacctaacctcagaaaacacatcagtatgtctacttgactctatttcacccgctctgggacttccatcaaaatatgggccccatgttgtcgtagcactatcagagcctcttcattcgccttttaaatttaccattttaaaatctgagaatcacagctattacttctgtaaggagagtgctttggcttaccacaactaaggctataattccttctatttttcaggccagatctttatattttaactcatgccctccccagcgtctcttattactctcataggatcaagtctcagaatttacaaaaagaacattggagaaaggcatggtatatatagtattctgattctgtgataccctctaggtggccttctagttgctccatacatcctactgtcccaccttatttacatgctacatccagtgtcatgaaggaatgcaaagatgatgataacatctgcaaattccaacttatttactatgcattttccaagaatagctcaggactattgctcagggctgtgccttacttgccttctcagaatgacacggtgtataaaccaataaaactaggtggtgggcacccgggcacggtggctcactcctgtaatcccggcactttgggaaaccaaggtgggcggatcacctgaggtcgggagttcgagaccagcctgaccaacatggagaaagcccgtctctactaaaaatacaaaattagccgggcatggtggcacatacctgtaatacttgggaggctgaagcaggagaatcgcttgaacccaggaggcggagattgcagtaagccaagattgtgccattgcactccagcctgggcaacaagaatgaaactctgtctcaaaaagaaaaaaaaacaaacaagaataacaaacaactagatggtgagcaattagacttgcccctcttgatttttgacttttttttagccttcaaaaggatttcattcaactttctatggttagcttttaagaatattatctaaaaactgtgtaagctttttttttttttggatggattgaaacctattatggaaaggctgtcatcattaatgttatcccatacattatggggataccatatgtggcacccatttcacagaagagacgtacaagagatcgctaagttttaccaggttagacgtgattatacagaccttattattcccaaggcacacatggagtaaagaagaaatatagtcctaagaaattaagctagtcctagtataaatgatccagaattcttcctagtgccaacatatcagttggtttgaacccatgttaaatagtcatgggaaaacccatgagacatttcttatctgccttaactaacctgaataatttccaaatgcatgtttctaataataatgtgaacaactgcaaaacccatgagtcgtctgaagttttatcatttacaggtatgtgacgcattcccagactcttcagccaactgagcatcagcttcttcacagcaattgggtcctgattaatgtcctcccaagacagacttcattggatccacgatcaagaggactctgccaggtttttctgacccctctacattgctataaagtgccaaggccttaagacttgggtacgtgtgttacaacggcaagagtgccagcgccaacaaaagacccattggacctgtcagctcctctgtttcaccaagcagacacaataaccttaccaacaaagcagagtaagccaagtgcctctgtgtgacaccaccagcagctgatgacgcataagaaaaatataactaatttagactagagccctatctcttcttgagaagctgggatttgaaggagctatcctgagatctgtactgctagtaagtgactgataacattataaactggatcggtccctgagttcagagactgagttgcaattgagtgaaaaatagacaacgaaatcttgaagaattgcacggaggtgcaagccaagtttatttggctctccaaataatattggttgaactaagaaattggtaaacgaaacctgtaataggactggtgtttgggcgtctctctctgtcactgttgtctcttgctgtcacattgctgtctgtgttgtctttctaggtccagatgttttcag

SEQ ID NO: 3384 - DNA, 2300 bp, Homo sapien
tatgaaactagatactctgctgtagctattatccagactataagagtggctgaaaagaggtgacattacagtgacagtagagtcatagccaatattataagggatgcgctgggccactaaaaaaggatgcctcagctctggatattaaagttactttgggaatttgagaaatctggaggaattcagtgacccaaaaaagaagaccggtaagaaaagaaatgattaaaacaaagaatacacttaataattcatttacttatcaaacgtgtgccagcaatgaggaagactatctttagggaatttgtcatttattgggaacgacagaaacacgaaaaattacaattcagattaaatggcattaattcacacacttaactattagggctaggtctggaaatcctgtgctcttgagactgggttcctaaatcagttattttatttcatttttaattaatttatttatttagagacggagtctcgctctttcgcctaggctggagtgcagtggtgcaatctcggcttactgcagcctcccccaactccaggttcaagtgatcctcctgcctcagcctcccgagtagctgggattacaggtgcctgccaccatgcccagctaatttttgtatttttagtagacatggattttgccatgttggcaaggctggtcttgaactcctgacctcaggtgatccatccgccttggccttccaaagtgctgggattacaggtgtgagccaccacgcctggccaaaataattattttaaatgaaacattttagaacaataaattttttgtacaggaactttttgctttagggtaagcagaagttcatttatttaaagagataaatctatccgttgtgacttagtagtacaaatgaagtaggcaaacaattttaataaggaaaagatgattaaaatattaaacaggaggaagttaattaaagacatagtagctggctccatttattccccagtcttacaaatgatagaaaaatattttaatgacaatacaaatgaaaattcctggaaatgttatactgaaattaattaaacacaataaagtgaatggaatatagtattctttttgttgaattaggacttgcagttaattattaaacaccatccaagagtgttaccaaatcctgtcacttctgccaagagagggtgattgagaagtgaaggcaccaaaaatcacattaaatgaggaattattaattcaataaatacttgagctactgtgtagtaggcagtccctgttctctgtgctggggatacagcagtgaacaaaatagactaaaagacaaaaaatgtttcctgccttcttggagattatattctatgggaggagtcgggcaaaaatcaaaataagtaaaatagtgtgttggtcaggactgttatgggaaaaaaaagaggaaaggggaagggagttttacatgaatagatttcttcttgaaatttggttagatttgtcctgaattgctgtaggtcaagaacaggaattttagacttacttcatttttcccccaacaaattgtatgttcttgggtaaattgctcgccatctcttaattttcacatttataaaattagtagatcaaaacagctattttttgtcactactgtcatttaacagaaatgctgcatacgtcatctaatctactaataacaaacttatgaggtaagtaacgttgtccccatttgacacacgagcaaactgaggtttagattaggcaactcattggattacatgctcctcttaatggcacagagggtgtgttccaggacatggtgcttgccattatcatttggtactgctgctcactgtgttggtcctatgagtttcttcagtctatgaatttcaggtcagggtggtcgacgtcttacagagatgcctgtaatcctgtcagcatgagattgcatgggacctctgcggtttggtcgcgcatttaccgcgcctgtcgctgggtcagacgacctggcagtagagggtgaaggatggagaaggcagaaggcagggcacggagactactagtcccaggattccacgggcgccttccggcggaaagtgtttgtcatatgggcggggaccctggacgacattcgggccgcggcggccgctgggtgcagccgagcggtgtggagcggagagaatactcgaagggctctcctgatactaacagttttacgatttaaaacttcgccagaatttgtaagtaaacaaaatgactatgcagcttttccatgttttagtattgaaactgatatcttgaatttttgaaaaggactttcagaaacggt

SEQ ID NO: 3385 - DNA, 2300 bp, Homo sapien
cgtatctgtaaggtttctaggtgaaggaggcagtcacagtagaggtaggtttccttatgcttacaacctagatgagagggaaaatccgatgcatatatatatgtgtgtgtgtgtgtgtgtgtgtgtgtgtgtgttagcattaaagttaccatacctctaattttacagtaagtgtctcattaatttagttgaaaggccattcctaagcctttacaagcagttttaattacaaaatatgcatattctgattattcaataatatgcagaacctctcctctgattgttcaatatgtagaatctcttgtctcttttttaatttgtccctcaaacctaagttttacaagcctgtatccaagttttataagctagtatcccagtttctacatagtcatctgtcttggtaaaatgtttcaaggagactttaatgttcataatatgaactcaatatattactataaaatttatatttaataattaaatctattaaggaacttatactattgtgttactaatgagtaatgtaatagccactttaaagagaaagccctgcttaaaacataaataaaagccacgtattaccatatcaatacttttgagcattttgttggaagagtaaatctagctaatttccgaaatataccatctaatccagactgacaaggaagagtatccttttcatttttccttaaaagacaagaagaaagaagaaagagagacagaaaagaaagaaagaagtctctcttttgttactgcagtttttaaaagctatattgtacataaagctacagtaaactaagctcctaacaggccaaaccttatctcactctaaaactgtaattcctcctgcctgtggccaaatttatggacaatattagtaaaaacatagtacacagtcgggcagggtggctcacgcctgtaatcccagcactttgggaggccgagaggcggatcacgaggtcaggagatcgagaccatcctggctaacacggtgaaaccctgtctctactaaaaatacaaaaaaattagccgggcgtggcggcatgcgcctgtagtcccagctgctggggaggctgaagcaggagaatggcgtgaatccgggaggcagaggttgcagtgagccgagatcgcgccactggactccagcctgggtgacagagcaagactccgtctcaaaaaaaataaaataaaaataaaaataaaataaaaacatagtacacattacgacttaagtagttgaaatttgtgccaagtttgagcaacaaatgagttgctcaaaaacattttaaggtgattacttggaagaataaacaaacaccttcaaacttttcagaatcgctcattgtaactggtatccaaattacaattttttaaatctattcactccaatcatacaaagccctacaagcagttgtatatttgaaggcaatttaagctttctttcaataattattcagactttacacgaacttaatcgaccttctctgaatgtgtctaaatttggttaggtatttgcagattagccacatctgtaaacatttgtataaggaggtgaaacaaatagattttaccatgctttcttattccataaagtccataaagcattctaaatcaaatgtagagtatcacgtcacatccagaataaaagtaaaaataatggatcacaacttaaaattacagtgctgtctttaattaaaaaacttgttcatttctcactgtgcacaatgtagcactaacatggtcttccgaacactgctgcttggtataaaaccgagaaatattaaagaccaggaataaggttatgtgtcctatgggtacatttcggaaaagaaaatacatccaacgagtatgactctagataggattttgtacaccctcaacaagtgacaaaattcaaaactaggtaaccgccctcataaggtacttgaaactaaaatttttgccacgaaaacatggcatgtgcaaaagttctctctctggccatcactcctgctaaggacactgggaaggacatggtcaacgtagcagtcgatcaaaaagattccagggaaactgcgcaacagcctggggccgagaagcgaaacttgggtcttctccaccctcgtcgcactccttttccccgagacttggtactgggagataggacgggagtctcctacacgcagtcaacacttgccacgagcggctagacttaggacaggcaagttgccctgccatccttctatcgcccccacccctcctttacttaagggcgatggcagagacgtcctcctcccccttctcctcctctttggtgcctccag

SEQ ID NO: 3386 - DNA, 2300 bp, Homo sapien
aaaagaaagaaagaagtctctcttttgttactgcagtttttaaaagctatattgtacataaagctacagtaaactaagctcctaacaggccaaaccttatctcactctaaaactgtaattcctcctgcctgtggccaaatttatggacaatattagtaaaaacatagtacacagtcgggcagggtggctcacgcctgtaatcccagcactttgggaggccgagaggcggatcacgaggtcaggagatcgagaccatcctggctaacacggtgaaaccctgtctctactaaaaatacaaaaaaattagccgggcgtggcggcatgcgcctgtagtcccagctgctggggaggctgaagcaggagaatggcgtgaatccgggaggcagaggttgcagtgagccgagatcgcgccactggactccagcctgggtgacagagcaagactccgtctcaaaaaaaataaaataaaaataaaaataaaataaaaacatagtacacattacgacttaagtagttgaaatttgtgccaagtttgagcaacaaatgagttgctcaaaaacattttaaggtgattacttggaagaataaacaaacaccttcaaacttttcagaatcgctcattgtaactggtatccaaattacaattttttaaatctattcactccaatcatacaaagccctacaagcagttgtatatttgaaggcaatttaagctttctttcaataattattcagactttacacgaacttaatcgaccttctctgaatgtgtctaaatttggttaggtatttgcagattagccacatctgtaaacatttgtataaggaggtgaaacaaatagattttaccatgctttcttattccataaagtccataaagcattctaaatcaaatgtagagtatcacgtcacatccagaataaaagtaaaaataatggatcacaacttaaaattacagtgctgtctttaattaaaaaacttgttcatttctcactgtgcacaatgtagcactaacatggtcttccgaacactgctgcttggtataaaaccgagaaatattaaagaccaggaataaggttatgtgtcctatgggtacatttcggaaaagaaaatacatccaacgagtatgactctagataggattttgtacaccctcaacaagtgacaaaattcaaaactaggtaaccgccctcataaggtacttgaaactaaaatttttgccacgaaaacatggcatgtgcaaaagttctctctctggccatcactcctgctaaggacactgggaaggacatggtcaacgtagcagtcgatcaaaaagattccagggaaactgcgcaacagcctggggccgagaagcgaaacttgggtcttctccaccctcgtcgcactccttttccccgagacttggtactgggagataggacgggagtctcctacacgcagtcaacacttgccacgagcggctagacttaggacaggcaagttgccctgccatccttctatcgcccccacccctcctttacttaagggcgatggcagagacgtcctcctcccccttctcctcctctttggtgcctccagccaggaggcgggagcgatccacagcagctgacccagctcaggcactgcctctctcacagccctcaagacacaccatgggcccagaggcaggtttgctacacagcagcgacgacgcaggcggcggccccagcgactcgcaactgcctccctgaccacagcggccaccgcccaacacccccgagaagccatcgccaccaccggcaggagaacctagggtccataaagccatcttcgcgatcgactaaagctacgtcaacaactatggcgggcgacgggcggcgggcagaggcggtgcgggaaggatggggtgtgtacgtcacccccagggcccccatccgagagggaaggggccggctcgcccctcaaaatggcggcagcagcgatgcgcctgcgtacagaactcctccgtcgcgccagggccggcgggaagtgaggttctcggacgagccgccagaagtgtacggcgacttcgagcccctggtggccaaagaaaggtccccggtgggaaaacgaacccggctagaagagttccggtccgattctgcgaaagaggaagtgagagaaagcgcgtactaccttcggtctaggcagcggaggcagccgcgaccccaggaaaccgaggaaatgaagacgcgaaggactacccgccttcagcagcagcactcagagcagcctccgctacagccgtctcctgttatgaccaggagagggctgcggga

SEQ ID NO: 3387 - DNA, 2300 bp, Homo sapien
tcctctaaaaaacagacataacaagagttaaaattcagaatatatgacctgggagatcatggcacagattatgcatttttgtaacaatacataagcaaaaattcaagaaattcgtttctttagaaacaggtggttaggtttaccaaaacttaggaaatataccagtcagaactcctcttgagacagaatacaatgaattcaacagaatataataatatttgccattgttgttttacaaaaatatattacttcagaaaatcaaaaagatggggtagagagtcacaaatgatgtggaagaaagcagaagagtgaaaaatgtttagatccttaaagatttaataaaataggggtaaattctttacttgttaaaaaaaagttagcctgtataactgcactaggctctgtggaactcaatacaatgtaacatattttttgcctaccatgtacaaagcattcttccaggtactgaaaaatactgaattaaaccaagtacttaaattactatcaaatatattataggctccttgtctgcaaaaactttgtaatcttaaaagagataaaactaacacatatatgggctaaactgtcttcagttgctacacccaaaaataactgacataactttaacataaagtttccaaaatcaagtcttcaaatctgtcagtaccttcacgagtcagcaggtaaacttgcagcctatcaccgtgctctaagctgaaaacccactcctccgcctatcaatagtctaccacaaactatgtcatcccattgtgactcaggtccgctgatttttacctcacaggtgccttacatgggattaacatgaaacttcatctgtgactcagtgttaggtcctaaaatggggggggcagggtgggagaggatagattaaggaaactgattcacctatgacttacctaacactatacactcactttgtcagcatcccttttgtccatttagacgaaaactctaattaatagtcttgtttttcaggttactttgtcagtctgatttgccagactacttgaggttacagtgacggccaccaaagtggcagatttttggcagggaccaccacactggagaaacagcaatcagctcaagttatcaaacactggggaacatcagttcaggaaaaatgagttaccccatttcggtgaaagtattgggtgaggtctcaaatcaattcactaaactcagcaatccctcgaaatgcccactcacaaaatttctccttcctctctgcccacctgggtgaggagggaaaaagactgaaaggttagatcctcagctggggactctggcccgcgagcgttaaagaaggaaatggaagtggtttctgtagaaacatccgcagggtagagggaaccgaaatgaaaccgaccctgcagtaattcgctgtcccctcgtgaaggcctgcagaaaaaggcagctctgactcccctaaattgatgcccgatgttgggcagagcgccccagccctgcccgggtcgctccacacgaccatctttccactcctccggtcggcgcttccttccccgctgcgggtcagggtggcccttgcacggcggcacaagtccagagggggctgaggaataccctttagccaatcccagtacttagtacccaggcgggcatgagctccaccgaggcgcgcgcccgcccccgcgcgttccctggctcgcggctgggactgttacctccgcggtcctcaccttcagaggaatgagagtcccgcagccctctcctggtcataacaggagacggctgtagcggaggctgctctgagtgctgctgctgaaggcgggtagtccttcgcgtcttcatttcctcggtttcctggggtcgcggctgcctccgctgcctagaccgaaggtagtacgcgctttctctcacttcctctttcgcagaatcggaccggaactcttctagccgggttcgttttcccaccggggacctttctttggccaccaggggctcgaagtcgccgtacacttctggcggctcgtccgagaacctcacttcccgccggccctggcgcgacggaggagttctgtacgcaggcgcatcgctgctgccgccattttgaggggcgagccggccccttccctctcggatgggggccctgggggtgacgtacacaccccatccttcccgcaccgcctctgcccgccgcccgtcgcccgccatagttgttgacgtagctttagtcgatcgcgaagatggctttatggaccctaggttctcctgccggtggtggcgatggcttctcgggggtgttgggcggtggccgctgt

SEQ ID NO: 3388 - DNA, 2300 bp, Homo sapien
gggccaagatccagttatccaaagagtggtgagagtcaaggccacagtaatcaacaaagaatataaagaaaaatgcaatcttagtgtctactaaaaagtaggagaaacaagggagccatattgaatacctattaccggcctaacactgcggagacgtctgggaagggccacaaacctttccacagtaaacctccaatcttgttccagagattaattactctcatgaaactatatgcaactagtacaaaacttgatagattcagggccaatctgtagggtaaacacaagagtaacgggatattagaaaagaaagacattgatgtgcttggggaatttaggaggcgaggagaagacagaccaacacaaggtataagaagtagaaattgtgcataggctgataccagggtaaccctgctctgagcacagtgacagaactttggtgtcttctctgttgtcaaggggatagcatggggctgaaaaagtataaacaggctttggggcaaagcagatcccaaagcttacagctcccttttattgatggtataaaattgggcaaattacttagctttttcagtacttgtttctttttctttctttctttctttttttttatttttttgagatggagtctcactctgttgcccaggctggagtgcagtggtgcgatcccggctcactgcaacctccgcctcgcaggttcaagcgatactcctgcctccgcctcccgagtagctgggattacaggcacccgccaccacgcccggctaatttttgtatttttagtagagacggggtttcaccatcttggccaggctggtcttgtactcctgacctcgtgatccacccgcctcggccccgcaaagtgctgagattacaggcgtgagccactgtgaccggccagtacgtgtttcttcgttttaaaaaagtgagtatatttaataaggtggttgtttacattcagtaaaatagcgcatgaaaagcatctaacacagggctttaaacagcaagactgggcaaaacctaaataacattttccttatgttgtcttttttgctaccacttgcaccatacgattacccacatttcctgtcccctccagtgcagcttcctggagacacttcacacgtatgcaggacttctgtacatcctactcaggcacagctgtaggccctacaaagagggaccatttactgcctcctgctgtcattgatattcgacaaacatttattgagcacctacaatgtcctagttactgtgctaggccattttggggtatagagagataaaacagatcttaaagtcttcacgacacttaaagatgagaaacagtctctgggtaaataactatcggagttcagaaggtggacagaagtggtgggcggcgagtctgtgtgcagtgagcacctagcggaagatggcattatttgcagaagagaggtcctttaagccaagtcttgatagatgatttcaccacgcggagattgggaaacgaggacaaagatatgagaagatatgttggccacagagagcctctcaaagcactgttaaagcaaagccaatacttaatgggaggaaactccgttttacttgcgtggagtcttaagtcattagatgcatgctaaacagaactgtaaccctcgcgaataaaacggccacagtgacagcagtgggtaacggcagagctgcaactactctgacaggggtgacgacttatttggacgacagttggtgaaacattgtaaactctcagaagctgccgtttccagactttgagttcattcttgtcgaatccccagcttgttttctcagcccggggtgaaatgcgcagccaaaaggcccaatgagcgtcaaagcgaaagggcaggggtggtctcttctgcggatataccttggctcctcccaagtcctacgagtttaaacttcgacgcaccaaacatggcttcttcgcggttctgctccttgttttatttcgctcccacctttcggccacactcaacatggccctaaccgaaggttggcatgcctgtggcactgtctcgggacagttctcgcgaggtttgcctgggcccgactgctcccgccctgcctcgcgccgccgccacagccgctgccgctggcgccgctcctcctccgtgtcagttgttgggctgtaatggcgactgggccgcccctgacgaagtgactcccgggccggggagcggggccagacctgcgccagagagaactgcagggagccgcagctcggggggtggcttgccctgagggaggggaggcagcctttccgccttgtcttccttccc

SEQ ID NO: 3389 - DNA, 2300 bp, Homo sapien
cagctcactacagccttgatctcctaggctcaagccatcctcccacctcagcttcccgagtagctgggactacagacaggcgccaccactcccagctaatttttgtattttttgtagagacaggtttttgccgtgttgcccaggctggtctcatactcctgggctcaagcaatctgcccaccttggtctctccaagtgctgagattacaggtgtgagccaccacacctggcgatcccatctttttcaataatcaaccactcagaacaggatctaaagttttttgggttgtggaccccagtgagaatctgacaaaagctgtagactgttttcttagaaaaatgcacacgctcatatgatctcagtagaaacagttactatgttatgttgttgtggccttgagaatctttgtagtacttagggttttatgcttttacctgaaatgccctagatcagatcagtgctatacaatagaaccattaatgtgagccacacatgtaatttcaacatttttagtagtcacacacaaaaaagatattttacattcctaaatgtttagaacccagtatgtagcttacattacagcagctcttaatttcgattagccacatatcatgtgctcaatagccatatgtggctagtggctgctgtttcagacgttcaggtccagcctgttgttaggtctggttttataattttcttgactttttttttcatgattcatgtgctcttctcactgctgaaacatttgtcttcattagcctcccttttcataaagtgctttcctaaaataaggctcagccaggcacaatggctcacacctgtaatcccagcactttggaaggccgaggcaggcagatcaactgaggtcaggagttcaagaccagcctggccaaccaacatggtgaaaccctgtctgtactaaaaatagaaaagttagccaggcatcatggcacacacctgtaatcccagctactcgggaggctgaggcaggagaatcgcttgaacccgggaggcagaggttgcagtgagcgagatcgcaccactgcactccagcctgggtgacagaatgagaatccttctcaaaaatcaatcaatcaatcaatctaaagtaaggcttattagaatgacatgtaaaataaaaatagtctctggaggaagatttttgctagtgtttctatgagcagagaatatggacttgtgagaggtactttggctttgcccagccttctgtgcttactcctgattttctagatacgctttacaaagtttgaagctgccaaaaagtactttgtggttaacagatttaacattactaaccacatttatttggaagaaaatatttattgtacttccactttatttctacccccagtctatttattaatttggttccttatttagaagtgacatatatgaaatgccattatttgagaacttttttctctggtacttaagattttatagagtagcaaataacacgttttattgacaaatgtcaagtgaatacccaaagtcagattatcatcctgttttctggagttcttaggaaatctctttacatatctttttcatatttcttattttataatatgcagattgttatttagattatttgccattttacttgatagagggggtattgagccttgagtcataatattattaatggttattttgcaatctttaacttactggaatttctaggttttttattttttggtttctaatgctagcttagagttctcagtttgtatgactggtttcaatttgactagtttttgtacttttatgaaaagcttttaaaaagatttagctttaaaattgacaagtagaaactacgtatgtatagtgtacagcataatgttttgatatatgtataccttgtggaatggctaaatcaagttatttaacatgtattacctcattcttatttttttgtggtgagaacacttaaaatctactcttagcaattttcaagtatacaatatattattaatcatagtcacagagcttattattttttattgtagggaaatccatggtgcaccttccaatttcagttccagccatctggaatcaaagcacgtatactgtgtagatgttaatgaagaaaagactgagagcggtaactggatgataggcagtcgagaagaacggaatatacggagctgtgattttgagagctcccaatcatctgtcatcaatgatacagttgttaggtttttaaatgatcgaccagcaattgatgcattgcaaaattctgaatgtttgattaggatgggagcttctatgagaactg

SEQ ID NO: 3390 - DNA, 2300 bp, Homo sapien
ttatttttactatctttccttttggttctaattagttgcttcaaatgatttgtattagtaagatagcattgtgtgtgttatagtcactgtgttaaaatagtttcgtatctgagaattaacatttgaccattattttgaaggcacaacagcaacgccatgaaagagacttggccctcttgaaactaaaggctgaacaagaggctctggagagtcagagacaattagaagaaacccgaaacaaagcagctcaggtaacttattttgcagcaggttcttgttttttaaacctaaatttgtatcttagaaattactttagcgttcttttaattatataggagaaaaaagtgtatatataaataataaagttttagtactttttatgggataatgccatgtaattcgatttttgttacaaccttgtgaaataaattgtcaagactcatttccagtttagggaagtggcaactgaggtacgttgtatttatttatccacagatacagtaacttgtgaacagtagagttaagacttaaaccatgaaatccagattgtagtaaagtgttttttactatgaataagacatgaaataaatttataaattaaaattaattcaggaggaggggagattaaaacataacttcttttttaaaccccttttatttaaaggtccatgcagaatcattacagcaggtggttcaatcacaacgggaagtaactgaagtcctgcaggaagcaacgtgtaaaatagcagctcagcagtcagaaactgctcgcctcaccacagacgcagcacgtcaaatctgtgaggtaggtgccactgagaacacttctctttttacttctttttagtcaatctgagtaactttgatcttcagtaatgggtttctaatatcttagtaaatgcatactttgaattagtgacttttagtgggggccataccctattgaaataagaggcaccattgattggagtgtgttgtacatgtgattgaatgttatagaggcagaaaaaagatgaagagctctaaatttctgccctctggtaagctttttagaaaaatatcaactttattgatgtataatttataaacaataaaatgtacctattttaagtatgcaatttggtgagttttctctcacacacacacacacacacacacacacacacacacatctccctataaccatcaccacaatccagaaatagcatatttcctcatgtctctttgcaaccagtccctaatctcagtcctggggaaccactgatctgctttgggtgaagatgtttcatttttacccagaatgatattagttactgtcttttcttctataacgtgggtatagcccaaagtagttttattgctgtctctacataggatatcacaattcataattgatacagtttcactttattttagcagttataatttttttaaaccaaaagttagtactatttgtaaaatgacttagttattggaaatccatgaatgtactatatgttgggtactgtggagttgtacattttagtataaaactgagtctcctttctcaagaaaattaaaatgtagacaacatcaacaaagatttcaaaacactttaagtcattagtaaaaggaatagctcaaagtagtgcttgaacaaatactgaatggatggtacatgcagcacttgcagtagtggttaagaatagggaaaatgtacttgacctgttggtcagcaaagagttagaaaagaagtagtaattaaattgattcttgaaggaagatttaatttttggcttattactgcttatgttatgctttaaggttttctgtctaattcatagattgttatagctgggtgaaaccgtagaaatcatgtagtctaactctgtttttataagatgaagctgttgagacttaaagaggctaaatgacttgtccacagtatttcatctattagtggcagaatttgcttgttctcaagtcagtgatctttctttccaagacactatgctccttctcagttctctgaccttacgttttaatacatttgcctttcttgtgtgtgttcatgtttagatggcagagttgactagaactcatatctcagatgctgtcgtggcttcaggagctccccttgcaatactgtatgaccaccaacggcagcaccttccagactttgtgaaacagctgaggaccagaactgaaacagataggttaatattcattcagtcagcaaatatataatgactgtctgttaggttaatattcattcagcaaatatgtaatgagtatttgttgttataggcattattcttggt

SEQ ID NO: 3391 - DNA, 2300 bp, Homo sapien
ctgtgttacagatacatggcataacaacattgaaggggttgggggaaagagctgatctaagtaagtaactttggaaaatggtgtcttgagtggaaactattaatataagcctaatacaaaaggaacggtacataaacctatactctaattggataatagtttttcacaggggtacaggttaacagttctttacatatatattgggtttgaacaaataagtaaacgagtgttggatggtcagagccaggtttctcagtgttggaagggaagatacacaagaaaggaagactagaatgaactctggtactggatcatagacataagtacgaattcatgtttagctggctgactggatgggtacaaaagcaattgtaattgtatgcgtaactatgtgcacacacgtatacatggattaatatacatccatatattacctagctctgtccactgagcaagtgcagaagcagtgatacaactgtagtaacaaggacaactagtgcctacaaattctttctttctttctttttttaagagacggggtcttgctctgtcacccaggctggtctcgaactcctggcctcaagggatcctcccaccttggcatcccaaaatgctggaattacaggtgtgagcccctgtgcctggcccctagattgtggtttctaaatatcattctttaataaaataaataagagctctttgtagaaatagctgattctagggctgtagggaaaatacagtttgagcctggagtatcttgtagtaccagaaagggaagaagtattcaataaaaaaaaggatgcaggaccatggcaaaggcacacaggaaccaaactgaaagagctgtcatattctaattaagcttggaattaatgagttttttaaaaagatatttttacttcatttctttgattgatagtaatgttaaacatttttttcacttttactatttatatttcctttgtaaagcatctgatctggccttttttcatttttctataggtgcattagtggttttctaattgatttgtaagagctctctaaattttttgcaacattaatctttatatgtcttaacctaatatttctaggtatttttagaggctttttcttgcttgtaaggcaaatgaattttgtttattatttcatgtctatttattagtgatcaattttatgaatttatgttggattgtcccataaagaggcaaagggctattaattgaatacctactgagaacaattataatgataaaatctactttctccatattcttttagactcaacgtctattgcaacagaatattctctgaaatttgatgaatccatgacagaagatgaaatagaagaacaatcatttcgatcattactaccttcagagagtcaccgcagatttaacatggaaaagagaagaggtcatcatgatgactctgatgaagaagcttctccagaaaaaactacactgtctactgccaaggtgtgtttcactttatctgtggaggtaaatggttgtggatatgttctctcaaagatatgagaaaacattttgtacttatctcatttgtcagctactagaatgatttttctaagatatcagttttattttatagttttcctatgaaatctggtttcactttccttacaaagtacaatacaaacttattttttggaatgatatataaggcctttgaggatctgagccaatattatctctctagcttttgtacttgcttcactcttctaatactttattccatttagaaatttacattcgttcttaccaaattgtaatcctcttggttaagaggaacaaattcttacccactttgtatccttgggacagtaattggcttgcagtagtttattaaaattttattggctgaataaattagcagatgaatgttaatctgcctcatgtgcctttttaaagaatatactcttacattgttggtggccttgttaaatacatagtttgtttttgtaaatgcatacctcttttagtggaattaagtaccaaaaggttagatgatgataaacaagaaagaaaccatctactttaggaactgaacatgccattctcaggaggacaagatagcttttctaaatttactatggagatggttcgacagtatatgaaagaggaagaaatgagggcagctcaccagtcttcactcctgcgtctccgtgaaaaggccttgaaggagaagactaaggctgaattggcctggttagagcatcaaaaaaagtaagttcttttgagcagttttcactaatttcttcattcataaaatggaatgcttta

SEQ ID NO: 3392 - DNA, 2300 bp, Homo sapien
ttgaagtgaactgagatggtgccactgcactccagcctgggcaacagagcaagactccgtctcaaaaaaaaaagagcgaattaagtactcattaattccttaagttcaaacattttagaaacataatgatttccatactagactaaatctgttgtatatcttattcttgtccagtgttccgttaccatcagaggacttgttggggaaatgccttgacatcaatcaaaagcattttgtattagtcggcatttatgtctccatcattcacaatttttatttctttcctgtgtagcatcttgaaggattattaattctattgtgaagtaatgctctttcatctcaactttattcaacgtttaaagagcactcctataaggaatgtatttatatttacactccttatataaggatgtatttatatttaataaggaacatgtttatggaaagaagttctaactttaagttaaacttttcttactctgttttttaaactattttcattttctattagttatttcgttcctcattcctaaactagagctttggaatatgcttaatctttaatagaggaaaattattggtctctgtgttgggctagagaaaaaatttaaattgtctatttttaaagtttatttcacgtgttccaatattattttactttttgtactaggtcatgcatgcatttagcagttatacacttaagagggtgggtgatatttgaatgttatgaatagattttttgagccttttgccaagtgcctttgttttgcataatattttgataattggcatcaaaataagtttattgtacgttcataaagaatggcaaggaagattgtaatgtcttaacttgaaatttagcaaaactgtttttcttgaatttcagtgcagaaaatcaaggcaatccagatatgaatatgtgtgtttttgcgtgtgtgtatgtgtgtgtaagtgaaggggaaatgaaatactaagttatatgtgaggaaacagacattaaaatagtctgttgtctaaaaatacacataggcaagattatacataattttacaaatccaagtgaatggctggatttatacctagattttctcacttctatgacatactgatattactccttgcccttccaaggcaataaatgttgccttgatctacaagttattgtcatgtgcatgtgaacaggagcatgctctgtcaaagagaattaacctttccaaaggtactactagactttttaatccatacacacacgcacggatctatttattattacaaaagaagaaaatatgttttttcctgcttttataactgtaaaatggaatgttcttcttacctttaaccttatgattgagctgtccatatcaggtttttttttctactgactatttattgggactagctcactttattaattatgcatcctgatatcttatagaatggatagtgtatttcaatattattaattaagtgggcctttgttagatataaagcaagatacctccagtaggtcctgttagcagtaagttttatattgtggaggtgaacaaggtatttttgtgtaaatcagtttactaaattgtattattttcaagctagattgtgatggtaaggttaagtaaggcaaatgtagtattttaaaatacatgatgaggtacagattaaaaatcacttgctcaggattacatatgtgtgtagagttgctgatatactaggttcatggccataattgttgtactgtctgttaaagcttaattgaaaactaatttagtcccacaatgtacttcttattactttacttacaaataagtaaatttaactgaaaatatagatggtggttaagcaacatatgagaagaaaggcatgtttattcaggaatcattggtaagatctataaaaatacacttttaaaaatgtcacacagagtgtaatgcctgctttaactgagtcacttataatgttcttcaggaagcatattaaaagttcttcactcagctcttacgctttccctttctcattcttcctgcctcttgatctcttgtttttaaaatcttcctccttattttgtagacactgctctcctgttcactacttcttctctgtctttacgtctcatcactgggcctctctcagtgtctgttttcccaaccttcatcccaaattccagctgtatatctacaaccagttggtcaggtaactttgcacctttttcagtgcactctttgatagagcatgctctgttctttttgtttgttttgtttgcttttctctctctctctctttttttttaatagcctggaggc

SEQ ID NO: 3393 - DNA, 2300 bp, Homo sapien
tctttttaatgtggtattaagccatcagggaatgaatcacaagcaatttgaagtggtaaaactctagtttgattttaatatgacttaaaaactattaaattatgtattaataactaaggcaaaagacagttaaatatgattatcttgttaccagaagtaatttcttgcagaatatccaaatttcatcaatctaaaaatttctcaacttccagctgcatgtcttaccaagacagcgtatctcaagatttatttataatttcaagtagtacaattagaaagtgaaaataaataggaggaaccaagccaaaaataaagtgtatgtggcgggcggcggggagggtgggaattatagggatacattttagtaataaatcttcttccgaagctcatattttaattattagattggctttatttaaatggaatattacattacagctttttattagtagttactgagttaacattattcttaagtcaaaattataaataaaagattttgtatctctttcagaaactacatctgaccagagtgatattgaaggtaggatcagagctctgaaggatgagttgcggaaaagaaaatcagttgtgaaccagctgaagaaggaacagaaaaaaaggcaaaaggaaagactgaaagcccaagaagccagtctgatcaagcagttagaggttagacataggaagaagggggtttagtatcaaggctaatgtgtatgtgacgtctaaaatgtttttaatgttgttaataaagtaatggattaggattcttcattattagtgtggtgccacattttattctcttaaaaaaaatctgagggtatccaaggacattcttgcttaaaacattaaattttattttatttatttatttttgagatggaatctcgctctgtcgcctaggctggagtgcagtggcgcgatctctgctcactgcaagatccgccccctgggttcacgccattctcctgcctcagccccctgagtagctgggactacaggcgtccgccactacgcccggctaattttttgtatatttagtagagacagtgtttcactgtgttagcgaggatggtctcgatctcctgacctcgtgatccccctgcctcggcctcccaaagtgctaggattacaggtgtgagccactgcgcccagccaaaacattaaattttaaatttaaatattaaaataacaagtattaaatattaaaattggctacatatagtggtgtgttcctgaagtcccagatactcaggaggctgaggcagaattgcttgaagccaggagtttgaggctgtagtgcaccatgattgcacctgtgaatagccactgcattccagcctgggcaacatagcaagacctccacctctaaaaaataaatattaaaataaagtattagattttttttttctaaataagaaagattaggcctttgaaagaaagattggtgtctatacccttgtaagcagagaagtattagataaataattttagcttttggaattgttgctgcttcccttccccctttcctctttcctcttccttccctcttccctgtcccctttttttctccttttctttcctccttccccttcccctttcccctttccctttcccttcccctttccccttcccttcccttatttcacagaatggtgtttcatgccacacaacctattaaatagtacacttctttgtgctatttgaatagcttctaattgataactcttaacttgaattttcccccaagccgtagcagcctttctgagtctgtcccaggctgggaacctgattttgatgtcttccttattctgttctttcctgtccaattcagtcactagttctcatggattcttctataaagtttcttgtttgtccctttccattcctactgcttccaggctagctggggcccttatgacctcttgcctctactgtctgcgtagtctcttagatgttctgcctcatactgcttttctattacacacattctgcttctctgttacacacattctgtttctctattacacacattctgccagcccggtgttcctagaacaggacattcattgtagaatcagattgaatctcctactcattgcaagaatcccttctcatctcatcaccagagaacatcattcaacttctacctgaacacttccagtaataggaattttcaaaatttcaagctaattggtttccttgttagactctaagtgctctaagtattagaagagctctttgttgtatttagccaaaatttctgtccttttaatttccacccattggtccttgtt

SEQ ID NO: 3394 - DNA, 2300 bp, Homo sapien
tgagctcaggagtttgagaccagcctgggcaatatggtgaaactccatctctacaaaacatacaaagttagctgggcatggtggtgcacacctatagtcccagctatttgcagggctgaggcaggaagatcgcttacacccaagcagttgagtctacagcgagttgtgatcagccactgcactccagcttgggtgacaaattgagacactatctcaaaaaaaaaaaaaaatgtaattcagtgagaaaataaaactgaggtgcaaagaaacatcagtgacaaatagagatttggccaggcacagtggctcgtgcctataatcccaggtacttaggaggctgaggctaaggatcgcttgagcccaggttcaaggcaacagggagctgtgaccactgcactccagcttaggtgacagagcagattcttgctcttacaaaaaaaaaacgatttgaatttaaaacttttaactcttggtttgttagctcactatattgtactttgatcatattttgcacgtttagctcttaaagtgctatatttgcagaaatagttgatctattttctttttaattcaagagcttagttgaagctcctaggaaaatgtattcttttagaagtatatatggaagtctgtttctccttcactagtttcctgtttgaaaaatgtttgtaataaccatcatacaattctatttttgcatgatttgaggatgaatgtgcaaagcaatggttccatcaacttagatacatttttcttcactttataagttaagacagtgcttaagaaattattccaaactttagaattttcagtaattttaaatgttgatacagatgatattctcttaaaagaaaaacttataaagtagccaaaacaggtcatatttattgactagaggggtttttttcactaaaatttggcttttctctaaactttggttcacaaaattgaaagatagtgattaaataattttgatgtggtgatttgttttttctttaagatgcttcactgtctggttctgagagatcagtatcagaaaggtctttatctgcatatgcaaagagagtaaatgaatgggacagtcgaacagaagattttcagaccccatctccagttctcagatcatcaaggaaaatcagagaagaatctggagattctctagaaaatgtacctgcattacatcttctcaaagaattaaatgccactagtagaattcttgatatgtcagatggcaaggttggagaatctagtaaaaaatcagaaataaaagaaatagagtatacaaaattgaagaagagtaagattgaagatgccttttctaaagaaggtaaatctgatgtcttactgaaattagtcctagaacagggagattcatctgaaattctttcaaagaaagatcttcctttagattctgaaaatgttcagaaagacctagttggattagctattgaaaatctccataaaagtgaggaaatgttgaaagagagacagtcagatcaagatatgaatcatagtccaaacatccaatcaggaaaagacattcacgaacaaaagaacacaaaggaaaaagatttgtcttggtcagaacatctttttgctcctaaagagataccatactctgaagattttgaagtgtcttctttcaagaaagaaatttcagctgaattgtacaaagatgattttgaggtgtcatctttgctgtcactcaggaaagactctcagtcttgcagagataagccacagccaatgaggagctctacaagtggagccactagctttggtagtaatgaggaaatcagtgagtgcctaagtgagaaaagcctttctatccatagcaatgttcattctgacaggctgttggaactcaagtcccctactgagctgatgaaaagtaaggagcgcagtgatgtggagcatgaacagcaagttactgaatccccttccttggcttcagttcctactgcagacgagttatttgatttccacattggtgatagggtgttgattggaaatgttcagccaggaattcttcgattcaaaggtgagactagttttgctaaaggattttgggccggagtggagttagataaacctgaaggaaataacaatggaacatatgatggtattgcatattttgagtgcaaagaaaagcatggtatttttgctcctcctcaaaaaatatctcacattccagaaaactttgatgactatgtagacattaatgaagatgaagactgttactcagatgaacgatatcagtgctataatcaagagcaaaatgatacagagggtccaaaaga

SEQ ID NO: 3395 - DNA, 2300 bp, Homo sapien
gttggagagcagaagctgtacagggactgagtcccggggaggagtacccagcaactggaattggctgcgtcatggggaggagagttagcaaggtactaacactccaattggctaacacataatttctctatgcagcttaagacttcaggcagacagatatgaacacatgaagggagtaaaaactccaacctctggaccacttcctggagtgctcctaacccagactcccacagggcttcctcccatacttcatttaggtctttggctcaaatgttacctctttagaactgcctcaagactggggcaagaggagccccagtctagggctctgagcacctgattctcttccgtccatgttcctttccatagggcaagaaatcccacgggccaacgggatgtactcactcagagctcttgcccctctcctttttagagcatactgtgagttcctgggaccctagaaaatagtgccgcaatagcaacaggtcaccagctacaggctgcctcagccttttcccaaggtctatcctcctgaggagcaaggggtggtcaaggggaggctatttgcaggtgtggacaaaactctgatgtgcagatgtcgttgttataggtgtgggcaaaaggccatttgaagtatgggacagagctggggtgccaagagaagaaggaaggctgagggccaaggacatgttccccctccaaagcactacattcgagggcgtatctcagaagggtccaagaatcctaaacttaaatgtggccttccagattatgatgaaggtatacatgtcaagataaaaggataggaattttacatcaccgtttaatttgtagttttaaaatatgtagacatgatatgtgggcctccatttgtactactgactcagttcttgcaaatattaagggtagacctgtccctgatcttcgtgtgtaaaatagcacctcctctgccactctattcttaccccagtctacatttcttcataacatcggtcaccatctgatctacatttacttatgtatcatctctttacccccactggaatgtaagttccacgtccctagagtctatattttgtttactgccttatccttatacctaaacaagtgcctggcatgacaccactcagtaaaacttgaataaatgaataacaaatctaggctcaaagctcttacaggtgaaaggggctaacctggcagtcacaaaggaaaaatatcactgtgacaaccgtctgaggagcaccttctccccttaaaataactcactcaaaacagtggagctgcaaaggtgaccagagaaaatccattaacaccttagtgcccatgacaccaggtgagttgatcgggctacttgcgagagggacatgtgagtgagcgtggagagctctgagtaggctgaagagctggatgtgggggatctgggctgctgggaaccccgaatgttggaatcgccctgacaaccttatgagggtggtcagatatgggtcctgaggaaactgattccacggcaactgcccgccaacccagcacaccccacagtgaagaggggcttctgatccatgagtagggcccctcaaatgatgttcccctttagatggtcatggtcatcagcaggggtgggtgcatcgatcctgtggggtcttggtggtcgcagaccaagcgtccctcttctcacatctaattcacaacgtctcatcgctccgcgggagcccaggaactgccctacaacagccgaaatccgggtcgtctattccaacggactcctcttccgttggatacgggggccgtgagaggccaaacaacctccgcgaggctacccccgcagcgaccgctcggcgggcgctccattcctttaccggactgtacacctcgcctcctggggcctgaggcgggaacccgggtcgcgctgctccgaggcctcggcggaccgcgaaaggatggctcaccacccggccagggccagcccctgcaacaagctcagccccgcccgctcccgcgcccaggagcggccggcggggcggggtggctgggccggcctcgggggcgggggctcgggggcgggggctcaggggcggggccacgtggctcctccttgcgggcggaggcaggcggtgccgcggcgccgggacccgactcatccggtgcttgcgtgtggtggtgagcgcagcgccgaggatgaggaggtgcaacagcggctccgggccgccgccgtcgctgctgctgctgctgctgtggctgctcgcggttcccggcgctaacgcggccccgcggtcggcgctctattcgccttccgacccgct

SEQ ID NO: 3396 - DNA, 2300 bp, Homo sapien
gaaaagggaggctcctacctgggtagagaggtgagctgccctgaagttccctgcaattcttggatagccatggagagagagccccagtttgggagcagggcttttcctgccaattctagggtcttggctgcctgggtcttttagcctggcattggcctgacccctgctgggagccatgggaagtgcaggagctggacctttgcgtttcaaaaccttgctgtttattcttatctccttcacggaaatcaaatataacacctgctgttattgagcattggaccagattgctgacacacgtagctgctaatccccaaaattaatgaaggtgatcaaatagcatgcccaagatcacacagctagtaagttggtagaagagggctttgaaccaggtccgtctggctccaaagccaatgttgtttccacagtgtcccactccatgggactggagtgaaatatttgggagggagggaacattagcgacgccctagccccaccggaggaaatggggtcctttacccagatgccggtctgtctcatgtggggcatccgtgagccagctccccagcgcttccagctgcagtgccctgtctagaaagcagggatgattacgtttctccgtagtattgttgggaaggtcaaatgcagcagtttatgtaaagggcctggattgcagctgacacatagtaggtgctttataaggatccattcccctcgcctaatgcagagagctcaccattctgccattggttcatggacttctccatagaccagttgtgagcttttcccagctgcaaaggtgggacgtgccagtgcacgggagatactccaagtcagtgcagggagacaggcatgagagtaggcatgaaattaaactgcactgtcagcctgagtgattttcctgctgaaactcaacaagcacagctgagagtctgagctgaagccagatgctgtctccaggcctctcagccctgagagaggaggcacaggggttggggaggggaaagacagcttggcttaaggagtgcctgaccctctggggtcccagttcatgcctggggtcatgcctgttatgtagaggtgataaatggtgattggaatcaggtcttttccctcccctcccaccacagtccttgagtaccaaggggctggggtcccagtggttggagccaagtgccccatgcccatgcagtggtgcttagcgtgggaccagtggctaagggcccaggttctggagccacactaagctgggatttgtagcacagttcaggcatatgcaagctgtgtgatctggaggcatgatttcacttctaagcctcagtttctccagctacaagataggagctttatatttatttatttattttgatttttgtgagacggagtttcactcttgttgcccaggctggagtgcaatggcactgtcttggctcgctgcaacctccacctcccaggttcaagcatttctccttcctcagcctcccaattagctgggattacaggcatgcaccaccatgcctggctaattttgtattttcagtagagacgtggtttcaccattttggtcaggctggtctcaaactcctgacctcaggagatccgcccacctcagcctcccataatgctgggattacagacgtgagccactgcgcccaaccaggaactttatttttattattttgagatggagtctcgctctgtcgcccaggcgggagtgcagtggcacaatcttggctcactgcaagctccacctgtcaggttcatgccattctcctgcctcagcctcctgagtagctgggactacaggcgcccgccaccacaccaggctaatttttttatatttttagtagagacggggtttcaccatgttggtaaggatggtcttgatctcctgaccttgtgatctgaccaccttggcctcccaaaatgctggaattacaggtgtgagccaccacgcccggcctgggagctttatttttaagtaaacacttatgtacctactatgtgctagtcactgttatggcattttaataacattaaccccttcagttctcagaacagcccccctgaagttggtggtattattattattgttgttattattattttgcaagtaaggaaatttggtcagggaaaggtttggtgcagtggggccaggattccaatgcaggcaactgtagtgtacggtgccgcatctcttagtctcctgagaatagctgctatttcagtgtttctctgaagataaatgaggcaatctgtgtggacactacataatacctatgcaatacaggttagctagtgct

SEQ ID NO: 3397 - DNA, 2300 bp, Homo sapien
aaaacataatactgtaataaacattttcacgcatgaaacttttataaaaaattctagattatttccgtggaacagacattcaaaagtactacataaactaaagggtatgaaaaatttatgagtttgatacatattgccaaatttctttccaaacggatgttaagagtttataagcacccagcagtattggtgagtgtccaagcccctttcgccagtcctgaactctaggatgcccctcccgcgcgtcgggcatctcacaaacagaaaaagctgtgcacgtgttgttttgtcttgcgtgtttttcactgcaaatgaggctggcgtttccccgtgtttgcttactagttatatttctatagaacacattttggtaaacactaaaaatgtcactgggttcttttgcttttttcttcttgtgtatattgtctcgcgcgcggagtcacctcgcaggtaaacaagggaagagatgatgccaacccagtaccaggacacacaaaagtcactgtgacctcattggagacaaattctaagcagcgcagacgaccaggccattctcccccgccccatgctcctcccttaaaggtgagcaggtgtcccttgtttggagatgacaccaggggaaacagcagggaaggttctggaaggctggggagggcacacagtcccccttcccgcctaagctgaaccccactaggctggaaggacacgtatgtctgcatttctggaaggaaatgccgtgggggctgggggcaggagagcggctgggtcttggggcagacggggtgggcttcccgcgcctgcagcccggaggcgtcgagcgcctgatggagcgtcagaggagacctcgtcccagcgttgggccttctgttgtatttctgccagaaactcgcgttgaggagaatttgttttaagcgtttctctacctgtccatgcatctcgtaaatacagtaagcatggcaagccctttcgctggttaaccccggcgtccgtgtgctcactgccgccctgcacgcacgaggtcgcggatggttcaaagcacccgcggtggcagccggagaggcagagcgggctctagggacctaagacagggccgagctggacgactggtggcagggcggccggggaggccccgccgcggggaggtttgggccccctaccctgcggaactggaggcaagtgcggactccggctgcaggccgcggtctgcggggacgcgcgcggggggcctgcgtcccgccacctccgcgcacagcccctggtccccttccccagcccgggccggcgccgcccgccgcgtgactcgcgcgttccgggccgagtacgggctgtcccttggcccagcctcagccagacgcgggggagagagagcaggggctgggaagtgccggcaggaaaggaattggccaggggaaagaggaggaggaagatagatggagtcatcggttacggagcgcgctccgtccggcggagcgaagccggggaccgagagcgcgcaaggcgaagacacagcgacgcagccccgtccccggcctccggaccgcctgccccgctcggccccggctcggctccgccccgcccctgggtccgaacggaggagtgaggaggacacgagccgcgcgggcttggaacccacgaagacccgcaaacccagggcgccgccgtctccgaccacctgctgccgcggcaggccatcagcagaatttatacccagggcgcgagcccgccacggctgggcggaggcggaggcggaggcggggagggggggggggtgccggcttgcgaggccccgccccgctccctgccgccccgcccccctccgccccgccggcctcactcggggcgccgggacccccactccctccggggtcggctgcccgccgccgggttgggggatgtgccgaagggcgggcctccctgcggaaagcgacgtcacggccgctcctgcagtgtgaatgaatcaaaacgcccgggtgaccgcggcctcccgggcggccggcacgcgaagggtggagggggagggggaaggagcgggcgggggagggaagaggaaaaaagccagagctgcagcaacagcgtctcaacctgggatgtgcaccaaccccggagagcgagatcaaagggactggaaacagactggggactggcggggggagggggccggccagcctgtggagtcctccctgagaagcggagggcccggcttccaccgtgactccagcggcctgcttggggttttaattattattttgaaatttctgaatcgagctagagcgagagagcgagagatctccgtagactgc

SEQ ID NO: 3398 - DNA, 2300 bp, Homo sapien
gggacacctgatagttttcatgggatattttggtctgagaaaggggtcaacaggcaaagcatgtataccaggcctgacttccacgcaaatactggtagtgctggggccatgaagggaataggctggggttggggtttaattgggcccaaagttggtacttctgtgtacagggctagtgatggcatttagtgagtgtcccaatagcctatttatagggtttaagtacaaacgtcttaatagtcaagaaagccttctctctacataggtttagatgtgtttaaaatttttcttagtacattgagggtaattcctttatgttaacactttttaaattatatcacaaccaacaaatatgatatgaatcaaaaacatgtatgaggccaggcgtggtggctcacgcctgtaatcccagcattttgggaggccgaggcaggcggatcacctgaggtcaggagtttgagaccagcctggccaacatagtgaaacccatctctactaaaaatacaaaaagtagccgggtgtggtggtatgcgcctgtaatcccagctactcaggaggctgaggcaagagaatcacttgaacccaggaggtgaaggttacactgagctgagattgtgccactgcactccaggctggatgacagagcaagactctgtctcaaaacaaaacaaaacaaacaaaaaaaacccatgtatgattcatgagagatttggttttactgctgttgacattttggagtgtacaggagatactagtgaaaagctgtttcaaggtgagcctctcagacaggatttaatcaatttattatttagcgataaacatctatggcattacccttgtgtgccaggcaccgtgctaggcagtgaccgtttagacaaacaacgagcaaaggtgtcttttataataggggtggtaaaccctggggttgccagcctcgtgagtgctgtatcaggaggatactgtaggaggccaaacgcttgcacttttgtttttcttcttaatacttgttgatttgttaccttccttttttgaaaagcacaggggaaaatggctagagatcctagtactgtttgttcatccaaccacggaaacctgaccattttgtagatgttgaaacagtcagtgactcaaaatactatcaaattcgcaagcaatcccttggaaagatgggatggtggagaaacagacctcagataggaagtcacccaggacaggaaccggatggggcagtggttagggttctgttgcagacaatagagtcttctttcactatttaagtgaaaagtgattactcatcaggtggcaggtgactttcaactcagtggagccagctggttggagcttccaggataactctcagcccccagaatttcactgcttctgctgtgactgatcaggacagtgcaatacccaccaaagcacttcatcgcctccgccgtgacgcacaccagcacaatgggagcctgcccctcagctatcctgacatttagctcagttctgaattcaagtctttcccaagagcatttgattggaagactcaatcatcttcaaaatgtgagccgctagggcatctggaaaagcagtttctagctttcctatctgcagcaccggaaggcacattaggatgaggtattgatccagccaatctatggtatcagttgcagttcattaaaatattgagattttctctacaagagcacactcaggcttggaccttgatcactgcccgccccctcccccacaccatatttatcatttgcttttcaggacagatggcctttcagtccaggcctgggcagggctcactttgggggctgatgtttttagcagagcttccaatcacttgtgaaaatgtcgtggaaacagaggtggatgttgctgagccttcctggcctgttggctgtggaactgcagctgacataaatgggttagctgctgctgctagccttgtggtgcccttagaaacgagtgattcctctgggccaaagtcaccccaagccagaatccacagcctggccagcaaagcaagggttggctttcagtccccacttgttccttgactacgtacgtttgtgtgcaatgtataacctgtacaactatatgcaacagctctgcggtttgggccatgtctgtttccaccatcagcagagtgggaaggcacccgccagggcctggcctggttagcagggctgtgtggaaggctcacagtgcctctctctcctcttcctcacagagattccccagtgcgctggctgcaaccagcacatcctggacaagttcatcctgaaggtcctggacag

SEQ ID NO: 3399 - DNA, 2300 bp, Homo sapien
catctgacccacccagccttaggcattcatcctcctcagtgtagccagagtattagtacacgagccacaagggaccaacgagctcaccaaacatttgtccatccttctgggacctgggaatttagtctttgcaggtgtttcttgtttttctccttggcctgggttggcctctggatatcaggctgccatattggtgtgtctgacccatgcttggctgcaaggcagctgccatccttgggcatctttcctggtcatgtgtgttcctaggttgtgaagagcaggggaccatcagagtcctggcagctgacaataaatctccgttcttttgtccacagaggatcaaattctctcagaacttggccacaccaataggatttatggcaacgtgggggacgttacaggcggacagttaatgaatgggagcttctccatggacgggacaggacaatcctatcaggacttgagggatgggagcccctatggaatcccccagtctccatcctccatatcgtccctgccatcccacgctcctttgctcaatgggctggattacacggtggacagtaatttgggcatcattgcgcatgcagggcagggagtaagccagacgctgagagccatggctgggggacccacctctgacatctccacaggaagcagtgtaggctatcccgactttccaactagcccaggctcttggctcgatgaaatggatcatcctcctttttaaacttctctcctccccaccctacctgcccccctggcttgagagaatatcttcaaggatcaaaagagacttgccttttaaggatcgaaagtacgccaatgtgaatttccattattttcaatggaagtcctccgctgattcctagaaggctgtgagaccacactagggcattgtttccctggggaagcagtgggagagcagactcatctcagaacacagcacagggggtaatggcctagagctctagggacactggcttgttgggtctctcccctgctgttctgcttaggggcttggctgctcagtgctttggtagcacaaggtgactgtgataggcccccttggcctttgggaactttgctccaactggtgtgtctcacacaatgcctcccaaaacactgctctcaccagaactgagactcctaaggtagaggcctcacagcccttgagtaaaataaaagtgatttctggaccatccttattgaaccctatatttcaaaatgaaaagatcagttattaaaggtcagtgaacactttgatggccagtttgatattaaaaacatgccccctccttttttatttttgctgtgaagatatgaattctttcctacaaaccagagaatatgaacctgttttggtttttaagtgtcccatctatatcattgactctgatggcaagaggtggttttcattgcaggtgactgaggctgagctgagtagccctggaccaccgctgcagattgcctgagtcgtccccttggtgcacagtgtgccttcttcaattgcttgtatcatttattccacaagacaggctgtgggctgtaaaatgagcaaaactaaaatgtggggagaacaaaatgacaatcaatcagtgaacatttgtagacacatttggattccaaacctgcagtctgttcagccatatcggctgatgccagtcttccagagttccccatcccttgtagggtgaaatatttggagtctgttttgaaggagttggtttagatgagcttgcaagtctacccctctgaaagctttctctgctgtcctagctgactcaattggaggacagttttggtcatttccaggaaccagcaatttttttttggcctaccttggttgggaagagtaatttagggagcagccctaaaattgtccaaagggttctaagtggttcttgggctgcatctctctggattgctggctggacacctgccatgccttgggctgcagtcccatggtcagaaagccagaactctctggccagtggtggtgcagggactccccgttgtgcaggtttgcagtagcaaatcactaagcctgaggccagagcaaggccaacccccgctttacgagttgccactcctgcgacagactgcactgctgtgggaaacgctgtcctgaatggtgctgcagctcccacccaccttgtgcacccatctaccatcaggaagctctccatgtgcaaactggaatttagccagctggaatttattcctgtccctctgggaagctgtgtttgcttcttctggcctcccattctcttaaatgagatcagcagagtaggaaaggg

SEQ ID NO: 3400 - DNA, 2300 bp, Homo sapien
tctgaaatcccatgagttgctaagccaaatagtcaacctgcaacagtgatctgggtgggcagcttttcatctggttcattgcccagcagagccttttctcctgtgtattttaagcagcctgctaagaagggtgtatttaaaaagccatcctccaaaaagacgactgcattttcctttcctcacatggcatttgtgtcttcctccccaccccagtgttcatgattggagaattcccaatagcacagaattggctaggattaacacaacatcatccataaacatggaacctcaagagaagtgtctatgtttgcagacttctcaagcaaaaatcatgaccactgcagcacaccaaaaaacgagggtacgctataaaattggtcagagaagagggcccgaaggctgatcccggaatttactgttttaaagaacttacttaattgaacttagtttagtcctggaaaagggcttacaaaagatgtagcagtccaagaggaactgtgtattcttcctttagtctgcctatgacatgcctaagtctttgcagtcctcaaaaggtgaccaaccattcgtagaaggaagggtccttagggtctctggccccatcacttcatgtgataggcaatgccttctcaccctttcctactctgctgatctcatttaagagaatgggaggccagaagaagcaaacacagcttcccagagggacaggaataaattccagctggctaaattccagtttgcacatggagagcttcctgatggtagatgggtgcacaaggtgggtgggagctgcagcaccattcaggacagcgtttcccacagcagtgcagtctgtcgcaggagtggcaactcgtaaagcgggggttggccttgctctggcctcaggcttagtgatttgctactgcaaacctgcacaacggggagtccctgcaccaccactggccagagagttctggctttctgaccatgggactgcagcccaaggcatggcaggtgtccagccagcaatccagagagatgcagcccaagaaccacttagaaccctttggacaattttagggctgctccctaaattactcttcccaaccaaggtaggccaaaaaaaaattgctggttcctggaaatgaccaaaactgtcctccaattgagtcagctaggacagcagagaaagctttcagaggggtagacttgcaagctcatctaaaccaactccttcaaaacagactccaaatatttcaccctacaagggatggggaactctggaagactggcatcagccgatatggctgaacagactgcaggtttggaatccaaatgtgtctacaaatgttcactgattgattgtcattttgttctccccacattttagttttgctcattttacagcccacagcctgtcttgtggaataaatgatacaagcaattgaagaaggcacactgtgcaccaaggggacgactcaggcaatctgcagcggtggtccagggctactcagctcagcctcagtcacctgcaatgaaaaccacctcttgccatcagagtcaatgatatagatgggacacttaaaaaccaaaacaggttcatattctctggtttgtaggaaagaattcatatcttcacagcaaaaataaaaaaggagggggcatgtttttaatatcaaactggccatcaaagtgttcactgacctttaataactgatcttttcattttgaaatatagggttcaataaggatggtccagaaatcacttttattttactcaagggctgtgaggcctctaccttaggagtctcagttctggtgagagcagtgttttgggaggcattgtgtgagacacaccagttggagcaaagttcccaaaggccaagggggcctatcacagtcaccttgtgctaccaaagcactgagcagccaagcccctaagcagaacagcaggggagagacccaacaagccagtgtccctagagctctaggccattaccccctgtgctgtgttctgagatgagtctgctctcccactgcttccccagggaaacaatgccctagtgtggtctcacagccttctaggaatcagcggaggacttccattgaaaataatggaaattcacattggcgtactttcgatccttaaaaggcaagtctcttttgatccttgaagatattctctcaagccaggggggcaggtagggtggggaggagagaagtttaaaaaggaggatgatccatttcatcgagccaagagcctgggctagttggaaagtcgggatagcctacactgcttcctgtggagatgtcagaggtgg

SEQ ID NO: 3401 - DNA, 2300 bp, Homo sapien
tttcatttagctttcagcatgcccagagcccttcagcagcaggcaataaaacaaaactcatttccgcttaattgaatttttcttcatctcacggtttccaatttttaaagtgcagtgtttaaaaatgagcctcctcaggccttccagaccctgctggctggggaggtatggtcattattttcatggttataaccaagttgtcagtcgtggcacgtggaagtgtaggtgcagagagtggactgtcatacaacacacagcctttgctcatcagaagccttgagccccctcctgtaaagaggcagttggaaatcaccagtttgagcttctgagataggaatgtcttttgttttacagatttcttacacttccttgcaaagtgagtttaatgatgaagatctaatggcccaattatcttactaggtttcatgttttacactgcccccccccaaaaaaagtttaaggacactgccaaatggttttcttgtggcttaattttttcctctttccctgatgtttcacagtattcatttgcaggaacagtgttatcaatgatagttgatctttattttacgttatattcataactgtcagatgagacaagaaagagaaagcacaaagactgagaggaatttgcctgaggttgcatagcaagtccttgaagggccaagaacctgactcccaacactgatttacccatcgggccagcttcttagcccttaaatctggtatttcctccatggtttcattacgttccaacaaacagagattcctccatagcccctcagtttccattttgcttataccagttaccactggaacttggggttttaactaatttgctcctggattcaagagcttcctactctaaagtcgaccagccaggcactgcagataatggttgcctctagaaggtctcatttcatttttaaaattcatccatgtcattttagcaaggggggaaacagctaccatgtagcaccttataccccataatagacttccaagcaacagaggagtgcctctaagagaagctaaaagtaatgaatgcccggcttttctccatttccaaaccccagaagagtcctgtcatgcaatggctcattagtggcaccagcccacccataatgctaacccaacctgtagggagatccatttaaaatcttagacctactgtggctgtgcttctaaacaggcagcagtgtttgctgctttctggggaggtggctctggaaaacaaagctctcctggttttcaggccagtgctctcaagggtttttccagctaaccagccctactgatgccaaagaactattgacctcgtcaactgctcactgagttcctcaagagatttattatattattagtataaatgaggaaggcctctccttccactattgaactgggaattagtatgattaacttacaaaaactggtcaacttacttacagtgatcttaaacagtgctacacagaggaggatgccccccccccttttaaaaagcctgctctcccccacactatactcaccaaaaacttcaagggcctctgaaatcccatgagttgctaagccaaatagtcaacctgcaacagtgatctgggtgggcagcttttcatctggttcattgcccagcagagccttttctcctgtgtattttaagcagcctgctaagaagggtgtatttaaaaagccatcctccaaaaagacgactgcattttcctttcctcacatggcatttgtgtcttcctccccaccccagtgttcatgattggagaattcccaatagcacagaattggctaggattaacacaacatcatccataaacatggaacctcaagagaagtgtctatgtttgcagacttctcaagcaaaaatcatgaccactgcagcacaccaaaaaacgagggtacgctataaaattggtcagagaagagggcccgaaggctgatcccggaatttactgttttaaagaacttacttaattgaacttagtttagtcctggaaaagggcttacaaaagatgtagcagtccaagaggaactgtgtattcttcctttagtctgcctatgacatgcctaagtctttgcagtcctcaaaaggtgaccaaccattcgtagaaggaagggtccttagggtctctggccccatcacttcatgtgataggcaatgccttctcaccctttcctactctgctgatctcatttaagagaatgggaggccagaagaagcaaacacagcttcccagagggacaggaataaattccagctggctaaattccagtttgcacatggagagcttcct

SEQ ID NO: 3402 - DNA, 2300 bp, Homo sapien
tgaatgccatgtatatattcccgctggggaggagtcgaattgttgtatatttatgttcagctttagtagatagtgccaaacatttttccacagtgattgtaccaatttatgctcacaccagcagtgtaaaagaattctggttgctctctttcccatgttatgtaaactcttccagaatacagaaaaagatgaaaacttctaaatgcattctacaaggattctattaccttgatacaaaattgagaaagtatagaaaaggaaaactataggttaatgacatctttaaatggaactgtaaagataatgaaaatattagcaaactgaacctacaaattttttaaaaaaaccaaaccaggaccagaatgggtttattccaagaacagaagtaatgctcaaaactaggaggttttgaaataatgcatactaatttatcaatgttagctattatataattcattaaatcccaaatttatttttgttaatataattcattaaaatagaaactgttaatataattcctttcgaagactagaggagaaaagcagataatctccaaagatgccaaaaaagccgttgataatattcaattctcactttaataaaaattctagaaacaaagatataaaagtccatgttatatctccttcagtctacttgtcgggttcatcatccattattaccccacatgaaagctaacttctttttccttgctcctccatttgctagctgtgtagcctttgacaagttacttaaccactctgtgctgatttcctatgtgtagtaaaataagagtacctaccttatgttgtaatgatcaagtcctcaatacattattcttaatcactttttaattgcaagaatttggtcattaaacatccctttgactggattgcgagcaccttgacagcagggactaacagtggaactttctggagacttaaggaatgtctgttgaatcctgatgcaagctttctcaccttcctgtgttctctcattgcttcctcatcctgtccagccgtccgtccacccgtcgcaagcctaaccccagtcaataaccactgtttacaacactttctttgtacccttcttatagtgcttattacattgttttgaatactaaatgaatatatagtgcgtcgttgtgtttaacatttaggacataaccactcataatgttacagttaaaaaaatagttttgtgcattcctctagggccgaactgtgccgtacttctggtttcactgtacagtgtctacaaagcacagtgtcaaagacagagctcgggatgagaactgggctaaggcgcgccccgaactccccaaaccctattattcagggcccggagaggtgcgggctccgaaggtgtggagagcgaaacacgcagagcagtgattccactcatcagtcacacagtaagacgggacagccccatctcgcagtttttcattattcaacacagagcccaacgcgcacgcaacagatccgcgcgcagggctgtttggaggcgcttggggcgcacaatctggggcaggcggaaccttagtcctcagcctcgcgtttcccgcgactccgctctcaccgctacactaccacacaaacggcctccttcccccacccccgggggcccatcccggtggcgggctccggagctcgggactgctaatttcagcgaaacgattaaaagacgcccctacagctgacggcactttctctcctccggcagggaaggacgtccagcgtagcgtcgcccgcgcttccccgccggcgcagagcaggcctcacagaatcgcacgccgctggcacgcacgccgccccgcccccacggcccagcgccagccgcgccccgcgctcgcacgcatcccggcctcactgcccctcgactcctgttccgttggaggggcctgaggcgagcctgagcgcgctgttggccggagggaagccggaggagaccgggtcgactgggcagagcggcagagggtcgaggagcctgctctgcacgcccagggagtagaagtgggcagggagcagggtcacgtgagggagcgcgccgcgactgagcttgggtccgactggagctcaggctcgcgacccagactggtgggccaggcctccaagccggccttacacccaatccaaggaggacagaccggacacagagggacggagcgagcaaggagacatggcttcatcattcctgcccgcgggggccatcaccggcgacagcggtggagagctgagctcaggggacgactccggggaggtggagttcccccatagccctgagatcgaggagaccagttg

SEQ ID NO: 3403 - DNA, 2300 bp, Homo sapien
aggcctagctgtgagtgtcaggccagcttctcaatgttaaggactctttcctttttctttcttacattttagttttataatacatttttcattcaaatatacatacagaaaagtacataaattataaatgaattttcataaagtgaacacatcagtgtactaatgttcggcttaagaaacaacatatccaacttccagaagtccccttcatgcacccttcagatcactaaccctgaggttacccactatcctgagtctaacaccacagattagttttgcctgattttgaattttttatgactagaaacatgtaatatgcacttttttgagtataggcttatactcaacattatgtttgagattcattcatgttattctgtgtcattgtaattagttcattctcactgatgaatagtattccatcatgtaagcacaccagtttatctccattctagtgttgatggacattcaggagcttccagtttggagcaattaggaattagttcatagtgctgctatgaatgttctcgtacatgtttttggtgaatgccatgtatatattcccgctggggaggagtcgaattgttgtatatttatgttcagctttagtagatagtgccaaacatttttccacagtgattgtaccaatttatgctcacaccagcagtgtaaaagaattctggttgctctctttcccatgttatgtaaactcttccagaatacagaaaaagatgaaaacttctaaatgcattctacaaggattctattaccttgatacaaaattgagaaagtatagaaaaggaaaactataggttaatgacatctttaaatggaactgtaaagataatgaaaatattagcaaactgaacctacaaattttttaaaaaaaccaaaccaggaccagaatgggtttattccaagaacagaagtaatgctcaaaactaggaggttttgaaataatgcatactaatttatcaatgttagctattatataattcattaaatcccaaatttatttttgttaatataattcattaaaatagaaactgttaatataattcctttcgaagactagaggagaaaagcagataatctccaaagatgccaaaaaagccgttgataatattcaattctcactttaataaaaattctagaaacaaagatataaaagtccatgttatatctccttcagtctacttgtcgggttcatcatccattattaccccacatgaaagctaacttctttttccttgctcctccatttgctagctgtgtagcctttgacaagttacttaaccactctgtgctgatttcctatgtgtagtaaaataagagtacctaccttatgttgtaatgatcaagtcctcaatacattattcttaatcactttttaattgcaagaatttggtcattaaacatccctttgactggattgcgagcaccttgacagcagggactaacagtggaactttctggagacttaaggaatgtctgttgaatcctgatgcaagctttctcaccttcctgtgttctctcattgcttcctcatcctgtccagccgtccgtccacccgtcgcaagcctaaccccagtcaataaccactgtttacaacactttctttgtacccttcttatagtgcttattacattgttttgaatactaaatgaatatatagtgcgtcgttgtgtttaacatttaggacataaccactcataatgttacagttaaaaaaatagttttgtgcattcctctagggccgaactgtgccgtacttctggtttcactgtacagtgtctacaaagcacagtgtcaaagacagagctcgggatgagaactgggctaaggcgcgccccgaactccccaaaccctattattcagggcccggagaggtgcgggctccgaaggtgtggagagcgaaacacgcagagcagtgattccactcatcagtcacacagtaagacgggacagccccatctcgcagtttttcattattcaacacagagcccaacgcgcacgcaacagatccgcgcgcagggctgtttggaggcgcttggggcgcacaatctggggcaggcggaaccttagtcctcagcctcgcgtttcccgcgactccgctctcaccgctacactaccacacaaacggcctccttcccccacccccgggggcccatcccggtggcgggctccggagctcgggactgctaatttcagcgaaacgattaaaagacgcccctacagctgacggcactttctctcctccggcagggaaggacgtccagcgtagcgtcgcccgcgcttcc

SEQ ID NO: 3404 - DNA, 2300 bp, Homo sapien
gagcacctaatcatgaaacaccaagtgactatgattctggaactgttaactatgagctgggtttgtcacatacaccaagtcataaagtcagatagtcccagcaaagcagcataagttaacagtggtacaatcaggattgagcccaggcaggacctgagggtatgagacagctgcatgaccaggtagcctagagccccatgtcacccaccatagttgcactgagttgtagttgtgatcatatagatcccactggaccagctgaaagacctgcctaagtttagcttataaactggtgagttttatttgtgggtgttttaaggggtggccttgaaagacagttgaaaagggaaaatcttcctaatgggtggtccagagagcagtatacctggcatccagtgtatgtggaagaaggcattccaggtaagaatacatacaggttcccagagagtggatctgatcaggggcttagaagaagaaaaaagacaaaatgactgaagaccaggaggtctggggtgagggcatgtggctggatgtagacatgggcacatgcataaggatttttgtatcacacattaatacctgcactttcatggccctaatagtgagtgcctatcaattttgcaccctaggcacctcccctgattcaccctattcctaatcttgcaaaagaattttcaccaaactctattgtctatacttgcccagattcaagtaaagggacatagatccaacctctcaacaggtagaatatcaaagagtttaaaatgatcacataagcaccatgcttaacatagacgcttggtggccaatgtcaatattttctggaaatgacatacaaagaggcttccattctatctcaaagtgaacaaatgggccatgaatgaaagcatgctattctccaaacagaaaaatttgtggcggctcaaacccaagtcatagtaaagtctcccccaactaccactttaacttagactaatattagatgaatttgtaggattatagaaagcataattctctgcagtttcatgggttactatttagatttaaatttcataaatggagtcaacaatcagctgaaagcattactgactataaaagtatttcaggtcaggtacggtggttcacacctgtaatcccagcactttgagaggctgaggtgggcagatcacttgaggtcaggagttcgagaccagcctggccaacatggtaaaaccctgcctctactaaaaatacaaaaaagtagccgacatgttgataggcagctgtaatcccagctactcaggaaggtgagacaggtgaatcgcttgaacccaggaggcggaggttgcagtcagccgagatcgcgccactgcactccagcctgggtgacagaatgagactccatctcaaaaataaataaataaataagtatttcagtgtacccatttggagaatttcatagctgctattcttgataagatcaacattagatcatcctgagtttgacatttatgataaaaaccctcaaaatgtacttttttgtttttgtttttgagacagggtttcactatgtcgcccaggctggagtgcagtggtgcaatcacagctcactgcagcttgaactcctgggctcaggtgatctacctcagcttccagggtagctgggactacaggtgtgtgccaccacacccaattaattttttatatttttttttgtagagattgggttttgtcatattgttcgggctggtcttgaactcctgagctcaagcaatccgcccgccttggcctcccaaaatttgggattacaggtgttagctactgtgcctagcctgtgcttcttgatttaataaaatttggcatttgtgatcatgaagtgatcatgtaagacttatctctactgcttccttccatgttgatgtggtttgactgtgtccccacctaaatctcaacttgaatcgtatctcccagaattcccatgcgttgtgggagggacccagggggaggtaattgaatcatggaggctggtctttcctgtgctattctcgtgataatgaataagtcccacgagatctgatgggtttatcaagagtttctgcttttgcttcttcctcgttttctcttgccactgccatgtaagaagtgcctttcaccacccccacaccctgccatgactctgaggcctccccagccacgtggaactgtaagtccaatcaaataaacctttttcttcccagtctcaggtatgtctttatcagcagtatgaaaacggactaatacagtaaattggtaccagtagagtggggcgttgctgaaaagat

SEQ ID NO: 3405 - DNA, 2300 bp, Homo sapien
ggtgtgcaccgccatgcccggctaatttttgtatgtttagtagagatggggtttccccatgttgggcaggctagtcttgaactcctgacctcaggtgatcctcccgcctcggcctcccaaagtgctgggattacaggcgtgagttactgtgcctggcaggaaatttattattaaatctacttctgtggataaattaagttgtcatgtcctgggtggcagggctctggatcaggcatgagaaaaatcaagaattttagagctagttttgagggtttccttactttcttgggttgggccatggttccagaattttgtgcacaattaaggcatagaggtacggtgctgctgggagcagtgtgccatggtccaccagggttgctactaagaatttcccattctagtccatgactggctaaaggcaggaatctcttttgtagctgtccctggttcccttttcccaggcacaacatacagccatttcctttctgtggtctcgcctccttcctggtagcacacatattcctttttgcctgtctctttctcctggcaaggtttacctccagcagaggggaatctttatggtgagcagacggaggtctgaggtgagaggagtcctcactcttctttctttatttttttgaccttgattaccctttcaccagaggttaaggcttttatacagaaaaagccagaaagactcatagtctatgcctattttccatcttgtgtcatccctctcctggggaaatgattgcagaatccctattggcatgaattaaggggaagagaaaggggaaaaaagtacatggagaaaaaaagacaacagcagagaatgatatctcagagcactgctccaggcatagcagttccctagtaaatcttgaaatctcatcaaaattgtgagggttaggctgagcaaggtggctcatgcctgtaattccagcactttaggaggcctaggtgggaggactgttttagctcaggagctcaagaccagcctgggcaacatagcaagacccacatctctcccaaaaataaacaaaaaaattagtttggcataatggcatgtgcctgtagtcccagctactcagggggctgaggtgggaggatggctcacaaacctatgtgaggtaaggctgcagtgaaccatgatggtgtgactgcactccagcctgggcaacaaagcgagaccaaaaaaaaaaatgttagaatcaagggacaaagtacatgtaagaggtttagaatagcacttggtacaggaacagtgagtgctcaataaattattattaggtctcctccacccagggtaggacctgggtttctgtcctgaattgggacttccaagacaatcactcccacactcaatgtagtacagagctctgtgagtgatctctgcccatgttccccagggacacttcagcctgggtgctgggcctgtttccggttttactggggtgggcttagagctgtacttctacggggttctctttcctctcaacgttggtttccctcccaaccctcacccccaaccccaggaagctcagtttacaagtgcggtcggtaccctcatttggtgtttttattggcttttctgatagcccctggactagacaattacattgaaattcagaagcagcatgcactttttggcattgatgtctttaattaaattcaataagcacttattgagcacctagagtgtgtaaaatactgttcctttaaatacatttagtcctgaactgttttagcttcttagtttggattagtgctgatccatttcttaaaggttttatgaagcataaatatcaaaatggaaaaatatttgcacagttctttgtaaatataaacgtcttgtgtggattattgttgctacagtattaatattaactgcagtaacaacactgctgcttcccagacaggcggtagaaagcagctgtaggccaacaggagccagactgaagagatccagggaggtgcctccagcacgtacggcccacaaggggcggagtcttaagaagcgtacccaagccccaccccttacagcacccccttcgtcagggcggtgtaggcggttaccatggcgatgacgtccagagggcggggaggggcggggctatggagaggaggaggaagatggcgggcgggctgctctgaagagacctcggcggcggcggaggaggagagaagcgcagcgccgcgccgcgccggggcccatgtggggaggagtcggagtcgctgttgccgccgccgcctgtagctgctggacccgagtgggagtgagggggaaacggcaggatgaa

SEQ ID NO: 3406 - DNA, 2300 bp, Homo sapien
tttttagatgaaaaatcagggggtagtggcatctccctgatcccttaacaatatttggatttttgcaaagaattagcagcatccatgctgttttctaactatagttattcctgctttttttcctcctttacttcctttcttagttatccattcagctcattcctttcactgctaattctcaacctagccactgttgccaggtctctgtatttatgattggttctttggtttccattttatcaactaaagtaatcatgctgaatggtcagacatgaaatggagacatttaatacgacttttcttgtttctgtgttttctgattttttttttctttcagtttcgagtatttacagcccccttccataaggtaggctttgctgatttctggctggcggatcagctgaacagcctgtcagtgatactgatggacctggaatatatgatctgcttctacagtttggagctcaaatgggatgaaagtaagggcctgttgccaaataattcagaaggtagggtatgaatttgcatctatactactaaatcgctggtgtaaaccaagatatattgggaaggataaatgagaaagttaaggtcatgatgaaaacttacccaataatattataaacttaatttaatgtacttggcattctgttagcagtctccttatctgatataatttggcttttaaattatgcattaggatttcgtctgtccatttgccaagatatttacaacttacacttaaagaattctaaaactttcttctagcacattggtagttatattgcaagtgctttcatgccagcaatttgttgtctcactattgctgtataatgtaacatatataccagtgatcagaaatactaattatttagaaatagatcaagtgctttgagagtaactacagattgctttttaattcttacttgggatgttatttttcttctggccgttttcgcaccccccccttagtttatgccagcagttcaagttattaaggaattttgccttcatgacaaagatctcattgagatagaatatgtaacatgtgactaacgaaagttgatgaagccgatgctgacacattcttattgattgccagtggatcacagttctgttgtaggttgatcacactcaattctgaatttcagaattcaaggaaaagttgatttaccaactccattcttatttaaacacacagtttgttcttggtttaaaaaaagaggggaggtgggtgtacaagagaatgtgctcttgggtgtcttgtgttgtggtggtttggaattcacaaaattgtctagaatcactggtgatacttgtaggttttccagatgtttcaaattacagagccaacccgttttttcctccttctattagtatactcatcttctaattttcttacagttttatcacactccaaagaaagtgattcctggacagatatccataaatctgagagagcaaatttccccactagttcccccacaacatattttaccttctctccttgacttatctatcactaaaaagcttgagaatagactgggcgcagtggctcacacctgtaatcctagcagtgtaggaggctgaggtgggcagataacttgaggtcagaagtttgagaacagcctgggcaacatggtgaaaccccatgtctactaaaaatacaaaattagctgggtgtggtggtatgcacctgtaatcccagctactcaaaaggctgagatgagagaatccctggaaccgggaggcagaggttgcagtgagctgagattgtgccactgcactccagcctggaccacagagcgagactcagtctcaaaaaaaaaaaagaaaatcttgagaatataatagttgcaaagaagaaagtgattctgaaggttttttgcttttttagacttggtattagctacactatatggctaaatgatgtgaacaagttactttttttcaatggtaatttttcttctttgaaatcttcacagaatcaggaatttgccacaaatatacatatggtgtgcgggccattgttcagtgcattcctgcttggcttcgcttcatccagtgcctgcgccgatatcgagacacaaaaagggcctttcctcatttagttaatgctggcaaatactccacaactttcttcatggtgacgtttgcagccctttacagcactcacaaaggtattctgtgattgactctgaagagatttttttaaacctggatttttactacctgactctatttcttactctggctacttttccatttgtcatgctcttttttttccactgaaatttcag

SEQ ID NO: 3407 - DNA, 2300 bp, Homo sapien
atttacttgtagcaacgccagcttttgctttacaaaattttaaggcattttattaggtgcatacaaattttaattggcagtcacaagtgaatttcaaagtctacagatttggcaaatttctatagtgcaaaggtagtgttagtgctctgtttatcttggggctcctgttttcatttagattttggattatcttgtctgatttttttttagaatatttaaacacttttttttttgagacggagttttgctcttgttgcccaggttggagtgcaacagtgcagtcttggctcactgcaacctctgcctcctggattcaagcgattctcctgcctcagcctcccgagtagctgggattacaggtgcccaccaccatgcccagctaatttttgtatttttagcagagacagcgtttcaccatgttggccaggttggtcttgaactcctgacctcaggtgatccaccggcctcggcctcccaaagtgttgggattacaggagtgagccagtgcacctggccagatttaaacacattttatctagcatttttattgttttcagtgagaaggctgggctgaataactcagactgccaaattgcaaaaaatgattgatttctgttttaagccattttacctcccaatttccacttatcctttcaatggaaccccgttctaaagaagcttttaagtcatcatcaatggttattttaactttgtaagaattaacctctgggccgggcacagtagctcacgcctgtaatcccagcactttgggaggccgaggtgggtggatcaactgaggtcaagagttcgagatcagcctggccaacatggttttccaattctaaggctgaggagaaatttgagaaaagttggaaaattaaaggttttcaagtacaagttataataaattctaatttgtaagtattgggtgtcttttaggttaaaaagaatctttaataaacttttcagtagtttgcttaccggaaaacctcaagtggggcaaagacagtagcaatgatgtccccagaatgaggcaacaaagttgtagaggtaatcgagatttggatagtccaagcaaagcgcagaatcacatcctctattatggcacagtagtagtaggcctgagaaataataaagaaattgagtatgttttctatcacatttctcataaataggcataccaatgagcatatgtcctacaaacaagactcacacatgtcctacgaataagcacaggctcaagaggaaagttgtactttattttgcagggaagtacacattatattttagaatgatttctaccaatttagttttttcttaaatggtataatatccagtatgaagtattactgaatttgagtaatcattaacaaatatatttcactgccatactgtataccaggctttcttctagggcccagaaatataagctggttaagatccttgattgattgagattacattctaacaggtacagtagacttaatagctaatatcagaaaagattagcagatttattcactgtgttatttgtacttttattctccatttgccttaccctgtatttgaagaaagttttgccttgctttttgatgtgaatgaaattaagcttggatttcacaaccgtggttgaatttaagaaatgttctatttttacatggggaagacggtgctcaagtaatacttgcaggtactagcacccaggatttaggagtccagtccagttttagctacacaaaagtcttaagtacacaaattgccaatagagcagaactatataattcatagatttgctcattattaatctcaaggaaatcagctctttaaatatatgtatttaatgaatgtgaaatttttgggaaggggaactactatgtattaagccataatatttattttacttaaaaaatttttaaacaaagtaatactagtcattgtgagaatgctattctaaaaaaaaaaaaagtcccctggccaccttctctttccatccctagagaccgaacattttcaaaatttgtagctacttcttctacttagcctccatgtattaaactaatatgtgtaataagaataatccgggggaggagccaagatggccgaataggaacagctccggtctacagctcccagcgtgagcgacgcagaagacgggtgatttctgcatttccatctgaggtaccgggttcatctcactagggagtgccagacagtgggcgcaggccagtgtgtgtgcgcaccgtgcgcgagccgaagcagggcgaggcattgcctcacctgggaagcgcaaggggtcaggg

SEQ ID NO: 3408 - DNA, 2300 bp, Homo sapien
acattggtttttaaattttttgtcagtttatgtggagaatttttttctttccttcatacccagcgcaaaggcactggccgcacttgcaggaaaagtgcaacttaaagcagtaccttcattcatgaagctactttttaatttgatgtaacttttcttattttgggaagggttgctgggtgggtgggaaatatgatgtatttgttacacatagttttctcattatttatgaaacttaaccatacagaatgatataactcctgtgcaatgaaggtgataacagtaaaagaaggcaggggaaacttacgttggatgacatttatgagggtcagtcccacatacctctttcaggagacaacttgcaccagtttgaccttttcttttctttgtttttattttaagccaaagtttcattgctaacttcttaagttgctgctgctttagagtcctgagcatatctctcataacaaggaatcccacacttcacaccaccggctgaatttcatggaagaggttctgataatttttttaactttttaaggaacagatgtggaatacactggcccatatttcaaccttaacagctgaagctatgccttattatgcatccacatgtatggtccctgtagcgtgacctttactagctctgaatcagaagacagagctatttcagaggctctgtgtgccctcactagatagtttttcttctgggttcaaccactttagccagaatttgatcaaattaaaagtctgtcatggggaaactatatttttgagcacatggaacaaattatacttcctcattcatattatgttgatacaaaagaccttggcagccatttctcccagcagttttaaaggatgaacattggatttcatgccatcccatagaaaacctgttttaaaattttagggatctttacttggtcatacatgaaaagtacactgcttagaaattatagactattatgatctgtccacagtgcccattgtcacttctttgtctcatttcttccctttgttccttagtcatccaaataagcctgaaaaccataagagatattactttattgaatatggttggcattaaatttagcatttcattatctaacaaaattaatataaattccaggacatggtaaaatgtgttttaataacccccagacccaaatgaaaatttcaaagtcaataccagcagattcatgaaagtaaatttagtcctataattttcagcttaattataaacaaaggaacaaataagtggaagggcagctattaccattcgcttagtcaaaacattcggttactgccctttaatacactcctatcatcagcacttccaccatgtattacaagtcttgacccatccctgtcgtaactccagtaaaagttactgttactagaaaatttttatcaattaactgacaaatagtttctttttaaagtagtttcttccatctttattctgactagcttccaaaatgtgttccctttttgaatcgaggtttttttgttttgttttgttttctgaaaaaatcatacaactttgtgcttctattgcttttttgtgttttgttaagcatgtcccttggcccaaatggaagaggaaatgtttaattaatgctttttagtttaaataaattgaatcatttataataatcagtgttaacaatttagtgacccttggtaggttaaaggttgcattatttatacttgagatttttttcccctaactattctgttttttgtactttaaaactatgggggaaatatcactggtctgtcaagaaacagcagtaattattactgagttaaattgaaaagtccagtggaccaggcatttcttatataaataaaattggtggtactaatgtgtatccagagacatttgaattattaactttattctttattagtgaatctctatgatggcacacataaaatcttacagttgacttctgctgtttgaattccccagtgtttttacattaatgtatcctatggccagtttagtctttcttcaactgttacagttctaggccctaatcggtcttattctttcacatatgatgcaatgatagatgtaatccttttctgaagtgtttgtcggattggcatagtctattcaaaaataaggcttatgtaactttcagcttgctatgtgacagaagtttaaatgtgtatttaagtacacagctttatgttcctcttaaagctgtaaagagaaaagaggacttttcctcatcaagagagcttgggagacaaagcatacatttaatttttttctttcaaaaaaggcaatg

SEQ ID NO: 3409 - DNA, 2300 bp, Homo sapien
gaaaccccatctctactaaaaatacaaaaagtagccaggcgtggtggtgcatgtctatagccccagctactcaggaggctgaggtgggagaatccatcgccccactgccctccagcctgggcaacagagcaagactctgtctcaaaaaaaaaaaaaaaaaaaaaaaagcaaggtgcgttcacagtgcaaagcaaaagcaagtttagtaagaaagtaaagtggtgaaagtacagctactccatagacagaggagggagttctggaaagtacgaggaggaacgcatccaccctgggtacaatactcgcttacacaggataaaaaaggatcatggggagatgtgctgtgctacaagggtttgtgataaaggattaattttcttagttactatattttgcaataatcgatattattaactttaaagcataattacaaatgagtctgttctcaagatatcaggatatcaggacactcctaagtctgggtctgtttagcaaacgttattaatttgttctcttaaccgtaaatatctagaagctgggtatagctaactcactgggaatgtggcccagcaagtcccagcctcattttcctcgccctcacacaagatggagtcgctctggttcgaagcctctgacgtaaccttgggcctgtactgtgacacagagggtttgcactggataatctctcaagctcctagattgccaagacgccagtccactcacagctccccaggctccgctctcctgttgccctgccagacgccccttcccccaccttgtgcagagtaaccccctcctgactcaagaggcagcccctctagaaaacttccttcccctcctcccctgccccggtacatattgcgcggcccttactgttgctgtgtctgtcctgtcatctggaggtgcacaactaccccatgcttcacagtgaagccagtcggctgaaggaaagatgaacgggcactttctctttgtagagatttccggaatctcctgaggccacttttattgcttcccgtctttgtgaaaaaataggcttggaaataggtgaggctcggtcaccccctctgggtggaaggagaaagcaagctccgtcggtttgggccgcggctgcagggaatgcccctggttgcgacccccgtcccgcgctggggaaagtgatctgctcgagagcccccaggaccctgagaaccggtccccacccaaggcggcggcgggcaattccggcaccgcggcagacgggatgcgcggagcgcgttccctccgggtttccctcacgcctctggagagcgggaaccaacgaccttgacctcggaggaaacggctctacggagcgatggacggccccacagagagggcggccggctcctctggaaaacttgtccacacaaaaggcattcctcagcttccaccccgaaaggcgagccctgggtgtagggttaccagcggcgcgcggagcccgccgagaacgtggtgcgcccccagctcctgcccgcgctccccggcctccgtgcgccccgcgcgcctccgctcttgcgcccgctttcccgcggggaaggggccaccgccctgcgaggctggcggccgccccgtcgtccccaagctcggggccgccctggacttccatcccgcgcctctgacggccggggacactcgctccctgggccgcggctcaggagaggcggccccgcggggctccgggcggggtgggaggccgaggcccggctcctccagcccctcccgcggccccacctctccgcgctcggctccctctgcccagcgcgggccgggaaggcgcgggcttggccgctcttcccctccacggcaaagccgtgaacggacagctgatgccacttccttccctgccagcgccctccctgcccgaccccgcttcccgtcctctcgccgggagggagtgcggcccgtggggcgctgcgccggccagacccacccggggcccgggggctgccagcagagccgggagctggcccggcctcggcgccgtcccggacccccagtcggccgcgccccgaggggcgaggcctgcgggccgcactccctccggccccggattcggggctggaagtccctccccgaacccagcagctggcctgggagggagaaggggctggagagggcctggcctctccgagggatggaggggacagaggcggcggcggccaaacccgcgggcggcagcccccagtgagtatagaggaggcagcgccgggccggccgggcgggggtggcggaccggcggggcggaggagcggggagcccaggtcgccccggccactggg

SEQ ID NO: 3410 - DNA, 2300 bp, Homo sapien
accctctgagctaatgagctccagaagtgcagactttcaagacagtggcaaaaagccgtctcttcttaggcaggaattgcctctgcctggccatggcactgaccaccccaacccttctaggaattttccagagcaactctgggagctgggaggtgggcagtgagatgggacagactcagcacccaccccattttgcctgcttgttccctgcctcagagaaagaccaccttccctccacagggctggtcaggccctcgcttcaccagggtgcacgttgaccttggctgcagtctgtgaaggtgactgccactcctccatgctcagtgtggtactgcatggatgcctctaggcgcctaaaaagccctgcttttctaatcagtggagaaccagctttgtctgccaggaactgaagcaagacagctgatgagaaaaaaaaaaaaaaaaaaaaagtaacagctccaagaggagggagcagaaaggaaatagcaaagctggaaaatggctttaaaacctgggggcaaggctgatcctggcagcatctggccagttgcctgggggccctcctgcctgcccaccaggtcttgtgacaaatgccctctgacagccgtggaaccacagctgtcaccggaaggctccgagtgtgcgggctggcagccagaggcccacggctgcaggggcgcctctccgggctggtaacctcattatctctgctgtcagggcaggagccccagggagcacagctgctctcagccgccttggaggagctgtctgctggggaagctgtgcagagggaggcctctcctgccaaaggaggcttcacggggcagcgggcctggagattcgctttcccatcactccagtaaagccctccttgttccaaagccatgcctgggccctgccagggttcacaggcacagatggtgcctttcttctagcagtctcctcctgctccccagcagccccaaaacagggttggatgcaaatagtgagaagaaaaagaaaaggaaacaagaaaagaaatcatagtctgcccagagtttgtccaaggatgtccaaggaagccttccttggaggcctcagagctgtgccatttccactcacatctctgtcacccaggaaactgcctggtcccttcccccagtcaggaccatggtgaggggctgcaggtctgagatcaggacctgctggagccctgtggaccctcactgttgaggacagcccagcatatgtgacggcgaggacaggggcagccagtggggatgatgaagttaccccaaagagcgcatctgcccccagccacaaacatcctctgcctgccctgagacccaaggcaggagaggacagagggtgcggaacgatgctggagacagtgggctggctgtcgtgtgctctgctccgcttgcaattgacgttcgaccttgaacaatgtgccagcgttcttctctgctctggacaccctcatctgtcaagtggagagaacacctgccctcggccagcctggctggggagagcaagctccgtggagaacaacgtcttgtcagtgggagattgtgggttgctgttatagctgtaacccagcgcgggctgtatgtcactggctgagagacagctttgaaaacggactgctgtcattttctgccactctggactggccagggaggcagcacatctggtagggggtgggggctggtggaggacccttattattatgaaagtcgaaccacttgctggcttggtttgggtccagcttaatttctctcagccctgagcctgtgagccctgagctggtgcctgatggttttggattgggactaaggcaagaaaacaccaggatttataaaaatgccattcccccaaagggcccaatctatgctggacagagccctgattctttgcatctgcagtgggtactagtgtggtgctgtgtgtgggtgcagagagacagaaggagagagaggtgatgcgtggagagaccatctgtctgggcacaggcccagcccaacaaccccgggccctttctccctcctcctcccagatagctcctgctgtctgcctggggaaggaacaatagaataatctggagactctcctaccctttctagatcctcttgaggtctctgcctccagtgcctgagcagatgtccaaggccgggccagctccccagcccccatccagagccacgcagggccatttcccagccccaggccccaggccccaggcccccaggctgggttccctgtgcgtgggtgctagaggaggaaggctgcacatgcagggctttttctggcacagccagtgc

SEQ ID NO: 3411 - DNA, 2300 bp, Homo sapien
cctctaacatgagaagtggtaacataaggctgaggagtggggagaggggtcacaaaagcggtgccagttagtggcagattaaagcactgaactagaagtacctgggataaagcatggatatcagttgccttggacttgaccgcatttcaagtccactgtagggttcaagagatctactggctcagggtttcacacaggtccgccttgctgataaatgttttggagcttttgtgtatttggctggaaataagcaaaaagtaaatgagccaaaccccttactgtataaacccagaaaagcctggagacttagtctggggagctcaggatgagaatgaaaattgtggcctctgaatgccactcccatggctgccagcaccccttgttcctgagttaacaccagagctggatggaggctggtgagcttggggtcttggggggcatggggtcctagagctggctctcctgggagcctttctgctccttaggtagagtggggcctcctgccttggggcttccattgtagccctgcacgctggccttttttcacaaccaaagctgtatccatcctggggatgagggtatcctaagggcaggacaggcccctccccagtgcctggcactgggccagaaccctaagggcagctccacactgtgagtaggggcctgagcccagactgcagaaggacaagacaaaggcaggcccggcaggcagcctggcagccacaggagagctccggataccctccaggactggcagggcagctgttaagccctggctccatgggcacatatcagcgccagtccccgcagcccctttcctcagggtccagcactccgacctggccaacccacagccagagagcgctgggcagagcttcttgccaaggaaggctcttgccatttctaagcaggtgctctggctttgtaggaaagagggaaacttctctgcggatatgtgggggagggagggagaaaggggaaggcctgttcatgcaggtgcagcagggccttttgagtcgctccagaactagtctggggacttggggtgggaaatgggttgggtagatgaactagggaagtccacttgttgccaggtaagtttagtggaggataaacaagcaattctacctaaagagtcacaataaagagcccttggtacaagatcctatgggatttaaggggaggagccgaagtcagcatgcagtatcgggaatgcttccagagacagacacctctaatatttttgaaggctgccacggggtttgtggggggacagggaaaaggcattccagccaaggcacatgcataaagcatgagagagtaggtgggtgcatggatgggtgaagttggggctagtgggatccaggagccaacaaacaaagctcctgccaataatacccacacaagaatcctgtgcccagaggcagtttggaagactaagaagtccacagtcgcatcattgccctcctctcctgggtcataggcctcttcttggcacacccggaaaagaggtggaaacaaacagctgcccaggacacctgggcatctaggatggaggcctcttccccactaccccaggggccaggccatagccctgagggtttcttctgcctccccgcagaacagagccataacccactttaaattacaactcggtacacacttgcagaagcatttctcaaaacctaacctacccttggcttgtataaagcactctaatttttattttaatttaatgttggtctcaacccacaaaattgcttttataacccatgagtgaattgtgcctgcagtttggaaacactgccctggaaagggatctgcctgctcttctccagccccacttcccagaagaaaaaccaaaatgagagcccctgcgtcctggtgaaggtcagtggcgggcaggccaagcagggcctccagagctgctcgagggcctccaagggaggtgagctgcagagggacccaggagggtggaaggatgctggctggaagtcacagagggccaggttcaaatcctgcctccgcttttgattggctcccagaccttggatctatctgtgaattaacctttgagcctcggactcctcgtgcgttagcctggtataatagtctctctctcgcagtgttgccgtatggattcagggtgatttaatgacctcaacagagctctggaacatttgcgtagctggcagggcaaggcgagggacagcccaacgaaggcaggtccttgaagtcctggttaacactggtttccaaaattcgagccggcctgcggtttttccagcacgcctgaaagc

SEQ ID NO: 3412 - DNA, 2300 bp, Homo sapien
taggccagtgatgcattatagcatttttctgaccctaaaaaaattgtcactatttcctcatgtcttccatagaggtccttagagtgtggatcataatgagcaggatcttttcagtcttgatagccctaagaccaggtcagggcagagccacccacaaaaagccttggatctgctttacaccagagacagtcaccatccagctggactgaagctctgggcccctggaagctcttgtaagaaaagcttctaataactgagcttccctgatcctagcccctgaagtctggccatttgatggagttcacccctcgcagtctgagaagaggtcagtgtcagtatggaggaaggtcatggggctgttggaagggttttcagacagaaccaagtaaccaggcaggcttttaatagtgcctgagattttttttaaattacccgataggaaaatttggcaactctacaaggaaaaagagtcttagttgctagcgtcttctggctcttgcctgcggggctggtgtgagcagttactttgaccagtcaggaaggcttgtggggatctggtcagaaccaactgctgagatggaactctcacattcctgcctgtcttcttcatgtgaggaagacatacccatttatggctgcaaacttccttgaattcatacttgggaaacccgacccttgtgtctgggagccctggtggagaactctgactttagggcagcccttgcctcggttgccagggtcaggcattccttgtggtcatacctgcctgtaaagtaacccccagttgtcatctggaaagcctgaaggaccctggattctattcatgggttaaacttaacagacattgatggttcttgtgcctttgtgtgtgaagggctatggcttaccttcttgtcattccagggaactctccctttccccccaccaaaaaaacccacaacttcccctgggtcacactttttttaaaaaagtactctagatcttcggaatcaggttgactggaacctatgggttgctgaagttccacaggtaccaggaagagctcttttacaagagattgaatgcttttcaattataacacagtatatagatgggtgtttgttgatttagcagacgtttatttgcactttaaggggacaaagcccattgtgaggcctattgggagagcttaaagacatagagggcccttcctggaattccttaaatagtaccacccaggcaccaacctacaccactacataaaagccttgcccaggggaaaatagacaagaaatgtgaaaactctttatatcactcttgatgcatcacttgttcagagatagtaattgtttgtttctcctgactcctctggttgttcttctcacacaggcactgctgggagacagtggcagccagaactggagcactggaacaacagataaatatgggcgtctggaccgagagctccagagagccaattctcatttcattgaggagcagcaggcacagcagcaggtaccccaaggaccccagacttaggacgggccagtgggaaacaagacacccccttagttcctttgccagccatggggtcttgtggcttagtgacaaggagggtaagccagagcttgtcctgtgttgattgtgtttaataattgcatatgtaaagggtttcaaaatcttcacagtgtgactgcttcaagagaaccaagctcagccaggcgtggtggctcacacctttagtcctagctactgaggaggctgaggctggaggatccttgagcccaggagttcaaggctacagtgagcttcgatcatgccattgcattctagcctgggtgacagagcaagaccctttctctaaaaaaataaagaaccaagctcagttagttctcttagaaaaaacagacctttgtccatctcagcaaagacactttcagaaagatctctcatttttttcttcgaaaattattgattggtttcttttttttttttttttttgtgagacggagtctcactctgtcacccaggctggagtgcagtggcaccatctcggctcacggcaacctccgcctcccgagttcaagcagttctcctgcctcagcctcctgagtagctgggactacaggtgcacgccaccacgcccagctaattttttttttgtattttagtagagacggggtttcaccttgtttctcaggctggtctcgaactcttgagctcaggcaatccacctgactcagcctcccaaagtactaggattacaggcatgagccaccgcgcccggcctattggttggttttgttatatgtaaagatgac

SEQ ID NO: 3413 - DNA, 2300 bp, Homo sapien
tattacggtgtctatttcacagttgaggatagtgagagatgaagcggcttgcctgagatgcaacagtcaggaagcagcagaactcaagcaatcagactccaaggatggtcttcaacaccatgctcacctacccctcaatttacatgtgcttgttgaatgaatgaacgatgacacgttttcacctccccagctaagtaaattaaacagttctctcccaataaacattagcaatcactagtattggacactgcttcctttccccacatctgccttccatcattcgctcctccagggattttggctttcacccctctcttctctcccctcctgaaacccattcagcccctcatcatgtctaggtgtttagtcttgttttccttttgaaacatctgtcagattcactccttctctgttctcaatcgctgtcatcctggtctggacctcatcccttcaggccacatgactttagcagcgtccttactggttttcctgacttcagtaacttagtcctttgggatcttgaggtttacacacatttttatttaaccatcacaacaacccatgaactagctattattatttatgttttatagatgaggaactgaatgatagagccaaggtttaaacggggtttgtgttgctccaaggactgtgccagctccagactggtgaccttgggcaagtcacttaacctccgagtctcagatttctcatttataaaatgggcatgatagcagtaattatcacattgtaagagcaactgagataacacttaacatcctgcctgacacacacacacagtaagtgctcaatgattttcagcaatcaaagtccacaatccccatccacaaatttcatagcatatctagcatatgagttggttaatggttctgggcaaaatgttttctcgaatagctcttgaaccacagtgagaggaagttgtcatacctggccccttctttattcctcgaaggtgtgctctcctgggaagcaccatatgctgtatgaaaaattactttacatggttatttgcagaatgtacagcaacagaaagtacaccccatctggtggaaagtgcacagaatctgcagttctgccctgtccaggctgtgtgactacaggaagtcttcaagcctctctgaacttattttcttatctacaaaatgagaaaaatggatggtgtggtggctcacgcccataatcccaccactttgggaggcagaggcaggaggatcatgtgagctcaggtgttcaaggccagcctaggaaatatactgagagccccatctctataaaaaatttaaaaattagccgggcgtggtggcgctcacctgtagtcccagctactcgggaggctgaggccggaggatcgcttgagcccaggaggtcaagggtgcagtgagctgtgattgtgccactacactccagccagggtgacagagagagaccctgccccccaaaaagggggaggggggaataatactttcccccaaaggatactgagatgatgcatacacaacctttagcacactgtccaacacaaagcaagacctacttaaaggatctgtgtaacattataatcagatactatgcttcattttaagtcgaggaccagatagatttataaattacatactgtcaaaattaagtattaaaagtagaggaaaggtaagaggattttgcaaatcaggtacaactacagcttatcctgaaaagccgactgcctagttctgagggaacaagccactcctcaccctcaagcttgaggagagggctgtagaagcccgcccacctccaccgccccgagggctccgcctccagggccgagggacgcaggcgtaagccccgcccactggggggggggggagagagagagagagagagagagagagagagagagagagaggagagagaggagagagaggagagagaggagagagaggagagagaggagagagaggagagagagagagagagagagatatatgccctggtcacgtgagcggggtgcggaagtcgtgtttcaggcggcgttcgtgattggccgcggccgagggtcccgggggtggggtcaggccctccgacgcttcgggaggagccgggactggaggctgccgagggggccggcgcccgagtccgggattcggccagtggtgctgagcgagtgctggaccagcggccgtcctgtgcacctggcctgtgcgcgtgcccgctgctcggcttcacccagactaaggcgcgggcagctgcgggaacaggcggggtgggcggagggagaccgggaggcacgggcgccctgt

SEQ ID NO: 3414 - DNA, 2300 bp, Homo sapien
agacatcgttgacatacctacatttttttttttttttgagatggagccttgctctgtcacccaggctggagtgcagtggcacaatctcagctcactgcaacctctacctcctgggttcacaccattctcctgcctcagcctcccgagtagctgggactacaggcactcaccaccacgcctggctaattttttgtatttttagtagagacagggtttcaccatgttccaggatggtctcgatctcctgacctcgtgatctgcccgcctcggcctcccaaagtgctgggattacaggcgtgagccaccgcgcccggcctcatacctactttttaatgtcagtacagcaggttatggtatggaatgcattttggaacaagatattaacaaaaattcaaaggaaaaaatacatggccatggaattccagtgctgagagacatttgggaatattgggggagttttccaaaagagaaatccaggtgactgtatttgttaaatgagtaacaaaaggaaaaacaatgtaaagaaacagaaaggaaaggaagagagaaatacaaagatctgagaagagaaggtgccaggggccgctgagagattgccaaatgttaatttcattatttggcttcttattttattctgggtaaaggtagacctattagtttcctgttgctgctataacaaattaccaccaacttagtggcctcgaacaatgcaaatttattctttcaaagttctggaggacagaagtccaaaaatgtgtcctatcagctgaaatcaaagtgttgtgttccttctggaggctctaaggagaatctgttccttctcttttctagttctagaggccatctgcgttccttggctcatgtccttctttcagcaatggcatcatcactctgacctttgcttccattgtcacatctccttgactctgacccttttgcctccctctaataaggcccctctgattacactgggtccaccagataatccaggatagctctctgtctcaagatccttaatttaatcatatctgccaagggttttgttttgttttattttgtttttgccatttaaggtaatatatccacaggttctggcaattaggttgtggacatctttggggcgacaattctcaacctaccatacaaccggtacataaggttctactacctactaaatgcatcataaacagaacttctgatccttcaacaactctgtgaaatatatgacaggatttgcttttaaagttgaagaaatcaggccttggtgcaatttgggattctgcccatggtcaaatagtggggaggcaaacccaggtccctgaacccagctcaagcctgcctgcctcatggccatgcctccattcacctctccccttcatgtctacttcctctttcctgtctgggcctgttccctagctccctggacaagcttaagctgctgttttccagcttgtcatgtgctccttatgacagtgtagccacagcttgatcttggggattgctgattgagcaagctgagtggctgcccctcagaatcttctgtaggcctttctcttgccttcttttattcagtaagtgttttgagcttattgtgctgggtgctagagtagcagggaggacagacctaagttgaagattacgggacaatctaagtgacacctgctatctcagacagagacttcagcatcatagggagccagagcagggagttccaagccgtgggaactgtgactctttcttactgacccttaagcaaaattctaagctccagggaagcagaggcagcagcttgagctccctgattgaccagatatgattaatctttgtttctctgtgctttgaacatgactatgctccataaatatttaaaaattgggaatagggtgaagatagatacaccaaaaggagcaagcagtgtctgaaaccagcaaagacttaaaagttaccgaagaaggtgttcatgctttcattttatcttttttttttaacctagcaactgatgacactgcatatcttcccctgttcttattgggagaaggccttgtgtgtcaccaagaggttctcagaagggacctgtcagtttttggttaaaagaacccggaaagagaaggactatgggggaactgatggcgttcctgttacctctcatcattgtgttaatggtgaagcacagcgattcccgtgagtatcccacgtcctcttctctcctaactccaaagtcgaggcagcctagaaggcacagcttttcttcctaaaacttgtggtgaaaaatatagaagccaggggcagaaacgtgtatg

SEQ ID NO: 3415 - DNA, 2300 bp, Homo sapien
tgtggatcctacctcagaggttttcagcaccctcttcagatacaacttctttggtgaaactttctcccatctatgttcctttcttctcccagcctcttctcccaccccagggtagtatgtggggtagtgtgttctgagaactagcctacattgatagcttattatatgccaggtgctgttctatgagctttgcatgtgctaccttgttctaccctcacaaaaactctaagaggtaggcattattattattatatttatatttattttattgtattttttgagacagagtctcactctgttgcccaggctggagtacaatggtgtgatctcggctcactgcaacctctgcctcctgtgttcaagcaattctcctgcctcagccttccgagtagctgggattacaggcacctgccgccatgccaggctaattactgtatttttttttttagtagagacagggtttcaccatattagccaggctggtcttgaactcctgatctcaagtgatccgcccaccttgtccttccaaagtgataggattacaggcgtgagccaccacacccggctgattattttgtaataaaaaagacggcagcacagagaagtgaagtaattttccagaggccatgcagcaagtgaaaggtgaagctgggattccaacctaggaagccagcctcctcagcctgtgctcttagccattgctttatagtgactaataacttgcaaagaaaaagagaagagaaaaattcttgtgtcattactcaatatatgctatttggttttgtaattattcgtgtcattattttatatcttcctctacgtgggctgaaaattcctagaggggaggaactctgggtctcagagcctgctgtctcagttaccatcagttgtgggcacaggtaatgctattgagccatcacatcctctggagattgtgaattggtcatgatcaagcccactcttcactggtatttttcctaaataaattcattgcttgaccaaccccggggcaggatcaggcccagggttccacatggactccaagaaagcagtgcttagttttctcattcagattgtggctgagaagttgtcatttatcgtctgtacaataacgcagatgtgtatgtgacttcccccttttcagcagtggagacactgaagcggcctgaggttatttacccagagtcctcaggcaggtctgtggtggagcttcggtggaactaactggaagtgactccatgtttccagtccaggaccctgggcaaccccgtggtaattgtgtcctgatatacttataaggaccagtagatggactaagttgttgactgaccagaaaattctggaactccctagcactatatttttaccttgacacgaaatgaaattatgacatcatcatgggaacacaggacttctttctttttattttcagaacttgctcgatttttccaagggtggactggtcagtccttgtaatggaaaaatggaaatggaaaaaaaaaaggaaaaaaaaatcattgtggagaacctgtaacatcttccatttaacttatttgataactgggtttgttctagaatctagagaacaaagtgaaagatgccagctttagaggacaaccaataactttgtatctagacacgattccttgaaaagaagccaaaaacctaggcaaaaacttttagaatcccccttttctttggggttagaactgacagctgctaagagtgtatgtgactctagcggggaaagcggctcatccaaaaataatgattgccaaatactttgcagtaatactatttgttatccaggggtgtcctccgccgcgtatggccaccatctctatttttgccagggttgaggggggtcgcttacaggtgtggccggcctggaaacggtggtgtggctggtgagggcggagtcgatcagggaaggatcaggactttatggcagaacagagtccaccaccgtgttcggaagaaagttcgaatattttgttcgctttggttccggcaagccatcgcacaagccagaatctgtaactccaaacagtagcgctctcgagcaccgtcccgaacattcactccccacgggcctggtctgcggccgcaagccgtcgccccctttaagagcctgctccgcgggactaacgttcgaacgggccctggcgcccctcctcgggctccgattggccgtgcgcggcgcacgagggcgcgccggccagccccggaacggttggcggcccttcgtgattggcggtcgagaagcctatataaggcgcggggcagccaggctgccctgt

SEQ ID NO: 3416 - DNA, 2300 bp, Homo sapien
cccttcccaaaaggctaaactgttcttgtaaaacaaatgaaaggccaccagctatgaagtcaagatgacagtggctagaattctaactattaccagccattattccagaggtcgtaagatttgcaacttccccagttactcttgaaggtaacatcactattgtgaacccaagatctgccttttgagatgtcttttcaggtttttacatttctaacaactggatggccccacctggacctgccaaccagttctggggcccccacccaggaactgactcagcagaagagaacagctttgactccctatgatttcatcccctggccaaccaatcagtactcctgattcactggcccctgactcaccaaattatccttaaaaactctgatccctgagttttccagaagactgatttgagtaatattaaaactctgatctcccgcacagctggttctgcgtgaattactctttctctgttgcaattcccctgtcttgataaattggctctgtttaggcaggaggcaaggtgaaccccttgggcggttagaggacctcttctttggccctgtggggtgtgctggggcctgaggggggacaatggaaggggcctgggggctgttccagcgtataaaaccattgtgaaagttggtgctttccctggttaaggcttggtcttggatgctgtaggttcccctgacctctggccccaggtgcccatgcagtctaaggttcttgcagccatgatctctgtttcttccttgttctgctgttacaacgattcttccatatcatggatattttgtgagttatgacagtagtttggggaccacaggtagggacggtcatcctgaaagggatgatctccattttatagaagagaaaactgagtctctgtgggggtgagtctcacagccatcagggatgatggtggcactgggagtggcccttctggctctgcagctcttgtggtcaccctgggctgaggtggggcagtgtccatgtgcttggcctcttttcccatcgaacatcattcagaatgtgattcccatgtgtggggtggggtggggggagcgagagccccagcatagactccgtgaatgcccttctccatgcactgactatggaaagtgctggatgcactgagtgtcactagctaaggtaggggaggatggagaactagagggagaaaagccagggtgttttctggggaagagaggaagcaggaggcaaaagaacagaagaaaaaagtgtgaaactgaccttgagacattaacctatcccgctctcatccctgccttgtctctgtacccctccccgcaaagttgaaggaggtgccaccatcccggcctcagagacgccagttcctgagactgcccagccctggttcagccttagcaaaaaggtgtaaccaggggctgcagctgtcctggaactgtgggaaagcctggggttgggtgttgggggatctgaagctggggttgaggaggagctgatagaaggactctgggaggcaaggtcccacctcagcagggtggggcaggtgcctggcacgtcattgtcaaaggcgttggaaccagagtgactccatcttgaataggggctgggtgaaatgaggctgagagctgctggggcagcatccccaggaggttaggcattctcagtcacaggatgagacaggaggtcacaagatgcaggtcacaaagaccccactgataaaacaggatgtggtaaagaagctggcccaaacttgccagaaccaagatggtgacaaaagtgacctctggttaccctcactgctgattatatgctgattagaatgcgttagcatgctgaagacactcccatcagtgcatgacagtttacaaatgcccagaagttaccatgtatgtctaaaatggggaggagctctcggttcctagggaaatctctgccccatttcccagaaaactcatgaataatccacctcttgtttagcatatgatcaagaaataaaaatagccagtagcagccctcggggcggttctgcctatggagtagccacccttttattccttcactttttttttttttttgagacagtctcactctattgcctaggttggagtgcagtggtgtgatctcggctcactgtgacctctgcctcctgggtttaagcgattctcctgcctcagcctcccgagtaactgggactacaggtatgagccaccatgcctggctaatttttgtatttttagtagagatgggttttcaccatgttggccaggctggtctcaaactcctgacctctggtgatccacctcggc

SEQ ID NO: 3417 - DNA, 2300 bp, Homo sapien
acgtcctcatcacaaagaaatgataaatgtgtgaggtgaccgtcaggctaactacactgatttggtcattttacaatgtatatatgtatcaaaacatcaaattgtatcccataaatatgtgcaattacaatgtctcaaagtaatcataaaagaatattattattagaaggaaggatttctgtaaaggaaaagaaacaaaaaagaatagatgatcaggactgtaagtgcagtcacccaataaaaagtcatagttccttgtctggtttctggacgtgagatagtttcccggactcactgaaggagaggcaaagtccccaggaagaaggacatctctgcaggtatacatgttaatgattctaccattccttccttcaaagacacctacaaccgtttattctggtaattatattctggggaaaaaagaatactgaaatagtttgtggcaggtggacatagagtttgagttgacatagacacctcccactgctcctgccctcattcactctgagccagctgcatgggccagaagtggacttacctcagggcctttgcacctgctgtcccctctgcccacatgtccttcccccaaagatctgcatggctccccacctcacctctcagggtgcctctgtttcctctttgtaaatggggtgataaccacagtacccaccccagggaattggtagaagtgttgcattaatgacatgaattgctatttgtaaagtttttagaacagtgctgaacatgcaggtgcactgtataggtgtttgggacctataaaaacatggagcttgaaatcttagatgatgtctcctcatcttatgaagttctttctcgattcttgcagctactctggattgggtgaagcgaagctgagcagttgaggactgaaggtcacgccttttgtatgagtgaaggagagaggaagtctaggcaagccttctgtgggggttcatcagtggttacccaggctcgtctctgagccaggttgctaggctggccagcgtgtgacctccaaaatccacctcagacaacagggtcctggtttctggggatgggaacagtgaatgagtttttaaaaggtcctcagtgagccaggggtggtgccacatgcctgtagtccccgctactcaggaggctggggagggaggatcactggaacccaggaggtcaaggctgcagtgtgctatgatcatgtctatgaatagccactgcacgccaacctgggcagcatagtgagaccccatctcaaataataaaaaaaggtcttcaggagattttgatatataactagctatggaactcattgtagtgctgatttgccttttctgcctgttttattttgttttagtctgtggagagtgagtgtgtttgtgtgggggataatcctttgtaatccacttgctctggcagagctattgtaatgattggtttggatgtgatacttttgtatcaaagctctttccattgtcaggtgggtgaataaagatcattatttgttcctgtatgtaactgtcaagtagagagctttcccattctctccctgcatcgctctgtatgcagtaggtatgcgggaatgtagttatggcaatgacatgcccttctgaccatttcccacatccctttctgagtcaggtagaaatatttgagggccagtgggactgacaatagctgttctaggaggtcagaaaggaagcggaaaagcaaggctggcttggtttctggaggaagagaagccggtcctgagagccctccagcctcccggcactactagggaaactgtccagttgagttacttagaattgcatctctactgggccctgctgttaatctccagcccagcccccatcagaacccagatcgatagctgagaatggagctgtctgtctttctgacccccctgattgttttgttattgctggtgggctgatttccagttatgtaacctcctctctgttagatgaaatctcattattttactgtgctgtgcacatcaggtctgtttcacgttgagctacctgagaggagctgggaacgtgctgtttctcatcattatcacccagcaagagaactggagagagagctacacccaaaccaattatggtcaggccctctgggctgttatataattttccaggagacagtggagtgaagcagacctcagcgtcccagaggtgtgctgccacgacagtgtgctttccttgcttggaagtcttgggtaagtaagttctctttccagcccagaagattttgaggggcatttgtatatggggtagagagagttcctaaattgacttacg

SEQ ID NO: 3418 - DNA, 2300 bp, Homo sapien
tcacttctcaacagttaatctcacttcacaggcgtgaagccatactcacccatggtttccaacctctgggctttggtcagtgtctgtttccttcctcagcccctcctttccttcttcccttccattgttcgggttggaaggatttggagaggcctatgtgttgagccaaggcaggaaaacacagaagacggtgtgccccagctagtgtggacatgggaggggacagctggtccctgccctcagttcaaaccaccagtcacctgtggggaagggcttggcggctaaacaggagctctttccctggggcttggagtccacctttcccacctctgcagctcagataccaattctatttttttttttttctacattaatgggttgggtttgagaaagtccgtggagcttatttgggagtaaaggatggggggcgggaggatccttctgattgttcgcatttcgagaagggtagttttagcccataactcaccatggagggcccttccaggagacgtcgggcagggctttcctacagcggaaccgggaggccgccccgtgagggcagaagctcccgccaggagccagcaccaccagcagagtgtggaacccccagaggtcctagcctcctccacggggcctcccaggtgctaagtggggagatggggagagggttctgccctctacttggaaatgcctggccgtgttcgtggagcctgggaggtgcggaggagcggcgacgcggccatggcgctaggcgcgcaaaggccccgacaccttactagggcggcggcgggcccgtggcaccgctcccggcaccgaacagggcacagcactggggacacctctctgcagggacccaagacgcgcgtgcgtgtgcgccccacgccaggccctcgctctcttgcggagactccgccgcatcgctggctgcacctgcctctctcttctcggcattacttgggggaaaggggactcttcactggacctttgcagaggtggctgctaccctttggccacataaatcaagaaggcaagccagcctcaccttccaggaacctccagccttccggctgcgtccccgcccctcccgcctggccagctcctcccccgcttctcccagcgctcttgcgcgcctcgctgcgcctctgcgcgccgctcgctgtcctctgcctcgcctccccattctccttccgcatcttctccagtgctccgccgagggcgctgcctgcggggaagagggagactgagccgttagtgaggaagttcggtctgtggacaagtgtggtgccaggccgccgcgaggctcggctgcaacctgttcctcgcccgccggtgctcgccgcccgcccgctcgcactcccgccctctcggcggcgcagccgcggatcgctgttgcatgctgatccggggaggcggcggtggcgagcgctccgggcggatgctggcactcaggcttcgctgctctctggatgctgctcaacttctagcccaagcgcaggagctttgaagtcatttgtcccttttcgcttggatcgacttcttattttgagattttgggcattgcggtttacgcaggaacctcaatatcgctctccccacctccctccctctttctccaacctttggatgcgtctctgctggcagatataaagacccaagtcttcgcggtggaatttcttagatggacttgcaggggctggcgttataaagcatgtcatcgtaaccccgtcctcgtctttgtttatttttttttaaagttcttttgttttcattttcccctccttcccaccccttcccccaaccaataaatcaccaaactgttacctagcgggccggtgcctgcctctctccctgaactaggtggtgcgtctgccagaagaggagctatgtttgaagagcagcctactccacccctctcctctctggtccctgaacaccaccacacactggcattttgaaaaaaatattttcctccagaaactgggcacccccaagccctaccacccgctttttttttcttttttcttttttttttttttccttcttgaggaatggagcttcgcagaggttgcatttagattcaacagttcacagcggcgggctgctgctgctgcctctccgaagagctcgcggagctccccagaggcggtggtccccgtgcttgtctggatgcggctctgagtctccgtgtgtctttctgcttgttgctgtgtgcgggtgttcggccgcgatcacctttgtgtgtcttctgtctgtttaaacctcaggatggctcgcttcggggaggcggtggtcgccaggcc

SEQ ID NO: 3419 - DNA, 2300 bp, Homo sapien
cacacacagcacaaagtgcattttttaacaaaagaaaacctttcagagccaggatgtccttgggactttgaaagcctctgaattcctcctgactggtctgagcagaccccaactaagtgcagctgcagagcctgctgccagcttaccctgagggtcctggcaggcttcactcccatgatttccctttctggtagcagcaaagaaacacatcaagtgagggaaatcaggccgatgcattctttacaacaaggttttatttattcttttcttttatcccccccaaaacattaaagtttttcatctttcttttatttttaatggttttccttttggatccaaacgagcatctatattataggatatccgcctggtcaacatgcagtgctgaactgtggctttaggagagatgcaccgatactctgggtgggccagcatcagctgccattcaaacaccgtgactgcaggggtgtcaggctggcacaccacagtggatgctgccctaaggaggtgtcttgtggggcatgacttgcacgttttagaatgcaggtagcagcattttaacagcctgaggcagagcacccaatttccctcctgatctcatcttacatgctcatcctctaggagcaaaacaaagagggaatggcctgaccatgggccccgaaggacagagggtgtggaccctgtagtccacctccttgcaatgttgttatttgaggctagaaccggtgcaccctgcagagtctgaaatctgttcctgatgaagctcattcccatcccactcactggcccttctcccatcccatggtattctcaccactaggaagttaacataatctctcctttattggtgctactatgttgaagagttgctgaagtcataaagattgtcttcgagccgctttaaagcaagaacctctttctctccatctcccaggtctggaagaaaattttgggaatctattaatcctctgaggccttcaaagccactaccctaggtgagtttaacagaaagaacttctcttaatccagtcttgtgctaagaagtttacccatattctaagtgaaaaagaggatccaaggttacacatctctaagtctgtcctcgtctgggacctgttactttctacctcactttgcttttgttctacagcttgtcttcctaccctctactccattgtcccagccatgaaatgccaaacacatgtggtgcattaggcttttctcctccatttgtttttctggatgaattcaaatcttggactcagtttgagcggagttggactgccctctaatatcacgaagaggcaagttcctctgcaattgcagcacttagggtagctttgtataaattttgacttgttcacaaaacaacatgatagaaaaacactgactaaagttcagcctgcaggctaagtatatatcccaattggtagccattaaaactcaatacctatgtttttactaactccactgggatctgcttaatattacacaactccatatcaaatgtaactaagaccacaactactgtctaccttaactggcagttatattacattgtttagccctcatttcatattacctttattcttaaaaattgattaatggcactttaaaattttggagtgtgtttttcttgctcatcccttataaaaatgttcaacagatttgctttaagtggtggttcttgtgccatataggccattgccataaaaaaaaattagagtactggaaggaaaatattgagtcatcaaataaagtcaaattcggatttggtatatttgattatttcatttccttttcagttttggggccatcctctgagtgaagtgaagaggaagtggcacagcctggtataaagtctagggtctggttgtagaatgtagacagcaatccattctcatctctgacaaacttgtaggacaaaaagagaaaagattcgttcagatttccaatgctgggttggagaatatgtctgggtgacaatctatgactggtttaagtttgcacaaagagaaggagacataaggaagctcagatcatgaaaacccaactttctggatagaaaaaaaaaagcctaggttttttttttttttaattagagagacaacaagaagaataagggaaaatgggaagaatagagtgaaattaaagcaaatcttggattcagattccattaaacaggaagtttccttaaaaaaaatcaaatgcttatagcaatgctgagaatttcataggtacttcatgggatctaacaagtgaagatttttctaaattgctttgtggagactaagtgcttt

SEQ ID NO: 3420 - DNA, 2300 bp, Homo sapien
aaaatctaggcaataacattcaggacataggcataggaaaagattttatgaaattgccaaaagcaattgcaacaaaagcaaaaattgacaaatgggatcgaattaaactaatgagcttctgcacagcaaaagaaactatcatcagagtgaacagacaacctatagaatgggagaaaatgttttcaatctatccatctgacaaaggtctaatatccagaatctacaaggaacttaagcaaatttacgaaaccccccacaaacaaccccattaaaaagtgggcaaagaatgtgaatagacacttctcaaaagaagacatacatgcagccaacaaatacatgaaaaaagagctcaacattactgatcattagagaaatgcaaattaaaaccacaatgagataccatctcatgccagtcagaatggcgattatcaaaaagtcaagaaacaacagatgctggcgaggttgcgaagaaatagcaacgtttttacgctgttggtgggaatgtaaattagttcaaccattgtggaagacagtatagcgattcctcaaagatttagaaccagaaataccatttgatccacaatcccattactgggaatatacccaaaggaatataaataattctattataaagatacatgcatgcatatgttcaatgccgcactattcacaatagcagacttggaatcaacccaaatgcccatcaatgatagactggataaagaaaatgtggtatatatacaccatggaataccatgcagccataaaaaggaacaggatcatatcctttgcagggacagggatggagctggaggcattatcctcagcaaactggcaaaggaacagaaaaccaaacaccgcatgttctcacttataaatgggagctgaacagtgagaacacatggacacagggaggggaacaacacatattggggccagttgggggagtgcggggtggagagagcatcaggaaaaatagctaatgcatgccgggcttaatacctaggtgaaggaagggttgataggtgcagcaaaccagcatggcacatgtttacctatgtaacaaacctgcatatcctgcacatgtatcccggaacttaaaatttttaaaaatcgtcaataataacaatgaaagcagctaacgtttttgggtacttgctatgttccaaacaccgaactaagctccttacatgcattatctcatttaatactccccaaacttccatgatggcaatagtatcctggtccctgttttgcagatgagacactaaggcacacagaggttaaataacttgcccaagatcacacagctagtaagtagtaagattcaaacccagacccagaccgtgctgtcaatcagtatactttgtgaccacctagtgacatcacaggaaccacacttccatcacctattttaatgccctgaatgttcatcctaataaatgcacattagacttgagtgggtaaaaattctgaatgtactgagtcttctaccttgggccaatccttctcttcaaaatgaacctgcatgggaatcaatgctgaaagtggaaagagaccccagacaggcctggcatctgtatgcataagacagaaaaccatctccctgcacccctactcccagttaaaaggctgtgggcatctttgagccaatgaatgggctgctacaaagaattctgggaatcccaacccctcacagttctgcaactcacagtcctgcaaaaggtgggtactagaatagggaggtgggcatataggccaaatactctgttctgccttccaggagggaaaaagcatgctacccaggaagctcacaagtgacatgtggcccatgggcataccagggctaaagtgaaggatggactgctctgtggaaggaaggagtgaaagtgaacaagaggcatagggccacctgcaggaagactgagaggagggaaggaggaaggctggctttggcagggaggggaggcaggagcagagggagccagaggatcggttcaggcagtgagagagggcagccccactctatttcccaggctgctctctggatgcaggcaggaaggttgagtgtattacactggccccacctccagaggctctctctgcagccgctggactggacacaaagcgtgagagacagagacaccatctctgctgatttgtacctaactggttcctgttgctgagagcccacgtgtcacagaagccagggcagaggccccacactgctgtctgcatttcccaggtaagcaaccgtctgtgtgtgagccaggagtggagagcaaggcctgaaggcggtg

SEQ ID NO: 3421 - DNA, 2300 bp, Homo sapien
acatccaaagcagtgggggaccaggaggtgggtcccttaggatgaggaggcattctgaataaactgtgtgttgtgcacctgcattttggctatgacctgtcacatgaggtcaggtgtagaatttttcacttttggcatcatgtcagtgttctgaaagttttggattttggagcatttcagactttggattttgaggttagtggtgctcaacctatactaagcagatggctacagtaaggctgttctgaagcttggggatgtcttcacctcttaagaggaagaatcctaatgggtgagggtaaaccacccaaggagccgatgtgggtgtgtagcccagaaacacagagctgaacaggctcaggaagcccccaggtccactgaaggtgctgaaacagtgtcactgggactgggatgaaactatagctgggtgctaactaactaaggggcaacctttacagttgaagatgtgtcaacaggagaatggcctgccagggtccaggaaaagggacttggcaaagcgagaacttaggtctatccccagtactgcccatataggttgtgtgagagcaaacctgcagctggagccacaggtaacagggccctgtgcagttataaccaggaacctctgttttaaaaatcacccatttccttttcttccttcccttccctcttaccccttcattccttccctctctagacaatcccctcaccagtgcatgcttatctaattatgctcttacctaagaaatcccagaggctaatattgaaacaatccaggtgccccactcctcccacttagggggagttgtgaacaattgagccaaaatcaagctaataccaaccagacctcctgatgagcaattaaccaagagagccaacggaacaagacacacaagtccagtaccctgtaccactcccacatgtcccctataccacatatccctttaaaaactctatggtaagttataaaatgtaagatgatactttagaatgctagcttgccatcttctgggtttgctggctctgcttttcctcccagaaccccttgcctctggctttgcagcagcaagcagctgaacctgggtccggttacacagccgtgtccttggggtgcagaagaggcaccaggctcctgataccagccccagctctgattcagtgctcttggtgctgtagttcaacttgtctacactgtcctatgcatagagccaggctggtgagccttcaggaatgtcctgggatcctcggcagtcccgtttttcctggtaaagaaggactgcacatcactgtgcaaagggcctctgccatatctcatcctccctcccctcctaagtgagaaaacctggctgaagagcagaagcttgctctccagagtagccatgcctggagccctcacacctctgcccttccctaactagcctgggcacctggggtggaggtggtgacaggtgggtgggggaagcgtgtcaaaatagagtttttgtctctgcaaggccaaggactgggtctggcccaggcactttcatctgatgaggcccagctattagcagattgttgatactttttattccaaatgtaagatttcaattctacatatgtacaagaatgtaatttgcttcattgatgttttcaaacatgatgacataaaattgctcaaagtatgcctttatatttttataccttacttatattttatttctttttaactcacccagcccccactccccattagatttgccagaggttttcatggtcttttcaaagaatagacatgcttactgttcaatataggcaaaaccaggccacagctcatcctgccaggagaatccacacctacagagggatgccgcactccagcagccctataggaaatttctttcaagaaacttgcttcacacccgtggccagagtgctatgaagagaggtcctctctggttacgttcagtgcagcagttgaaagaggaaaagggagtatgtttttatggaaacctcaaatgcccttccacatctcctgtgaattacctctgtgttcaggcagccgagctagacagctgcgaggagaggcgtgtggttttgatgggggccttggaaagaaaaggccccttgtaccctggccagcgcatgtaggtggtgtgacctgggaggacagcggagccaggagctccgcagctgtgtcagaagccaggctcccagcggcaatgttccagggagccaaagggggagccagagagccgggaggctccagcctggtccagagagaaagagacagcacctgcccaaggcggtaagcaaggatcagg

SEQ ID NO: 3422 - DNA, 2300 bp, Homo sapien
cctcgacctcccaaagtgctggaattacaggcgtgagccaccacaccttgccttgattttgtttcttagcctttaaggcctaaaatatttattatctgattcttttttttttttttttttttttgagatggagtctcgctgtgtctcgcccaggctggagtgcagtggtgtgatctcagctcattgcaacctctgcctcctgggttcaagcaattctcctgtctcagcctccagagtagctgggactacaggcatgtgccaccacagctggctaattttgtatttttataaaaatactagagaaggggtttcaccattttggccaggctggtctcgaactcctgacctcaggtgatccacccaccttggcctcccaaagtgctgggattacaggcctgagccaccgtgcccagctattatctgattctttatagaaaatgtttgtcagctctgtcctttttccatttccttctcattcctctttttccaggaaggagttgagcttcagcggaagaagtttataaaacctgcctgaatgccctaaaaactccccattctcttcatgtgctcctaaatccaaaatgtctttcttcagaaggctgaatcagatgtgaaggctctcttcgacactctagaccagtgctgcccaatagaacgttgtgcagtgatgggaatgttctagaattgctgctgttcagtgtggtagccactagccacatgagggtattgtgcatttgaaaggtggccagtgtgactgaggaactgaattttcaatttcatttaattttaattaacttaaatagccacatctgtctagaagctagtttattagacaacattacttgttcagagaacctgaacaagtgtcagactaattcaagagggaagtaagagaaattttggtggtcagcaatctgagttcctacagagaaccctgatttttatactgactagtttttaagtttgatttgcttattttgattctaatcagcttagcaaacatttattgagtacctactatgttccagacattcgcccaacatttacatattaatggtagcataggttcctgatgtcaagagctctgagtctagaagtgagataacaaattaggcacttattctccaaagcaggagtagtgtttcctcaagtgccacagcttttcttgttcttctctctcttttttgtttttttttgtagagccggggtctttatctcatgctcaggctggagcgcagtggctccttctaggctcactgcatgcaatctcaacatctggggctcaagctgtcctcccactcaggctcccaagaagctgggaccacaggtgcgtaccaccacacccggctaattttgtttatgttttgtagagacaagatttcacatgttgtcaagactggcctcaaactcctgggctcaagcaatgttcctgccttggccttccaaagtgctgggattataggcacaaaccactgcacccagcctagtcccacaactttcttctcagtggctgtactgtctcttcacaatggcggtcttaccccttgcttgaaccttcactttctcaattctggaaacttctacattgctcagtgcttcttccacatcttgtagattccttatgcttggcgttggaaacttcttcctctaacagtggagatttttcttcagagaaccactccacctgcctgttactggctgatacatctctgaccaaaacaactgtatacaggactaaacctcagttcttcagggtcagggtaggaagtcagaggtaagagatccataaatctgtactgcccccaagccacaagctgtctctttggattagcatagagtagcaaatggccatggggcatgtccgttgggtcacctgagtcttgtggaactggattagtgacataactgtgttaggccctgctgcagacagtgatctctctggaaggacatgaggtggtgtgagaagtcacacaactcattgtgagaccacaggggcagataacgcctcatctgccttcatcacaatgcttgaaccttaatcctttgatgatagctttgccacataacttttttaaatctctggacatttttccaaactctgttgaatttcattttgctgacttcatctcatcctgtgtgttccaggtactggtgtctggtaattctattatagcaaactttctcttgagggttttggggaaaagaatgagacattcttcatattgactctgtttagagggagatagggcaggagtccaggagtgcaaatggatagacagacacaagagaatgctttgcct

SEQ ID NO: 3423 - DNA, 2300 bp, Homo sapien
ttgggaaccccggcctgtccccaggcccgcgcggcacccgccctagcccaggcccgcccaaagttccctcgggtcccgcgccccgcgctccctctcaagctaacccctgcccgcaggaagcggggctcggaggctccctcgcaacaaaaggctaaattcggtttccctggttccgcatttccccagggagctctcctcgtaaaactattccccgtgaaggcggcagggcagaggtccagggcgggctttgctgggagcctcgggaccccgggttgggggccgtggggcggcacctggcgagctggcgggtgggcggcgagccgaggcttcccggcctggcggcaactcgcccctctgccctcagccctcccggctccgctcccttcccccacgccgccctgcccctcccccacgcccctttctctttctttctttctttcccagttcgcttgcccccaccccagcggcgcccgccgggctcctcgcccaatggccgcggggcccgggaccgcatcagctgatcggcccgggctcctggccgctgggagccaatcagggcaccgggggcggccccgggccgcggataaagggtgcggggctgctggcggctctgcagagtcgagagtgggagaagagcggagcgtgtgagcagtactgcggcctcctctcctctcctaacctcgctctcgcggcctagctttacccgcccgcctgctcggcgaccaggtaagcccccggacggcccggtgtcacgcaagcgaggcgcgccgcccctgctaccccgcgaggcgcgccgcccagcctcttttttcggctgcctgcccctccagtcccagccctacgctgcggcctctccggcccatgcctgagatccggcatgagtgctcctcccgcgtgcttccgccgctggtggcttggacccgtcggggctggcgctggtggggcgcgcccttggccaggctctgggaagggcggggtgagttgttttgatcttcttttcactacttgcggccgaagcgccgcccctggaggccgttgggccggcctgcgccctggggctcgcagtggtttgtttgcgctgtggatggagtggcggtgcggtcccctgtggagcgcaaacaaggcgcttggttggcgcgggcgcctggctgccttcctcgtggtggggccttcggagcaatcgtcctggttctggcgatggttgagacgcctcgattgcggcgtgtaacggtgagcgttgtttgggcggccggctcccgcctcggggtcccgggggccttccaatgtgaccgaacaatggagagcccgggcctcggcgcagtcagtggagaagccggtccgggcggaggcagcagcagcgcgcagtccctacggcctgcgcccccaccctcccccggaccccccaacccctcggcggcagggtatggccacctccgtgaggccctgagattcggacgggggcccgaggggcagggcgcccactttagggacatttcagtgggaaggggctgctctcaaagtggataattataactccctcgggggcgggaagcggggatcctcccccagccgcaagtccacgaagaaagcaacgaatgaaaattatgaagacaacgagaagtcagactcctccgggtcgcgctccagctgcttcggcttcgtcgcctactctgtgaactccggggagagatctcgagtcaagattaagaccttaacccaccaacctgcctgttcggacaccccccgggccggccgctgtctgtccccttctccatcgccctctcccagaaagctccggtgcttggaccagctagagtctgagaaagaggagaggcgcgaacgccactccaaaaagagaagggttaaagagggcaaccctaacgatacgcttgactttctgtggctggggtgagtgagggggcagggaggacgaccccggagttggtgggagctgcagaaactgctgaaaacttcagaatccatttcccccacgtaaacttggcaccgcagcagcagcagttgatagagtggcactaggctgctggcatgcaactcggctcacggaaaagagcaagagatccgaaactgaggcttaggacaaagtgtgcatgatattggtggtgtaacatgttggagaggacagccgagaaattgggttgtaggttttttttttttgttttccgacagagtctctatctgttacccaggttggagtgcagtggtgcaatctcccggctcactgcaacctctgcctctggggttcaggcgattctcctgtgtcagcctcccgagtagctggg

SEQ ID NO: 3424 - DNA, 2300 bp, Homo sapien
gtttgagatgaatgctgcatctgtcatgtaaaagcactacagtgttatacactcttaaaggaaagggatgttgaccaaagaagccaagttatgtgtgtgtggttgcaggcaacatttcttttccacatttgcggtacaaaacataaccagaacaaacttcttcccttcctcttccaaaggcactggaagcataaattcttgctctttaaactgaaagaagcaataaaatctggacaccatcaggtagatttcaggcactaaaaatagaatgatcgagtaatagtacggatagcagtatctacctacctacctacctacctacctatgttgtgtctctaggtacatttcaatattgtgttcacatacacattttcccaaccatcacggcaagctgagaggagaggtatgtattcccattttccagattaacaagaagccgcacttgataaagcaaaatcagggagaattcgttaaaggaatttcttgacaatccctggacttcaaagggggcaagtgaacacctcgatttcctttcagctgctccgggggcagtttgcacacagaatttcaaatctagtgggcggctccacaggtcattttcgatgaccactttattttgcagatgaggaaacttgggccctgaaagacctgcctagggtctggccagcagtatgagacaggtctccagacttagtttctaccgccctccagaatcctctctgtaaaattagagaaacagcacgttgatttcaaatgtgaaatggcagagttctgtttatttccccagacccaagagagccggagcgggcggctcttccaggccttgggaaccccggcctgtccccaggcccgcgcggcacccgccctagcccaggcccgcccaaagttccctcgggtcccgcgccccgcgctccctctcaagctaacccctgcccgcaggaagcggggctcggaggctccctcgcaacaaaaggctaaattcggtttccctggttccgcatttccccagggagctctcctcgtaaaactattccccgtgaaggcggcagggcagaggtccagggcgggctttgctgggagcctcgggaccccgggttgggggccgtggggcggcacctggcgagctggcgggtgggcggcgagccgaggcttcccggcctggcggcaactcgcccctctgccctcagccctcccggctccgctcccttcccccacgccgccctgcccctcccccacgcccctttctctttctttctttctttcccagttcgcttgcccccaccccagcggcgcccgccgggctcctcgcccaatggccgcggggcccgggaccgcatcagctgatcggcccgggctcctggccgctgggagccaatcagggcaccgggggcggccccgggccgcggataaagggtgcggggctgctggcggctctgcagagtcgagagtgggagaagagcggagcgtgtgagcagtactgcggcctcctctcctctcctaacctcgctctcgcggcctagctttacccgcccgcctgctcggcgaccaggtaagcccccggacggcccggtgtcacgcaagcgaggcgcgccgcccctgctaccccgcgaggcgcgccgcccagcctcttttttcggctgcctgcccctccagtcccagccctacgctgcggcctctccggcccatgcctgagatccggcatgagtgctcctcccgcgtgcttccgccgctggtggcttggacccgtcggggctggcgctggtggggcgcgcccttggccaggctctgggaagggcggggtgagttgttttgatcttcttttcactacttgcggccgaagcgccgcccctggaggccgttgggccggcctgcgccctggggctcgcagtggtttgtttgcgctgtggatggagtggcggtgcggtcccctgtggagcgcaaacaaggcgcttggttggcgcgggcgcctggctgccttcctcgtggtggggccttcggagcaatcgtcctggttctggcgatggttgagacgcctcgattgcggcgtgtaacggtgagcgttgtttgggcggccggctcccgcctcggggtcccgggggccttccaatgtgaccgaacaatggagagcccgggcctcggcgcagtcagtggagaagccggtccgggcggaggcagcagcagcgcgcagtccctacggcctgcgcccccaccctcccccggaccccccaacccctcggcggcagggtatggccacctccgtgaggccctgagattcggacgggggcccgaggggcagggcg

SEQ ID NO: 3425 - DNA, 2300 bp, Homo sapien
ggtcagttcttggactcatctgcgccctaatttcatcattttaagtaaatgtggggctggccaaggaggacaaggcctcttgttcactcctgaaagagtcagtggtcatgtattatgttcctaacccttacaaagcgtgcccctggtcacatgaatggatcaaagcaaatccatttccattcttggaaaagcagctcaaagcacatgttctcttgatggtgctgctgtcacttctgtgtggttaacaaatatcatttattgaacactcaccgtggacactactgggggatatgacaatgaataaactgctcaatgaggtcaagacatctaggaagggaagcaggcactcaaatggcagaaataccataagcctgcagaaccgcactcacgccttaccattccgttctctgttatgtttgtcatccccacctcaggggctggtggtgtgtgcagcagaggctctggcttatggttcggtagtttggtatctggaaatgattaataacatcttttaaaataaaaatatcacttttctcctcctttgctccccttcctcgaccatttaaactcaaacctttacagaaagagatgaagacagctcactgtgttaccaaggttaagtccagtttgatataatgaatggtaaagcattacactgagtcagaaaagttgtattcaaaagtcgctatggggaaagaaagaatccaatcacctcagattatagaacttggcctatgataattataattgctgttttctaaacatttacgatgcaccaaggactactcaatctcttctgcatgtgctatcacaattaatccttttatgaggtaaaaatgattatccctcttttattatagacaaagaaacaggcttcatgtggctaagtgatttggccaacacaaagctggtatgaagggaaagcccagatttgaacctaggtttacctgacttgcagccgtgcctttagccaccacaatgtaatgcttcaaggggcagcactgaaatttaacaaggaatttgtaaggcaccttacccaatccaaaatgtcaccagtctgaaacatcccaaaaaaccctgtttgagatgaatgctgcatctgtcatgtaaaagcactacagtgttatacactcttaaaggaaagggatgttgaccaaagaagccaagttatgtgtgtgtggttgcaggcaacatttcttttccacatttgcggtacaaaacataaccagaacaaacttcttcccttcctcttccaaaggcactggaagcataaattcttgctctttaaactgaaagaagcaataaaatctggacaccatcaggtagatttcaggcactaaaaatagaatgatcgagtaatagtacggatagcagtatctacctacctacctacctacctacctatgttgtgtctctaggtacatttcaatattgtgttcacatacacattttcccaaccatcacggcaagctgagaggagaggtatgtattcccattttccagattaacaagaagccgcacttgataaagcaaaatcagggagaattcgttaaaggaatttcttgacaatccctggacttcaaagggggcaagtgaacacctcgatttcctttcagctgctccgggggcagtttgcacacagaatttcaaatctagtgggcggctccacaggtcattttcgatgaccactttattttgcagatgaggaaacttgggccctgaaagacctgcctagggtctggccagcagtatgagacaggtctccagacttagtttctaccgccctccagaatcctctctgtaaaattagagaaacagcacgttgatttcaaatgtgaaatggcagagttctgtttatttccccagacccaagagagccggagcgggcggctcttccaggccttgggaaccccggcctgtccccaggcccgcgcggcacccgccctagcccaggcccgcccaaagttccctcgggtcccgcgccccgcgctccctctcaagctaacccctgcccgcaggaagcggggctcggaggctccctcgcaacaaaaggctaaattcggtttccctggttccgcatttccccagggagctctcctcgtaaaactattccccgtgaaggcggcagggcagaggtccagggcgggctttgctgggagcctcgggaccccgggttgggggccgtggggcggcacctggcgagctggcgggtgggcggcgagccgaggcttcccggcctggcggcaactcgcccctctgccctcagccctcccggctccgctcccttcccccacgccgcc

SEQ ID NO: 3426 - DNA, 2300 bp, Homo sapien
aggctgagtccggagaattgcttgaacccagcaggcagaggttgcagtgagctgagatcgtgccactgcactccagcctgggcaacagagacagactcagtctcaaaacaaaaaacaaacaaacaaaaaatgtggtacactttaaatacagtagtcctcccttacctgcagtttcatgttcttaggtttcagttactcacagttaactgcagtctgaaaatattatagtattttgagagagagagagagaaattatattcacacttttatttcagcatcattttataattgttctattttattttgagttattattgctaatctcttgctgtgcctaatttgtaaactaaactttattataggtatgtatacatgtatggggaaaccagtatatgtagggttcagtactaacctatcccaggtttcaggcatccactgggagtcttagaaagtatcacccatggataaggaggggctatatagacattaatttttataaaaaaaataaatgggggctgctttgcctatagagtagccattcttttattcctttttttcttaataaatgtgctttcattttaaaaaataaaaaataatgaataaataaataaatggggccaggtacggtggctcacgcctgtaatcccagtactttgggaggctgaggtgggtggatcacttgagcccaggagtttgagacccagcatggacaatgtagtgagacctcatctctacaaaaaatagctggatgtggtggctcatgtctgttgtcccagctactcagcagctgaggcaggaggattgattgagctcaggaggttgaggctgcagtgagccgtcatcaagccactgcactgcaacctgggcaacaaagcgagacactgtctaaaaataaaaataaaaatagaaataaaaataaataaatgaagactcttgccttggatgcaacccctcatatgcagctggctgctacctagtgcttagaactctttctgcctatatgtgttagacacatagtaaatgataattaaagagagaataaagttgaggacctaattcacattaaaatataagcagtttgttggatctacttatctcaacatatctgcattttaataaaaaattataccttaacattccaaaattgatctcaaaaggtgacattttacattcatctactgttctttggaaagataatttggggcaattgagctgctttctttgtgatccccaaaaactgttacagaagaatgaagaggacaagagctcagtatctatatatatgagcacacatccaaacgtttataaacttttatgtctaggaagaatgtatttgctctcagtatatgacccaacatatgagtaaggagtcttttttttttttgagacagtctcgctctgtcacccaggctggagtgtagtgagatgatcctggcccactgcaacatccgcctcccgggttcaagtaattctcctgcctcagccttccaagtggctgggattacaggcactctttaccatgcccagctagtttttgtatttttagtggagatgggatttcaccatgttggccaggctgatctcgaactcctgacctcgagatctgccttggcctcccaaagtgctgggattacaggcttgagccaccatgcctgtccgagtaaggagtcttaaaggatgcattaaggtttgtgagtaacccgggtcttctctggataatctccgtgctcaggcacctctctttttctactccgagcattgaacaggggcagaaggaagcaagccatgagagagagggacaagtgtaaccagaaggtcctcaagggtccaaaagcagagctcctgagagcacaaattcccacaggtgcatactaaaaaatatttatgtttctactttggcagaactcaattagttcccagtgtactggaatgaaatggaacaatgagacccacctcactaaaaacctaggctcctgtccagaactttccagtctgtgagagagcagtgggcagaaggagatgataaaagtaggtagaacttagctctgtatatataggcccagaactcgagaggcctgtgagggagaggagagcagagaggtcctgagtattgctcttcacgcttcagtcggacaggcctgtattccatgggaaagtccattggccatttttaactggggctatttcttttctcttatggactatatcaggccacagtggtctccaagggcatgatactcaaaggttgtctcctgtatcctttgtgctctcccaggaataagcaaagatgtgccaggctg

SEQ ID NO: 3427 - DNA, 2300 bp, Homo sapien
aaagaccccacaaagaactgactcactaaagaattcagtctcaacatcctgatggtttcatcgcctttaccccaaccaatcagttacctcaattttccagcctcttgccctccatgatccccttaaaacttcagcccaaaattcctcagggagatagatttgagggtttctcctatctcctcactcagctgccttgcaatccttaaactctttctctgctgcaaaccctgctgtcttggcatattgatctgttgctgcacagtgggcaaatgaacctgttggtcctgtaacagtaatgctggcataaaaaaacctactgcactgccagtcctataaaagcatacagtaatgtcccaggccttcacattcactcaccactcactgattcacccagaacaacttccagtcctgcaagctccattcatggtaagtgccttatacaagtatactatttttcttaatcttttataccatatttttactgtatattttctatgtttaggtatgtttaaatacataaatacttagcatgtgttacaattgctcacagtattcagcacagtaacatgctgtacaggtctgtagattaggagcaataggctattccttttagcctgggtgtgtaggaggctataccatctaggcttatgtaagtactctctaagatgtttgcacaatgatgaagtcacctaatgacacatttctcagcacatatccccgtcattaagtgacacatgattgtatcaggaaaatccaatctctctataccctggtgggtggaggccactttttgccagtgggagaatggagatttgcatgtgaaaatactgtaggaaagagagcataagattgctttccagagggacttgacttccttattccattttaacttcaaccttttttttacatatatacaaatgtggcatatactggctagcaattcatagaatttgtttctttttcttcttttgtttgccatccttccttgcagttagatgcaggcttataactgagtcctagccaatgaagtgtgaaggaagtgatatatattactttctgttcttacccataaaatcctccctcacatacttttctatgctacttttctttcttctggcttaatacagaatatcccagcctagttaaaagtcatattttgttgaggatggaggagctccaaggtataagggacagatttcctggattactcattgtaggaggcttatacgcagatcatgaacactcattttggactatgcatgaatataaaaagaaattaacttttttaaaattaaggaatggaaattattgcatttgtttgttagtgcagctagttcatccaagctaatgcaaagctaatacataacccttatagaaaaatctggaaaaatacagaagccaaaactgagagaaaaagaaacacttgcaatcccataacctgatgataaccactgttgacattttgttgtagaaacccagctttaggaagacagggtgatgaaatggaaaaaaaagattgactggaaattaggagatcagggttttggtcccagttttctcttaattagcaaagcctttatttccgttagaggaaggaatgacttcgacatgtgttttctaaattgagagagagaacagggttgttgcatagaaagggagtatttattaccccacaattgtcttcttttagctagtggtcaaaacattcagaaaacttcaaagagctgcatgcttagggagaggaggtacaagggaagctgtgggtgtgactttgtgatggagcggaccagggaggagaaatggttgggattccctttggttcttgcttttgctctgggaaatcactgaactgccctgaggaaaagtggctcctggtgtagtgaactccaatgctcctataagtgtttaccatcagcaaagaaccagtgcctgcttctgagtaacctagttctacctagaatggactgcaggcatgcaggtgggctgaatttgttcactagtaatattacttctactgcctttggggcagtgggtctagggatgcagtggatgtgggggacaaacaaataccattcatcttctggctaccctatttaactcctgaaaactggaacagggatgtcgacagtcagaggaggagaagggcagaagtgtgcactagaacaccagatgtttgaggctgaaaatgatatggatgcagaataaatagccccaaaataaccttctatctgtggtgtcccgtccccctccttggccaggcatcaaagctacatgttgttcatttaaaacatgaacatcct

SEQ ID NO: 3428 - DNA, 2300 bp, Homo sapien
gccaaagagacctgctgtcatttccagggtaactgtgcacttgggaaaaggagatgcccagagttttgcaaaccagatcagatctagtaaatgtcagatctgagatgtgaatgcagctctatttcatttagaaaccaatttatttgtttgtttgtttgtttgtttgtttgtttgtttgtttttgagacagagtctcattctgttgcccgggctggggtggaatggcacgatctcagctcactgcaaaatctgcctcccagattcaagcaattcttgtgcctcagacttctgagtagctgggattacaggtgcgcaacaccacatctggataatttttttgtatttttagtagagaaggggtttccccatgttggccagtctggtctctaactcctgtcctcaagtgatccacccaccttggcctcccaaagtgctgggattacagacgtgagccactgcatctggccccaatattttctatatttacctgatgataataattatctgggggcacttggaaaatatacagactcctgagccccaccccttctaaatcagaattgccaggggacggtcccggcaatttaggtttttaacaacaaccctgtcaataaggtaattcttattaccacacatttgggagacatctggtgcccttttcttttgggaactagaaggtcatgaaagggtcagggatctaaccattatgcatttcaagatttagccagtgatactggcttttcatctttactgtttttagagtgaccctatttggttgttaatggctccaacagtcagcctttttgaactgtgggaaagacggtggggcagcaattaggactcaagggtaggtgcacacagcttgattgaaaacagtctgaaagcattccatcttaaggaatgtgagcatatattactactgtatatgccattattttaggaggagaccttgactctatttattttgcaaaagaggtgataattcaaggaataatatgatattgtagaatcatgcagtgcttcacactgaactctcttaagatgtgtgcatgttaaactgactaattaataaggtgaataaggtaattgataacagattgaagaagtatggtaagctacaatctcatcttgcaatacatagaacatcaagatgtaaagcaagaatctcttctcactaaaatcactttaaaatgcagtatttggtctttatatattctaaagaaagtacagcactttttcaaatgtaagtgatattgtattgacgattcattattaacaataatccttccagttttcagttttccctccaccccccataggaaagccttttggacattatataagcttccctacaatcccaagacttaaaagccctctctgggtgtgacactgaagaattctattctcagtaattcttggctaaagtttgaaggattatagggcttttggtctctcatcttaatatttacttcctattagggaagaacaggagaaatgaagagttgtttaatgagaaaaccaagagcctgaagagtcttcagaggaagggagttcaaacctcttggaagctgatgttttaattttaattttttaaagatgaggtttcactctgttgcccaagctgaagttcagtggtgtgatcacagctcacagcagccttgaattcctgggctgaagcaatggaggttgatgttttaaatgggcagaatatccaggagttactgcttattaaaattacatcaaatgtaaccgtttacaagacccttaggagctgagtttagcaatgcaaaagtcaccctagcatgggagaggttggagcagacaagagatcttgggcacaattataaagaacttgtcaaataaaatagtatgaactaaaggcttaagtataggaggagtcttgtatgtccaaggggattcagcagattaggtaagataaagacttatcttcagattaaggcctacaccagaggtaagtagatcactgccagatagaatctggaaccccttagagaaggtgtcattacgtgttcacaatggatatagttctattgactggggggtaattctgcccctaacaaattactgtgtcaggaagagcatggcaacatgagcagtgctggtgagtctctgccagggatgtctccaaggccttgagtctctcaaataaggcaaaccattcatcttcccaattgttaatagatctgagccattcaggggcaccatgggtgacttttgtgttattcatgcctttgttttccttctctttctccttcttccccttcctcctaccttctgcc

SEQ ID NO: 3429 - DNA, 2300 bp, Homo sapien
atatttattattcatgactattattttaatgtatatctagttatttcttttaattgaaaatgctctattaagcattgtttcttaagaaataaatttatttatctattaattattaggtagagtcataattttttttttttttttttgagaaaaagtctccctctgttgcccaggctgaaatgcagtagcacgatcttggttcactgcaacctccatcttccaggttcaggtgattcttccacctgaactccccagtagctaatttgtggtactccctgtgggtggcatgcgcctcccataggtgcacgccaccatgcccagttatttttttattttttattttttggtagagctggggtttcaccatgttgcccaggctggtctcaaactccttgtctcaagtgatctgcccacgtcagtctccaaaactgctaggattacaggtgtgaggcatgagccactgtacccagcctgagtcataaatcttttttacttatttatttattttttgagacggcgtttcattcttgtcgcccaggctggagtgcaatggtgtgatcttagctcactgcaacctccgcctcctgggttcaagcaattctcctgcctcagcctcccaagtagctgggattacaggcatgtgccaccatgacaagctaattttgtatctttagtagagacggggtttctccatgttggtcaggctggtcttgaactcccaacctcaggtgatccgcctgccttggccttccaaagtgctaggattacaggtgtgagccaccatgcccggcctagtcataaaccttttaaaccaaaagggatgttaatagggtgctcatttcacacatgcttttttattattcatatttaatatatatttacagtttatttattaatgagtaacattatattacattacatattgctcggattcaatcactgaactgaattgtctcaggaatacacttcactcaagtttcccaggagccaaggagatttgttaaagctactaaaatttatatccctaaactcaccttttcgctgcatgattgaggcagctggcggagataatcttacattcttaaaaattactatcaacaattcattgcctacaaaataatccccagattactcagcaaggcattcaagtccctcatatataattccaatgcatccctgcttcctctcttgccacttccccatccctgggctcttcacatgaatgccacatttcagcccacactgaagtactcatgattcccaaacatgttctttcctatcccgatgcctttgcttaagctctttctactgcatggcatgatctttactcaacttccctgtggtgagctcctacttatcctgcaaggtgcacagttagattaaacctccttacctttatgaattcttcctggatttccctgactgaatcagaagctttgttaatacctctgttagagcatgtgttatgctgctgttcacgctggaagctgagctccttatagcgacacttgcagcatgttgatctctatattcccagcactttgtaaagtgcctgacacataggaggcattcataaagcatttgtcaaatgaatgaatgaatgaaactgagagtatgggttaatatatctagctaagcactaactcataggttttattgttgtgtgtttgtttgttttaatgtaataaaatgttattcacaaaagggtaaggtcttcaagtgggagatatgagtagacacaccaaagaaagatgcttggttttcagggccattttgagaaaaaatgagatattactttggaacagaatgaaataatatgcagatgttaagtaatggttctgtaaattatttgtcatctctcttcttaagtaaatatttagtgctctcctctgagacttagagagaggctgtgttagctgctctattcagagataaaagaatgcctcctggttggtcatagctaatgtttgctgttccattagatctccaaattacagaacccagaatcttcagcctactctgctcccaggtgaacatatgcaggaaagatgcagcaagctgaccatccacctcataatgcatatgctgtgtttggttttcagatgctcagtccctggtatgatgagtttctagatgaagaggactactggtttctcctttttacggtaggaaggactttgggttaggaaggaatcatgaggatgagggaagaagaaagagtaattactgttttaaaagggttatgtgttaaagtaaatgaaattgttatttttcctagagtcaaccaaagatcagcatgg

SEQ ID NO: 3430 - DNA, 2300 bp, Homo sapien
ggtaggttggtgtctcaagctgtaccctaaactcacagagtaccagagctagaacattatcttttttttttttttttttgagatggagtgtggtggaacaatcacagctcactgcagccatgacttcccagactcaagcgaagctcccacctcagcctcctaagttggtgggactacaggcatgcaccaccacacccagctaattttttttttttgtagagatgggtcttgccatgttgcccaggctaggcttgaactcctgggctgaagccatcctcctgtcttggcttcccaaaatgctgggattaaaggtgtgagtgaccatgcctagcctacgtatggtacttttaaaaaactgtaattattattattattatttgagatggagtctcgctttgtctcccaggctggagtgcagtggcactgtcttgactcactgcaacctccacctcccaggttcatgcaattctcctgcctcagcctccagagtagctgggattacaggcacccgccaccatgccctgctaatttttgtattttattagagacagggtttcactatgttggccaggctggtctcgagctcctgacctcaagtgatccgcctgtctcagcctcccaaagtgctgggattacaggtgtgagccaccacacccgaccactatcatcttttatacagggaaacatgacttccagaatggtgaaaagacttgcccaaggttgctcagcaaggaaggaattgatacaggactagaaacctggacccactgcagaaataacccactgctcttaacacttttggtcaagattctccttgattacacatcatggtgatgatgatgatgatgatgactcacattcacaggtccacaccccagtactctttatagactcaaatagtatagcttcagaaagtactgaactgcctagagagttccaggagaactctgtgcatttagatatactctaaatcccagaactcacaacccaaatgaatacttctcctccgtaggaagtaaggtgctactattctgcttctgttaaccagatcattgttaaaacatctcttgctatctcagcctcattgtctcaccacattttggatacaaaaaggtattccctctcaattcatcatgcataacttaagatgatatatggctctttctagaaaaaaaatccactccaaaggacaatgatttgcaactattgataatattcagataggtaagttaattctgaaagtaattcccaaagtcagagctgagaaagggaaaacatagcatagcatgttctttgccatttgttattcttaggggcttcaattttttttgaagcaatagtagaatgtttgaaatgcatttgtagttgtggtctcatgcccgcacttcgggaggccaaggcgggagtatcgctagaatctaggagttcaagaccagcctgggcaacatggcaaaaacccgtctctgcaaaagaacacatacatttgctactcaatccctcaacagatggatgctttgaaggagtcaccattcatttgtatgagttacttctcatatatgaattaaaaaatagtagctctttcaagtcatatcttggttaccctagcaaccctcaggcaaataatctccatgggtcagttttccctaagaaggagaggatcttctcattctggagggaagaggaggcttatttccttgcctataatttagcttagggaacttgtattatttctgtaaacatcccattaaaacactattggcctctttaaataaccttttttttttttttgagatggattctccctctgtggcccaggctggatggagtgcagtggcccaatctcggctcactacaagctccgcctcccaggttcacaccattctcctgcctcagcctcccaagtagctgggaccacaggcgcccgccaccatacccggctaatttttttgtatttttagtagagacagggtttcaccatgttagtcaggatggtctcaatctcctgactttgtgatccacccatctcagcctcccaaagtgctgggattacaaacgtgagccactgcgcccagcattttaaaggcaataccttcaacaaaagtatatgaatctttgaacccagactttggacaactaaactctatctctgtttttccttacttcacagacataactaaaatgtcctttgaggagctttgctacaagaacccaaagatggccatacagaagatcagtgatgactacaaaatatactgtgagaaagcacctaaaataggcaagtgtttaaaatcagggataga

SEQ ID NO: 3431 - DNA, 2300 bp, Homo sapien
ccattttaagtctttttttaactgctgctgtaatagatgtacatagtttcagggtacatgtgacaattaaacacattcacataatttgtaaagataaaattagtatacttgggatatccatcaccctaaatatttgtttttccttgcactggaacaattaacattcttctcttctagctagcttgaaatatacaatagattgttgtaagctatattgctatattcaccctgctcacctttctttttttttttttttttttttttgtgacagagtttcacttttattgcccaggctggagtgcaatggcacgattttggctcaccgcaaactccacctcccgggttcaagcaattctcctgcctcagcctcctaagtagctgagattacaagcatgtgccaccatgcctggctaattttgtatttttagtagagacggggtttctccatgttggtcaggctggtctcgaactcccgacctcaggtgatctgactgcctcagtctcccaaagtgctgggattacaggtatgagccactgtgcctggcctcactctgctcatctttctaacactaggtcttatttcttctatcaatcaaaccatatatttatactcattaatcaatatctttctttcttccttccccctaacctttgcagcctttggtaaccaccaatcatactccttgtcttcatgaaatccctttttaagctcccacatatgagtaagaacatgtgatatttgtctttctgtgcttggcttatttcacgtaacatagtgaccaccagtttcattcatgttgctgcaaaagacaggatttcattcttttttgtggctggataatattccattgtgtatatgtaccatgttttctttatccattcatcttttgatgattacttaggttgatctcatatcttggctattgtgaatagtactacaatgaacatgggagtgcagattttttttttttcttttttgggacagggtctgtctctgtcactcaggctggaatgcagtggtgcaatcatggctcactgcagccttgacctcttggactcaagcaatccttccacctcagcctcctcaagtagttgggaccacaggcacatgccaccacacccagctaattattttattgttttagagacggggttttggcatgttgcccaggctgatctcgaactcccgggctcaaacaatccacccacttcagcctctcaacatgctgatagtgtgagccaccatgcccagcccagatgtttttttgatatgttgattttctttctttaaactatatacccagtaatagaattgctgtgttacatggtagttctatttttaattttccgagaaacctccatactatttttcatactggctgtactaatttacattcctaccgacaatgtgcaggtattttcctttttacacaacctcaccagcatcgtttattccatctttttgataaaaagccattttaactaggacgagatcatatcgcattgtaattttgttggtggtggtgatggttgttggtggtggtggtgtttttttttttttttttttttttttgagatggagtttcactctttgttgcccaggctggagtgcaatggggtgatttcggcccactgcaacctccgcctcccgggttcaagtgattctcctgcctcagcctcctgaatagctgggattataggtgcctgccaccacacccagctagttttgtatttttagtagagatgaggtttcgccatgttggtcaggctggtcttgaactcctgacctcaggtgatccacccgcctcagcctcccaaagtgctgggattacaggcgtgagccactgcacccggctctcatagttttgatttgcatttctctgatgattagtgatgttgagcattttttcatatacctattgactatttgttttttttttttttttttttaatttatttttttattgataattcttgggtgtttctcacagagggggatttggcagggtcatgggacaatagtggagggaaggccagcagataaacaagtgaacaaaggtctctggttttcctaggcagaggaccctgcggccttccgcagtgtttgtgtccctgattacttgagattagggattggtgatgactcttaacgagcatgctgccttcaagcatctgtttaacaaagcacatcttgcaccgcccttaatccatttaaccctgagtggacacagcacatgtttcagagagcacagggttgggggtaaggtcacagatcaacaggatcccaaggcagaagaatt

SEQ ID NO: 3432 - DNA, 2300 bp, Homo sapien
aggacttgggaagtgggaggggagctcccagcccttggctgcccggaaggatcttcctccagtgcccttccagagttctgtcagagtccacacgtcatttatccatgtcctcagtttctcaggcatctctttgcgacttactcaggtcgcacagagaaagtgaaattgaaagcaggattgtctgttggagtacttccgcaggctcgtctcttctctactctgatgcgtcactcagggcttccttgatatttcctctccttcccggctcctttgtttataccagcccacctcacatctgattgtaatggggacggtctacacaaacactttggttcaaagatttcattgcctggtgatcgtgtatgtgttgcacaattaattaaacttctaagaggctaatcaattaacctctgaggctttgaaactgtcagagtggtgagattgctgaaaaagggttgcttcgtgaattctatagcagatgcagttatttaaatattcaggtaacagtttcgggctgtctgatgattgaactggatctgtaattctcagatctgattgacagttggacgaaattgatagctgccagttgcctattcgtgtagtagctatatgcacatgtgtagggagaatagaattcactaagcaatttattttttcataacgggatataattagctctaacattcattgagtggctaatatttgcaacactccatactttaatgtactttacacacatgactgtatttatttttgtctccatttcaggaaatagaaaattgagattcaacaatccaaggttacaggaagtaatagtaaaaaattacacagccacaagctcaaacttagatctccctaaggtcagagtacaagctcttttcactactgcagatactccttgacttatgatggggttacatacagataaacccatcctaaattgaaaatattgtaggtcaaaagcacatttaatacacctaatctactgaacgtcatagcttatcctagcttaccttaaatgtgctcagaacacttacattaggctacagttgggcaaaatcatctagctcaaagcttattttataataaagtgttaaatgtctcatgtatttatcgaatgctatgctgaaataaaaaacagaatggttgtatgtgtacttgaagtgtggtttctactgaatgtttattgcttttccaccactgcaaagtcaaaaaatcataaatcaaagtcaaaaaacataagtcagatattgtctgtactttaaataggggcacagggttgtacaaagaggacatgcacagagtcagcaaacacagtgatcaaccttcctggtgacataagaaatgcaaagggaaaaaaagccaagaaatatatttttcttattgaatgagggttcttctttttttattgataaataattgatgtgcatattttcatggtcttttttttttttttttggaagccacctatctctggtaagaatatatttatatgacattgaaagcaatttgttaatataggttaagaatcctaaatacaatcatatcttttgaatagtcattaaattctttgaagtctatcatatgaaatctatcataagatctatcgaaagaaaataaactaaaataagctgaatttgctgcaacatcatttagattttttaaatttttaattttaaaaaaccctttaaaacttatttttgaaaaccactcagtaatagagaaatgaaacaactgtatgatttcatattacatagtcatgaaaaatgttttacaagactttgcaataacacaggaaatgacttatagtatggtattaaatgaaaggaagtaggatacagttacttacagagtataattccaaatgtcttaaaaaatatatagaaatacactaaaatattaacattggctgtttctgggcattgggactagagaaataattttcttattttgaatttacatatatttataatattctgtaatttaaaagttttataagaaataaatatatgtatttagaaaaaatgctaatataattaatttctctgattcaagtgttttctccctattgtaaaattacaaagcacctctcttcgttgccaggtggaatgtcagaagactgagaacattgttccttcttcatactgctgctctgttgccagagaatcccaatttacactcaaagcttctttgattaagtgctaggagataaatttgcattttctcaaggaaaaggctaaaagtggtagcaggtggcatttaccgtcatggagagcagggatcataacaacccccaggag

SEQ ID NO: 3433 - DNA, 2300 bp, Homo sapien
cagcctgggtgacagagtgagactccgtcttgaaaagaaaaaaaaaaagaaaagaatggggacaagctgtttctctgtgatgttcagtgatatagatcaaatccttagagcaagttacttaaccactttatgcttcagttttcttatctgcaaaacggagacaaaaatagtatatacatcataaggataagattaaataatttaatacatatataaagtgttcagaacagttcctggaccatattaaagagctatgtaaatgtttgtcattattaacagaatcatccacattttcatcactcttactaatatcattagttctggtagcaaggcagcataggtcaagatatagaggtagaagcatatgacataatgtgacaaggaactggaggctagcactgatgatgcccatgaggagtagggacaggcagggactgtattataacctgaaatcatgatatgttgggtttttcaactgtttatgatctatttctgcctattaagatgcaagctcctagaagaactctgtgaggaactggtgtggtaaatcattctatgccagatatgcagaatagtcactggtaacatagtcagtgctcaataagttttttttttttttttgagacggagtcttgctctgtcatccaggctggagtgtagtggtactatgttggctcacttcaacctccacctcccgggttcgagcaattctcctgcctcagcctcccgagtagctgggattacaggtgcacaacaccacacctggctactttttgtatttttagtagagacgcggtttcaccatgttggccaggctggtcttgaactcctgaactcaggtgatctgcctgccttggcctcccaaagtgctgggattacaggtgtgagccaccacgcctgtccaacaagtattaattaaatgaataatgggttaaggatttttgaactttgtcctgaaaatgatggtgggtcaatgatgcagggtggaacaatggatgaagggctaggaagcaagtcatcaatttcttgctataaatgatgacaaggactcgaatggtcatccctttgtagatgaaagcaagagacttggtgttgggatgaggatgaggggtggcctccgggtgatggtgccatctgtggagatggaataagtgggaggaggggcagatttaggaaaagatgagtatttccatttgacacatattcaagatttgtaggtctaaagctcagcagagaggctggggttagagagcgaggcctgggaatccctggtgtataaggggtggtagaggccccgggtctggatggtgtgacacaggtggtcgtcaagtgaccatgcactacttgttgttcacaagtcccagggctttgtctccccagcaagactgggtattctttggggatggaaatactttccactacagcactaagtacacagtacacagctcattgctaggaagatagtcaagaacagaacttgtagagcagaaaggaaccttcaaaaccaagttataggagagaactgaggccctacatggttaaatcacatgcctgaggtcactcagctaagcagccacagagctggctgtaggatcaggtctccagactgccagtccggtacccttctgagaaggccgcactgcctcagagctgtgagttgagtgagctgagaaaggtgacagggcttgggctttgggcttacttagcttctatgagcctgcgtttcataatcaacaagattgtcaggggttaactgggaccatgctgcatgtaaagcattgtgtctggaacacaataggtgctcaatatgtgtttactttccattcctttcttccaagaagaccagaatttgcaatgacaaagaaaggatgcaagagtgatggatgcagttggctgctgccacctgaaaggctgcaagactgagaggtgagtgacatgaccccgggcatcacattcctcatcagcagacagaaagtggctattgctttcctccagaaggtgtgcaagtagaagctttgctcctggtgccagagtgagcctgtggctgctttccctcccacactcctcactcctttcttggctccgccctgctgactcagtgacgcagcaggaggaaactgctcgggctgcaagcagtcttccaggctttgcggctgccaaaggaataattgagacgtctgagttgagcaggtaaggcaggcagaaggaggaaagctagaaaacctcgataagtcgatcctgaagaattcttgggctttggagactggagaggccaggggctggaggacttgggaagtggg

SEQ ID NO: 3434 - DNA, 2300 bp, Homo sapien
cgatctcggcttactgcaacctctacctcctgggttcaagagattctcctgcctcagcctcccaagtagctgggattacaggcacccaccaccatgcctgggtatgtttttgtatttttagtagcgactgggtttcgccatgttggccaggctggtctcgaactcctgacctcaggtgatctgcccgcctcagcctcccaaagttctgggattacaggcgtgagccactgctcctggcaccgtttattttgctttctttatcagagcaggagaaagtactagctcaggaattgggagataggatccaatttccagctatttcctgttccagtacacttaactaagagtgcctcaggtgtacttaactaagagtgcctcagtatacactgcctatactgtattccaagaggcacaaaagactcactaattttccttattgctagcaatcccagtatccctattaagtaaaactgaaagctattataacatttattgactgctgactacatgttgagcactgtcatataagcaccttatatgttgtcacggatgctgtgcggtgccacccagatcccgtcttggggactgtgatcatcatttcccagggtgttagtctctctccaggaattgctcttgacaaagggcactgccttaagattaggctgtcttcttgggcagctgtatgcaatgaatggtctttatggggttaccagggccttgtcctcttgcttcagtggacagttccaaagggccagctgagcttccgggcattccttggaaccagctggggtctctgttgaaatggcatggccttcaactcctccctctgcccagacctgctttctttactccctcttaattctgataactctccccagtaaacctcctgcatgcaagtgtctacccgagtctagttcctaggaactcaaactaagaattaatttatttagttctcacaaccaccttatgaaataagttgttctcttcgtagagacaaggaaatggaggcatagaaaggttaagcagtttgcctcgtctcccatcagtagccagttaacagtgaacgtggccttcctgcagctgggtcttcagcaggtcacctggcagagccatgacttgaaacctgaaaatctaactctagaccctgtacttttaacctcacatacagcctcttaatagcaatcccaatgcctttatgggaagatgaggtgagaggaagggcatttattacctttatgtcagagatggagacaataaggtattaactgcttaaacccaggatcgtccacaggtatagccgtgaccgggtactaacctttgtgtgtgtgtgtggtgtgtgtgtgtgtgtgtgtgtgtgtgtgtgcaatggaaaaagaatggcaaattcacatttgaattttggagccaacacttactagctgcacatctttgagcaagttatttaataactaagactttgagcaagtcttacttatgtgcctagcacatagtaggtgttcaataaactactcatccctattccacttttctgtcatctccaactgtgatcttggacaagtttatttagctttctgattctcgatttcttcatctataaaatggagatgatgatgaagagcttacttagccccgtgtccatcatggtaagagcctcgtaaagggtacttatcagtataatcagatgctgttttgcccaggtttgcaccctgtgcgcctgtcctcaggacccagcaggctcagacttgcctgcgatcaaagaaagccctgtgtgcctcccagacccaccacccccgtgcaaactctctcaacacgacaccgctgcgtgactttcctgctgttactagaggtcggcaggtacttttccctaggaaactgggtgtgcacgtctcatccccgtgccaattctcttgccgcttttccttccacacgcggcgtcctctgggcggagggtgcagctccgcgtgctccagctgccgcgaaagttgcacccggcccagtctggctgcgggccccgcctccgccttctcagcgcccagccccaccctccgattggtcagcagtgcccagccccgccccgctcctccgaggggatttaaagcagcggccgctcagtctgggcgcttgcaggctgctaaacccaaccgcagttgactagcacctgctaccgcgcctttgcttcctggcgcacgcggagcctcctggagcctgccaccatcctgcctactacgtgctgccctgcgcccgcagccatgtgccgcaccctggccgccttccccaccacctgcctggagaggtaaggg

SEQ ID NO: 3435 - DNA, 2300 bp, Homo sapien
ggatactggagaaggtggtctgaggttgcacctgaaatgacatccatgggcttaatggaaagtatcttggattggaacttggagctataaaatcttgtaaaatcttgagattctcactcactggctgtaggtgggcaagttaattagccttactgagccctgcttttctcatctgtgtaatgcaacttggaatgcttggaatgtaaactaagcacacatactcacaaccaacacaatgctgggcacagagtggacattccaaaaacatttgctgaatctgaaccccatatcctctccagaaccctagtttccctctgggagattggctggtacactcactccgactggagtggaaatggctttatctagatttggcaggaaagtgtcactttgagtttcaatgctgacaaattggtaggacagataggtgacatttgtcatggggttggaagcagtttcctgattcccaaccatgcctcctgagccccatatccatgggagcagaacgctgggaaaagatgtgacaagtcacacgcacaggtgcctcttttctcaaccgtgtgccacatggaaccaaggaaataggacaatcagagcagtcccaggagggaaaagagatcactgaacagcaattctggagagccctgatggtgagggaaactgggggagagggctgatgaggggcactggtgattttataaaccataggccttttaaagcttgttaggcttggctggagaaagttacctctttttatcaaaaatgtgacttagcccagtccagcagcatgattcggtctgtgggacagacaggaagcctggagtgaattctgccatttattttcaaaacagagatatactgaacacccattatgtgctggccagggtgctaattaagctttttatatacttaaaaaaaaaatcttcacagtatctaaccattgaatgtctccaaatattcattttctaggtaagaaacagacttgccacagtttcttaggtcagatggggttatccagagataaacagtgaaaatgtgggtgcagaaaccaggagtgggggtggaggtgactgatggtggtgggtgttgcccgctgccacagacaggaagtaagggcatcctgtatcttaggtcacccctgcctgtctaactcagaggcgggggtggtgtctgcggattttgaccagggcacagttatgagacttcagagggcaaggtggctctggaggtccccagctcagttagaaatatccctgccattcattactgacctttccacagagccaatcctgccacactatgtggtaaatggagggtgactaatgtgtgcccatcacaacagccacatttgcatttagctgagacaaaagcctcagttacaccaagttggggataacagttggtgagattttaagcatcagtcagaatttgggagagaaggaagagtttaatcacaaggccctttgggtgccctgctcaccatgcaagaggagctgaattttgtcctggttgaaaatgcggcctgtcttctctcccctaccctccttatgtttgaaactctgggatatttgcttgtctttgtgtctttgtgagtagggaagatatttgggagctcttttttgagataaggtatatgaaagtgttttataaatagtaaaaggttacataagagcaaggcgatgcttttattactgcttcctatggagccagctgcaggagaaggcctctgatctcactcccaataggagcctttctccattcactggagcctgacccagattggacactcaggaatacatcttatgtaagatttggctaaattgaacaaagcccatctttccagtccacgtttgggttgatttatttcaattaaaagtttctattgagtgttcacaatgtacacaggcactgtatatagctaaagatataaaggagaataatatatacatgattcctatcttcaaggaatttacagttcagtggagagatttttaaaagggtggaaatccttttgttaaagaaaattttagttaaaactccaatacctaaaatgaaaagggagctgctttgattaaggtggaggtagaagaaaggagaggcagagaaggtaggagaggaggagggaggccagggtgctgttggctggacctcaccattgcccccagaggcctttcaagggtttctcagaggccagttcaagcagccacaatttccataagacttctagaagaaaacaggagaatattgtaatggcttgaggagcggcaaaaatttcttaggacataaaaagctctaagcat

SEQ ID NO: 3436 - DNA, 2300 bp, Homo sapien
agactagtgcccaggagatgaacctttagcagagagaccggaaagtgaaagaggggcatgtaagaggctggtttccaggtggagaggataacagagtggagttactattggaataattcacgaccagtggatttggattcattgcagatctacaaaacgttcagcttgactaagtggaacagcacatgattaggcataagctctggagtgcagatgattgagaactgggctgaaccattttccttttaaggggtgaggggccttttaacgttatgctggtggcgttctagtgcttgtgttcctctccagtaactttgagaatctcttccttttttagctatagctagaccaggccaagaaagcccttgagtcccactagtgctagggccactgcactgctacagcacattgttatctgtgagtgagggtgggtgtgactgtgtgaacctcaaggggagagaagaacacatgtctcctagccctcacagacaccgaaaagacctgtggaattttgtgtttgagaactccaaagcctcaaatgggtgttcctagttagatcaggtagtatcctcccaaccgtggttaaaaaaacaaatcattctttcttagataaagctgccagaattaatttaatgattaaattctctaacagggtattttaaacattgtttacatatgaaatgtgcatctgctgccaactctactgtcgaatatgaggtgcatataaattagaactgcacagagttatagaaatgtgaaacattctgaaaggggatttttctccacttccactattccaaggagaaaagcctgaacaagagtgtcgtgcgatggcctcatagagaggcctagagttcttgccaactattgaggaaacgaaggctgcagatggtggtgtcatggcgccctggtgacttcctcccacaatggggaggtgtgaaagaccaagcttggggatcctgaattttgcagctaagcaagggtatgtgggcatgtgtccatgtgtagaggaacgtgatagctaaatttatggtactcctgtggagtgtctctgtgtgtttgtgtgtgtgtgacaactgtgagcattagactagtacacggcagacatgatcttcccgtggggtggagctttcctcataccttgtatgccctgcttcccacaagaggcacagagctctccactctgatgcctactttcaggcactctggtcgtgccaacccagattttggtctgtgatgaaacaaagagaaatgtttacaacatctagagcaatatccaagcatacctcatccctgagcttccatgtttcccagtcctgccctctctcccattgcctcttccgcaagcccatgtccttgggtatcacttccatttatttcctgtcttccttggctcctcaagccgagcctgtgctgtggacttgccttctggacttgaggcttgctcagtcctgggcctatgcaggctccaggcaagccagggcagggcaagtccaggcaagtctaggcagagctgtgacttctagaattgctctccatccctgagtgatcttgccccactggagggctaacttgtttgggggctggtgtgagattcgtcattgcccttggcaaactaaatagaatactgtcagtatcaaccattcatggccttgggcacctctggggtgaggaagaatcctctgaggcagtccttctcattaaacttgagcatgcacaggaatcacctggaaagcctgtgacacgtgctaattcccaggtgcacacccagagatgctgatctgatagacctgagatggggcccagaaatccacatttttaataagttcctagatggctagtggcctgtggacttggactcttagacagagtctcacgaccttggctgctccttagaatcacctagggagtttttaaaacccagatgtccaggtcccaccccagaacagccaaatcagaagcttttgttagagacccaggcatcagtcatttttaaagctccacaggtgattccaatgtgcagctgaacttaggaagcattgagtctaaggagtgaggaggaacacagcgcgggggcgggggggctgggggaggggggagacacagctgtgtgggccaagggggctggtgtatctccacatgcaagcacgtagataccgaggaacctggccagccctgcagcctgactcgggatggctgcctctatgccctctgcgtctgactttctcctttgagataaaggtgttttggcccaagctgagtgcattgctgggcagcggccatgccgaaggtggtagctg

SEQ ID NO: 3437 - DNA, 2300 bp, Homo sapien
gaagaggcaagattgaagcactgattctggagaggagtggtgggtgcctggagagggcagggcttcccaagaggagtgagtatagactgggaagttcagaggcgggcaggacagcccagaggcaggagcagggcttgcaatcactgtgttcctgtaagaaacgtgagttgtggccagttgagatgtcctgtgccaactgcagctagcaagtcaggagcagtagctggaaaagaacccagagctctacattcctgggccagagctctaagcctggggaatgtagagtccaaggtgatgaattcctttctcacgagcacttaactctgcttgccttttctgtttatttgtttcaggaaagaagacgatgctagaatgctttactttaggttcagcttaattctcctccctgaaattatgccctggcctctttggaagattatgctggtgtcctcttgtaagcggggcctgcactacgtctgtacttctcaaactatggtcctctgtgattactttttggcatttaggagtgttttgattagaaaaaaaaagcttggactagttttaatgttccgtttccttgtgttattcatgtccacacacttttgtccctctgctctttatattcctgttctttcttttacatttttcttgtttactatagctctttttaaacattggacttattgacttcttgtgactatattattttcccaaaggctaattgaagattctgatgcctggttaatattgattagcttccacttgcgactcaggcccatttgcagccctgctctctttccttggggcctttaccccgtggacactggccggggcagcgtgagatttggaggaggcctttgttccgctgttttagtgctggtagaaagtgtcctatgatggcactacctttgtgttaaagcaaggagtagagcagaggctggaagcatcaggtttggtgctagataccagctctgccacttttaaatgacgcgtctctgtttctccatctgtaaaagggagatgataaaggtgttggctttgtaaatttgttctgaaaattaaatagataactcaaatacgatgtttggcatagtgtctggcacatactaactgctcattaaacattagctatgtggattcaccttattctataaacatatcttgaattaggggagtgcttatcaatgggcttttattcaccagtttatctgtgtacaagtttcttatggtgccgtgtaccaagaaaatgtccagaaatgaagggttctctttctgcttaagttctaaaccccaattagcaacagggttcaagaaaggggtaataagaaatgagaaacttttcttttgcatcttattttataacacaaagttccctttctttaatagaggggcactgtggacgatatcagaaagagacaatgagtcactgtggaggcagcatcagaatttttatttcatcttatcaacagacaatgagtagttgtggcagaatcatttcaccgagagaattcaggttatgcaccaatagatctgcccagaaagactgggtcctggtatgatatagtagaaagagctctgctgttagagtcataagactcaaattctggtccttgtgcctcctctggcatgttgggttgctttgataaaggtacatcaccttttctggcctcagttttttcatctgtaacatgggaataataataccctctctgactgtggcataggattgttgagtgacaatacatgaaaatgctttatacatttaaaaaggtttaaaaaatcgaattcatttccattattataaagccatcactttctgtcgagatttctcctgccttctgggtttcagaaacggtttgcagcaaaggctatgtgtctttggagctagttcctgagtgggagtgtagactcaaccttagggacctagagcataacgagaagacaagctttctcccagggcagcggtttgcaaactttagcatgcatcacagtcacctggaaggctgattactgtccccagagtttctgattctgtaggtctaggggtggggcctgaacatttgcatttctgatacttctcaggtgatgctgacactgctggttcagggaccacgcttggagaaccactacactagggcaagcaggaagagagtcctccttctggaactgaagcaggcagtgtgaagacccatgtgggtaaggaggtttgaaagaagaaagaaatggaaaagacagaaaaatagggatcatgtgcagatcgggcagaacaaaaggaaaagtctcactccataacaaatgca

SEQ ID NO: 3438 - DNA, 2300 bp, Homo sapien
acagtacctgagaaacagaaaaggacctgaaaatgtaggtagtagtaatattattttcatattattatgtaattcaacaaactctccaaaaagaaacctctcattgcagcatttttcatgttcatggagtactttttgtccctgccccctgcaacctttccccagcacctacacaacagttcagggcaataagcatcaagaaaccaaaggcatctttaaggcaatcacaggtgtgagtcccaatgcaagaggcacaaagatgccggcaaaggacaccactttgcatgggattcctgagttggtaggtgaatgaggcccaagaaggagatcacacaaggacctcgctttgcaaatgaagtcactgtcagtcaaaaatgcatcaggccagaagtgaacaggtgatgagccagtacctctgtactgaaccactcccctgatcacttgcctttttcagggaacacttgaaaacactacttctggcaaggcttggccttcagagtagacaatgtggccactgcaccatgatgtatcccaatcacaagtgccagacagagccccctgaccccaaataccaatccattgtctatcattctgccattaaaatgtcattcttctgatttccaagagtccttttcaaaatgacacaggtcccacctcgtcagcaaatactttacctgcaacgtttgatctccttaagctgggaagcaaaataggacacaggctggatacctgactggaagcagagcacctgactaggacaagacccaggagggaggaaaggaggactgataagtggctgggaacacataccagcaacaaatattgagacagatactcagtgggctggggtcagccagcattacccctgacttgaactgtggaacaattcagccaagtgatgtggctgcaccctggcatcaccctaacctttgtctaccaggagctcaaggccttggcatctgcattaacagccaggaatatcttggccccagatactggctaagttccaaaaatctccagatgctacacagggcctgagatctcaccaccttgaacagcaggaaactctaacctgatcttcccatcatattaatctctgttttcctcctttgctttccaccatcctagagcttctaatttgcagaatttagaaatcaaaattcttgagccgttgcttgcatagctctgtcctgtttcagagtatgaatgataacaacagtaggtgcaacaattttttagagcttattaaatgtcaggaaccctataagtaacttatttactcccctacaataaccctgcaaagtgaactttgttactcccatttaacaagtgaagaaatctaagtcacacatagtagggggaagagctggaattcagatctaactctaaagcctcaaacacactcattgcctcttgaaaaaggatgctggacttatcatcatgtgccaatcctgccaaacaggttagctacacatccatgaagtacccatgaaaatgtgagtttttcctgaagtaaagcttctcaggcattcagaatgtaaactcatacagctacttggatgtcaatccatggccacatttgacctgattactcaggtcatacagagcccagaccctgccctacaggctaataaacacatcttgttccatctgaatttgaccataaaatccagctatctttttagtctgtttctagagcctttattgatatatccttccaatgtgctcacatgtcacccacggccagaacataaaaatgtctctggcttggaacaccatatgaacagtatttacaccttttaaaaatatgggcatccttcaaaatacccacactttattataaacaataccctttaggatgttctaacacagaagtattctattccttctgttcttctgttgtagccatggagacctcagatttggttgaaataaatagacaaaattaaaacctgcacaaaaagttggtatcagaacaaacaatattgacagtttatatttcaagagtatttttgtctgaggaaatcaatcattctacagacatgacctcattctgatctctcaggtaggaaaaggacagtcctgccttcctcttaagatcctcaaaggactcatggtgacgaccaggtaaaggggagactggggctgtagcaccctgaaatatatggctgaaactaaagtatttcacctacccagttgtttggcatcagaccggtcaaattaatcatttgaatttaatattttaattggtcaagtcagccaaagtggtataagataagaattggccaagttgccatcgt

SEQ ID NO: 3439 - DNA, 2300 bp, Homo sapien
gggaaactttctgggggaccacccctcacccacagtcagttcaggagcctgtgatgggggcatcacctccagctccaaggatagaacatatgactgttctgaccaagttcattgcaccatatctcccaagctctttcccctgcaccagtgggtttcaaatttgaattgtagcaaacaaaatctgatacaaaaccctgacatacatttgttttaaacaaagaagagttgatggtagtaatatttctaaatctcaccctcttggcctgcacttggatagacactatgtcctgcactgtgggaaaaacaaaggaataggacatgatgcctgccttgaacaccttgcagtggagttgggggcaagaaacaaaagcaagaaaattaatgattaaataatactacataataatagaagaaatctcacagagactgccgcttatcagaagggggttagaggcctgcagttcagcactgagccttttgttgcctctcttcttctaagccctactcattgtctgatatttagcttggctgtgaccttccccagtaagacgtttctggaacaccctcctgcctcttcacacacacacacacacacacacacacacacaccacccccttcagcccagattagagctcagtgttcctgtaatatctctgtacagtctatcactgcatttaccatattttaaaacaacgtctccccaacacttcacagtataggctctgagtttcataacggcacagagtggatactgtaagaatgcagtgagactctccctactccatgctcctttcttccatcttttgttccacagatgtcagccctacatcagtctgcaggctgctcctgtctgctccaaatccctcccccagtaagtttcttgcacatctaatcccatcttagcatctgcttcttggtagacactaacaaattattataaggaattactttgcactaccatatttatacaaaaagtagttagttcatgcatttagaatattggtttgttggttgacaatgttaagcctaatgacctataccttttgggtactgacatacttaattttgcacttattaaactgtgactttccaaaaaaaaaaaaaactttcattgtaccattaggatataatattcttgttaatattacaaaaaccaaaccaaaacaaaaaccatgctgcagccttaggagaacttgcttcatgtaactaagggtttttctttttcttttctttttgtatttttttttcctgtaggataacatagtgttaaaagcacaagcttctggactacttgaaatcaaaccacagcttaaccagctctatggcttttggcaaattacttcaactctttaaacctgtttctgatctgtaaaatggaatgatccttgctcatctgtaatatatacatttataaaacaggacccaccaatgggattattttatgaattaaatgttaaaacagctagaacggtgcaggctgagtaagcactgaacacagtacttattagctattatctctggtgctctgtgcaacgaaagaactattagaatacatttaaaagcactttgcaaactagaaagccctttgaacaatttagtttctctaaatgtaataataagcatcagccatcgccttttatggaaaattgaggtggaatcacatcagcaagagaaaactgaggacttgtctctggctctgttcctgatttattcacacagtacatgatcctagaataagactcctgatactcctgaaagtagaggcggttgggttaaaaataattttccctttcaaaactctttcaaatgttctccaaaagaagccaggaaagctcccgtatgagtagataattcactttaaaattcgctcatctctctttaacacgagagtctgcagggctggtgcagcggcgtcaacccgaagagacctgaacgccgatgggcagttgggattctccgtacgcctcggaaacagcagcccaaacctcacaacgcagaaccacgagatagtggggattgcagagccctgcgcaagagaaggaaaattaagacgcagcggagcccaggaggtgcccgcacgcgggaaggactggcgtgcagacgaggcagggggaggtttgcactcggcgtggcgcgggtgagccgcgtgctctcgggcacccggccgccagttcggatgcttccgatcctcggggagccggggcgctgcgccggagtcacttcagcccatgttgttcaggtgacacccggggaagagcagactccagtgtgcaaaacgtttcggggtttccgggccagc

SEQ ID NO: 3440 - DNA, 2300 bp, Homo sapien
gttttctgcttttttaaaaatccctatttgtatctcctcttctccgagtacctgtccctcaagatattctctgcccagaggtacattctgccctcactttctgtctcttaaaaaaacaactttgccatttaaaaaagaatttgacttaggcagctttaattctttgcactgagtgttcttatctgtggatggaggtataagatttcaagagtaataccccctcccaatgtttcagtaataatctaaattcacattaagccttaggctggagaacatttgagctattcgctttagctacgagctctgaaaacttcaaagcataacattcccaagtttatctaaaacttgaatcttaaaaataatgataattatctgttatgcttcaaagcataacattcccaagtttattaaaaacttgaatcttaaaaatactgatcattctctgttaaagtcttttgttgttgttgttgttgttgttgttgttgttgttgttgttgtttttgagacggagtctcgctcttgtcgcccaggccggactgcagtggcgctatctcggctcactgcaagctccacctcccaggttcacgccattctcctgcctcagcctcccgagtagctgggactacaggctcccgccaccacgcccggctaattttgtatttttagtagagacggggtttggccatgttggccaggctggtctcgaactcctgacctcaggtgatccgcccacctcggcctcccaaagtgctgggattacaggcttgagccaccgcgcccggccaaagtcgtttttatcccatttcttcctgtaggcgtttcaaagtttgcaaaggcagcaaacttttacgtagtgtagttatctgtgcaaagaaattttccaagctgccattgcccccagatggcagacagtctaggagaggagccaaaaccaccctgcttaataactctgatgtaaggtttttaatgaaaagccactgtttgggggaattctgaggtttaagaaattattttcggctggggtatcaggaaatcccctggtttttaaaatgagaggttttttggtttttgtttgtttttgtttttaagctatacctgctggaatggataaagtgagctttaaaagttgatcagaccgaagagattgaagtgagagaaccacaggaacaaaggcaagcagacagacagtgaaaggtagataggaggaacagcaaacagtttgttcagctgggcaagtatagtgcaggcacgaagatttcaatagagacccagaccccagggagctggttctttagcctactggcattttctaaacaggacaaagacaagaccagaaatgctggtgttactggaagattaatctgacagctggtgtggattgaagaagagaagagggattaggacagtgattcctaacccctatcctacactcccaacggccccttgttttgaatttttgaactaatcaaactacatttgtggtaattagttttatttctttccattaaagacatataaaactgccaatttgagcttctgatgattctaagaacatcagtgttaccgtccttagtatcaaataaatgcaggcaaaagcacaagactacggagttttatttagcctgaacagcctagtagtgttggatttaggaggtgtttaatgctgactcaagctctcaggactcttatcacttgaaccttcttgggccctgtggacctggggttttgcctatttgtctagataagaggtaacgaagggaaaaattataaaggcgaaaggaggaatagcaggggaagaagataacagaattgaaatgacttagtccctaaatagacaagagtagtgagtgttggaaaggaggcactagcagagcagagatgactgggaagatgatgctggtaagggcatgatagtattttctactgtcctatacacatcaggcaagacttcatggagagcactgaacacgtactcactatgtgcctagcattgttgttaatcactttacatgaattagttcatttaattctctcaaccctatgaaatataattactattatcctcatttacagaaggggaaactgaagcagaaagaggttacttaatgggctcaaggtcacctacctggtaagtggtggagccaggatgcagatccatgaggtctgactccagagctggccctctcacccctctacagtaaggaacaaaggagatggcaggtccctttgggcatgttaagttgagatgtttgtgggagtgctaggtgaagatatacagcaggcatagcatcaatctcctt

SEQ ID NO: 3441 - DNA, 2300 bp, Homo sapien
gatctgagctcgctgcaacttctgcccctcctccctccaggttcaagcaattctcctgcctcagcctcccaagtagctaggattacaggcacacgccaccttgcccggctaatttttgtatttttagtacagacagggttttgccatgttggccaggctggtctcaaattcctgacctcaggtgatccacctgccttggcctcccaaagtgctgggattacaggcatgaaccaccacacctggtcttgttgaggattcttgcatctatgttcatcagggatactggcctatagattttttttcttgtgtccatatctagttttggtatcagggtaatgctgccctcacaggatgagtttgagaactggtatgagttcttctttaactgttcagtagaattcagcagtgaagccatcagggcctggacttttctttgatgggagactctatattactgatttaatctcattactcatagttggtcttttcaggttttctatttcttcttggtccaattttggtaagttgtatctgttcaggaatttatccatttccatttggtttccaatttgttggcatatagttgttcataatagtctctaatgatcctttgtatttctgtggtatcggtttaatgtcttctaggcccctgctgctttcaacaccctgaagggtacaaaaaaaaaaaaattaaggtctttccttcaatgattttattcttaattaaggagaacaatcacatgaagaaaataataagtaaatgataaactatgttgttctgattttaagaatgacagttttaaagggagtgatcactatcagctagaaggattaagaaaaacataaggaaagaggtgaaaaataaagatccatagatataatgagcccagataattgattagtctggattccctggaacaatcccagctggaaatgttttgtatcattaccttcatgggacgcactggagtttcaaaatttaacagtgactagtataataattaaggacacaattattccaaagacttggaacacaaaattactccaaagacttggaacacaaaaggttatccaatttaaacaaaagcaaccttgcagattttattcctaccttaaagtagtttgctgagcacttacagtaatgttccaggcacggcaaggagcgacctgcgttagccaggcagaatgcccgccttcactgagcttatttctttcatggtttttttttttttttttgagacggagtctcgctctctcgcccagaaaatggcgtgatctcggcccactgcaacctccgcctccgcccccgaccccggggttcaagcgattctcctgcctcagcctcccgagtagctgggattgcaggagcccgcccagccacccaagcagctgggattgcaggcgcccgcccccatgcccggctaatttttgtatttttttttttttttttagtagaaacggggtttcaccacgctggccaggctggtctcaaactcctgaccccaagtgattcgcccacctcggcctcccaaagtgctgggattacagtcaccacgcccggccagtttatttctttcaagagacactggcgttcagactatctgaatcaatccggtaactacgcccactgaacacctactacatgccaggtattgaactaagccgcccttcatatgccatctcatgtaattatctcaacaaccctaccaagttagcagcaaggtttccagttctgccttcgaagggaacctcctctcaccggagatccctatgacagaccctgcgaaatattttgctgcatcagaatgctacaggccgtcaactccctaacatgcgcaaaagcgggcagccgattatccagggtagtggattatccaggagagtggattatccagagtagcaggtctggcgcgatgcccgcccggctcagcccatctccctagcaacgaaacccttccgcgccgcgaggttgctgagccccgccccctccattggcgcgccctcgccatcccccgccctggcacgcgctctgcgcatgcgtacgctcgctggccccgccccctagcgccgcggtcggagccatttcgccgattcctccatgcgagttgctgtgcgtttctctgttgtctcggtagaaggccagagtcacacacggtcctaagagctgggcaccaggaagcgaaggctggtaagggagagacgttccggctaccatgcggggcggcggggtcgcgggcgggcgccgtggaccatggctccgcagccggctttgttgcgaagcgcgggcggcggcggcggct

SEQ ID NO: 3442 - DNA, 2300 bp, Homo sapien
agaagaaatcccattaccagcattaaaccgtctgcttcacgtttcacgtttgatgcattttgttagcacctaagtctaacgtcatcaaactgcacccctagcataaatttgttacgtctgagtggccacagtctaactctggtcatccatttggcgaagggaatgtcctattaacaaaaaagccgtggaaagctgaaaatgtttatctggaaattccacctcgtgaataattaaacaacaagccctcatggtgaatgagtaatatgaaatacgaaggactatactatcaaactcctgtctccctagtctcttacaaccccataatgttcaataccaactacatgctatcgatgcccaaatacatatatttaaactttagtcttttctctctttttttttttgagacggagtctcgttctgtcgctcaggctggagtgcaggggcgagatcttggctcactgcaacctccgcctcccaggttcaagcgattctcctgcctcagcctcccgagtagctgggacaacaggcgcccgccaccacgcccagctaattttttgtatttttagtagacacggggtttcaccgtgttggccaggatggtcttgatctcctgacctcttgatcggcccgcctcaacctcccgaagtgctggattacaggcgtcagccaccgcgcccgcccgtcgtttctctttaaagtccaaaattaagttcatccaactgtggcactaactcacccatttgcatgctaacttggcatctcagtcaaaacagaattttaaatttcccctcaaatctgttccaacaccctacccctacatttcggtttccataaacggtacgacatccaccaagttactcctggcacaagttgagagtcgtccactcccttaagattctccatagctatcccttgtagaacccttaatgtgtgtcaaacaatatccataatagatcatctaaatggaactattttacttaatccttagtaaccttgtacaggtaagatcactatccctttagagaaggggaaactgagacaaagaatatcttgcttcaggaagacagagctcctaattataagagcaagaattcgggcgggcgcggaggctcacgcctgtaatcccagcactttggtaggccaaggcaggcggatcacgaggtcgagagatcgagaccatcctggccaacatgatgaaaccccgtctctactaaaaatacaaaaattagctgggcgtggtggcgcgcgcctgtagtcccagctactccggaggctgaggcaggagaatcacttgaacccgggagaccgacgttgctgtgagccgccatcgcgccactgcactccagtctggcgacagagcgagactcttgcaaaaaaaaaaaaaaaaaaaaaggcgcaagaattccagaaaacgtagcctgactccagatctactaccttccaccactacgcatttctgcttcaaaatacgtcccctatccattcgtttctccccatctctcctgccaccactactgcacacccgggctagtgaaatattgtcctacacggtttttgtttccactcttgccaccctaaaacccattctcctttgaaggccttctcgccacactccagtcacatggcctgctttcagctcccgcccagtttctgcccttaagcgataactaatcccttccgcttctgcaggctctgcttttccttcgcgttggccgaggttatcagctcaaagcctccctccttcgagacgccttacctcgctatactagccaaaggcgctctccctttacattcttcaattttttttcctctacccacaaggcctgcacgacggcgccagttattcgtggcttgaatgaatgaagagccctaggccagtggcgccccggcggcaaccaccacaggcgaagcacccccttccctcagccgccgcggtgccccggcgtacgcaggccagaggaggaagcgcgctttgcctgctagaggcagcagcgggaaacgctgggcggaggagaggggagggggccacaggctgcccggacggcgcaagcgcatcgcggcgaggcgcgcacgcaacccgcaatccggggacccgcgggcggctcgtcccttcccccacccccagccgccgccgccgcccgcgcttcgcaacaaagccggctgcggagccatggtccacggcgcccgcccgcgaccccgccgccccgcatggtagccggaacgtctctcccttaccagccttcgcttcctggtgcccagctcttaggaccgtgtgtgactctggccttctaccgagacaa

SEQ ID NO: 3443 - DNA, 2300 bp, Homo sapien
cccaccctagatctactgagtcagaatctacagtttaacaagatcctcaggtgatctgtatatacaataaagtttaagaaacagcagctatagctttagctacaggagaccggtgatgacattatcaggtggacagagtattaaatcagggagcaatgagggatttcctaggagaaacaggaaagaaaagactttgtagtgcttgagagttggacgacgatagtatagaaatggattatctggaaatacagactgagacagccagcaatgcagaatttgctagaaaacctaagattatatctttttaatcaaaagatctgaagatgtaaatgaacagcagattagaaaatttagaaaaagaccaattgcaacaactgtttctcaacttgctttatcattgattcaaatgtaaactttttggaaaatacattatttcaataatacaaagaaatatactcagaaggctccatgagagttttgagtcaaatttaagtttgtgtttgaattttagtcctatcctgtgagaaatactaattagtggaaaagttcagtatattgatgtaagctctacatttttggaaattaaatttcttctgtattctatagtgtgtgactagtcaactagaataaataatgacattacaagtaattagagtcactagaagaaatctagaagacttacctcatgagtaactgagacaatccaaaaatatgtctccctgttttttacaggcaaattgcaacttgatctgtggtgatgaatatggtccagaaacaaggttgagcatgtctcaattgaacgaaaaggaaactccttttgaactcatcgaggctctacttaagtacattgaaacccttaatgttcctggagctgtgttggtttttttgcctggctggaatctgatttatactatgcagaagcatttggaaatgaatccacattttggtatgagtctttgaattctcacatatttgagagtgaaaatgaatgtttttgctagtgccttagccagtatgtgaaaacaaaattttgtattgtttctactttcgaataaaaatatgtataatggagagctgtttgaaaccagctcctgtttttagtccctgattgttctttattgttatataggaagccatcggtatcagattctacccctgcattctcagattcctcgagaggaacagcgcaaagtgtttgatccagtaccagttggagtaaccaaggtaaatattaaacattagagtgatgggattggaagtgacgtagatactaaacaaatgttacaggctttcaaagagctacccaaaaaattgtaacccatctaaattgaggaagaaaaaaggagtcttctctttctgagcttagtagattgttgttcattaatcagttattgggtgatctttttaggacttctgtaattttcttgtcatttgttacatacataagcaaatcagtccttttaagtaactaataagaatattttctggagtgtaatttttctttcttcacaggttattttgtccacaaatattgctgaaacaagcattaccataaacgatgttgtttatgtcattgactcctgcaagtaagttactgggaaacctatttgtctgctccagtgttactaactggaaacttcttaccagttaacagaatcaaaaacaccttatttttaaactcctgtgttcttaaatctccaaaattattgtgcatctatatagcattataggtaattgataattaagagtaattattgttgattactgcaaatcagttacggtagaaagtgacaaagcttgaaactgtaactgatgattacttctcattgctcttggctgctggtgtctcacttatttcccattgggtgtttccattgatcactgccatactatagcatgctgtttgatgaataaagatgaccagtgtttagcacatgacaaatatcctaccttgaaggacactcctttaaggattaagggtcttcattttggtatgagatgagcctggaaaaatataccaggagacattctgtgtagatacaggaattacatggtaattgataaattgaaaggacaaaaaagttgaaacttggttatatctggccaacttgtaccccatgacttctctttataattccttagtctgtcctgacaatgaaaacaatttgctgccaacatccattttaggaaatgatgaatagcattctgtgccaatcccagtcatttagtggcagctgtctctgtatgtaacattgaaggaatctgaggttacttgggggttcaaatggaccacacaggca

SEQ ID NO: 3444 - DNA, 2300 bp, Homo sapien
taaagatgaccagtgtttagcacatgacaaatatcctaccttgaaggacactcctttaaggattaagggtcttcattttggtatgagatgagcctggaaaaatataccaggagacattctgtgtagatacaggaattacatggtaattgataaattgaaaggacaaaaaagttgaaacttggttatatctggccaacttgtaccccatgacttctctttataattccttagtctgtcctgacaatgaaaacaatttgctgccaacatccattttaggaaatgatgaatagcattctgtgccaatcccagtcatttagtggcagctgtctctgtatgtaacattgaaggaatctgaggttacttgggggttcaaatggaccacacaggcatcactagatacagatatcctaaaagttacactaaactttggaatagagatgacttaaataattactttcttttgtgtatgtgccatattccatttaaatgctttgcatttgttaatttatttaatgtttaccaaaaaaactataaggtagataatggcatgcaaagtttggccaaggcagttcagctgataagtggcaagtggatgttacattgccttttagtaggttgacaactaggagtttgcagtcagattgctgattcttacttgtgccattcatgaatagacatcacaagtaggtatggctttaactacatagtggaaagcattcactacttagtggatatataatagttattgataatacacatgagtcttagaattaaccactttttcctatgtaggcagaaagtgaaactcttcactgctcacaacaatatgaccaactatgctaccgtatgggcatcaaaaacaaaccttgagcaacggaaagggcgagctggccgagtacggcctggattctgctttcacctgtgcagccgagctcgttttgagaggtaagacccattcttgacctttagtaagggatttttgttctgttctctgtagggacagatgtgtgcagttatgtaaacctgccaatataagctgatctaagtcttgccagccatgttggaatcaggtgtaaatgtttcgtaagaatcttcatcacaaatcatttagagaataagccagatttagaaatatagagacctagattttaatattatttgtgcctaatacattgtataacactaagtggttactccttaggcctgcatttccctcattctataaaatattaagttacttaacctctcttgtttcctcagttgtaaaaagaatataaataatgcctaacccatagggttggtataagtattaaatgatttaataatgtaaaatactttgaacagtgtatggcacatcatgatctcccaataagtgtttgctgttgttaatttatacaggtcagatatctcttttaaaactgaaatgcttgggaccagaagtggttttggattttttttcttggtaatatttgcattgtatttaccagtcgggcatccctaatctgaaaatatgaaatccaaaacgctctaatgagcatttcctttaagtgtcatgtcagaagtcaaaaagttttggattttaaagatacatctataagagcctttctagtggcactaaaattacatgaactaggaaggtgggaggttgtagagaaatgttagtatgagttatcatcctacaaaaagtcttgttgtcgtttttaacccatgtttgtcaacaggcaaggcctgaagagaccatgggtggagctaataacattcgcgattttggataattttttcatttttcttctcagcctaaaaggctatcaagctgtgaggataagtcagaaaccactatgcaaccagattaaattttgtcaacagtgtgtatagtgaacgataaaaggtccgatggtaattgtaaaataaaaggatgaggaaaaggcagctctgtatccctgattaccttgctgcaaaaagtttattaacatctgtgtatacacaaggaggatggttattttatgcttattttctcttagacttgaaacccacatgacaccagagatgttccgaacaccattgcatgaaattgctcttagcataaaacttctgcgtctaggaggaattggccaatttctggccaaagcaattgaacctccccctttggatgctgtgattgaagcagaacacactcttagaggtacttacaaatacaaacctacttgacgcagatattaatcataccatctgtcttgttctggcagataacacttacaaatgaatcaagatgatgaagatgtagtcaacagggctgtgat

SEQ ID NO: 3445 - DNA, 2300 bp, Homo sapien
agttgtaaaaagaatataaataatgcctaacccatagggttggtataagtattaaatgatttaataatgtaaaatactttgaacagtgtatggcacatcatgatctcccaataagtgtttgctgttgttaatttatacaggtcagatatctcttttaaaactgaaatgcttgggaccagaagtggttttggattttttttcttggtaatatttgcattgtatttaccagtcgggcatccctaatctgaaaatatgaaatccaaaacgctctaatgagcatttcctttaagtgtcatgtcagaagtcaaaaagttttggattttaaagatacatctataagagcctttctagtggcactaaaattacatgaactaggaaggtgggaggttgtagagaaatgttagtatgagttatcatcctacaaaaagtcttgttgtcgtttttaacccatgtttgtcaacaggcaaggcctgaagagaccatgggtggagctaataacattcgcgattttggataattttttcatttttcttctcagcctaaaaggctatcaagctgtgaggataagtcagaaaccactatgcaaccagattaaattttgtcaacagtgtgtatagtgaacgataaaaggtccgatggtaattgtaaaataaaaggatgaggaaaaggcagctctgtatccctgattaccttgctgcaaaaagtttattaacatctgtgtatacacaaggaggatggttattttatgcttattttctcttagacttgaaacccacatgacaccagagatgttccgaacaccattgcatgaaattgctcttagcataaaacttctgcgtctaggaggaattggccaatttctggccaaagcaattgaacctccccctttggatgctgtgattgaagcagaacacactcttagaggtacttacaaatacaaacctacttgacgcagatattaatcataccatctgtcttgttctggcagataacacttacaaatgaatcaagatgatgaagatgtagtcaacagggctgtgataataatagtaaggcctccagtcttaccttagatagttagtatagtcactgttctaatgagcaatgagaaggaagaaagggacaatgtgagtctttaaaaaagaaaagaaaacttaaaaaggcatctcttaactatgtactaaagatcagaacataacttactcatgatacccacagtatttcatatgaatctcttacaactttttttgtttttttgagacggaatctcgctccattgcccaggctggagtgcagtggcgtgatctcagctcactgcaacccccacctcccaggttcaagccattcttctgcctcagcctcccgagtagctgagactacaggcatacaccaccacacccggctaatttttatattttactaagacagggtttcaccatgttggccaggctcttctgaaactcccgacctcaagtgatccactcacctcagcctcccaaagtgctgggattacaggcaggagccactgtgtccagcctggaacatttattttttcttgctaaacttgttagaggtacagtgaaaattaagggcattggagctagatctgaatttgaattttgaatctagcatttatctactatgtaacttcagaattttctctagattttattttttttaaaacattaacagctgggtatcagacttcttatggcatgtagaaacttacgctgctattatagttaatactgtatttatagacttcatatgaattgtatttgtttttataacctacaggatttagttgtagtacctttatgttgggtgctccagattttgattttgttctatttttgagtacagagaattgttggccgtagacatggtattagcgattggcttgacaaaagaggaactctaaactgtcttaaccttaatttagagtaatgttttgtctgcctaaaattagtgttcatttgtttctgctcacaaagaactatctccccacagagcttgatgcattagatgccaatgatgagttgactcctttgggacgaatcctggctaaactccccattgagcctcgttttggcaaaatgatgataatggggtgtattttctagtaagtgctttgttttatttctcttcgttaagtggcagaataatttcagaatcttctcctccctgtaaaagcagtattggctcagatagacaaaaaaaaaatcctaaatgttcttcagggaagtaacatacctagatattgagagcagtgtaacactaaaaaaatgaacagttccagt

SEQ ID NO: 3446 - DNA, 2300 bp, Homo sapien
aaaaagtttattaacatctgtgtatacacaaggaggatggttattttatgcttattttctcttagacttgaaacccacatgacaccagagatgttccgaacaccattgcatgaaattgctcttagcataaaacttctgcgtctaggaggaattggccaatttctggccaaagcaattgaacctccccctttggatgctgtgattgaagcagaacacactcttagaggtacttacaaatacaaacctacttgacgcagatattaatcataccatctgtcttgttctggcagataacacttacaaatgaatcaagatgatgaagatgtagtcaacagggctgtgataataatagtaaggcctccagtcttaccttagatagttagtatagtcactgttctaatgagcaatgagaaggaagaaagggacaatgtgagtctttaaaaaagaaaagaaaacttaaaaaggcatctcttaactatgtactaaagatcagaacataacttactcatgatacccacagtatttcatatgaatctcttacaactttttttgtttttttgagacggaatctcgctccattgcccaggctggagtgcagtggcgtgatctcagctcactgcaacccccacctcccaggttcaagccattcttctgcctcagcctcccgagtagctgagactacaggcatacaccaccacacccggctaatttttatattttactaagacagggtttcaccatgttggccaggctcttctgaaactcccgacctcaagtgatccactcacctcagcctcccaaagtgctgggattacaggcaggagccactgtgtccagcctggaacatttattttttcttgctaaacttgttagaggtacagtgaaaattaagggcattggagctagatctgaatttgaattttgaatctagcatttatctactatgtaacttcagaattttctctagattttattttttttaaaacattaacagctgggtatcagacttcttatggcatgtagaaacttacgctgctattatagttaatactgtatttatagacttcatatgaattgtatttgtttttataacctacaggatttagttgtagtacctttatgttgggtgctccagattttgattttgttctatttttgagtacagagaattgttggccgtagacatggtattagcgattggcttgacaaaagaggaactctaaactgtcttaaccttaatttagagtaatgttttgtctgcctaaaattagtgttcatttgtttctgctcacaaagaactatctccccacagagcttgatgcattagatgccaatgatgagttgactcctttgggacgaatcctggctaaactccccattgagcctcgttttggcaaaatgatgataatggggtgtattttctagtaagtgctttgttttatttctcttcgttaagtggcagaataatttcagaatcttctcctccctgtaaaagcagtattggctcagatagacaaaaaaaaaatcctaaatgttcttcagggaagtaacatacctagatattgagagcagtgtaacactaaaaaaatgaacagttccagtaggtggatatctgggcccaatatggggaaaagggcactgatttctcaaaagttaaaagcaagcaggccaggcaatgtggctcacaccttgaatcctagcactttgggaggccagggtgggagggtcccttgttattaatagttggtcttgaaagagcggtgtcaggaaaagaggtttattttatcagaaaatgttgaagattaagagatttggtatgatggggaagagagaatataaaaggaaaaatatacttggtcataatttatgataaatatgtggccattagagcatcagagcatttttttctttctgattctgaagagagcagctataaagttctttgttaagccagtttcattgcaaataaaagtagaatcatagccataaagactgcaacccacagtcgacagtcctacctgagctgctggcaacaacattgtgatctagtctggatttaactgtctttgtgtatttcagcgtgggagatgctatctgtaccattgctgctgctacctgctttccagagcctttcatcaatgaaggaaagcggctgggctatatccatcgaaattttgctggaaacagattttctgatcacgtagcccttttatcagtattccaagcctgggatgatgctaggtatgagtaagatttgggtgagctgtctgtagtttctcatttgtatttagttctctggt

SEQ ID NO: 3447 - DNA, 2300 bp, Homo sapien
ataaatatgtggccattagagcatcagagcatttttttctttctgattctgaagagagcagctataaagttctttgttaagccagtttcattgcaaataaaagtagaatcatagccataaagactgcaacccacagtcgacagtcctacctgagctgctggcaacaacattgtgatctagtctggatttaactgtctttgtgtatttcagcgtgggagatgctatctgtaccattgctgctgctacctgctttccagagcctttcatcaatgaaggaaagcggctgggctatatccatcgaaattttgctggaaacagattttctgatcacgtagcccttttatcagtattccaagcctgggatgatgctaggtatgagtaagatttgggtgagctgtctgtagtttctcatttgtatttagttctctggtcttagagaatgatttctcatgccaatttattttagaatgggtggagaagaagcagagatacgtttttgtgagcacaaaagacttaatatggctacactaagaatgacttgggaagccaaagttcagctcaaagagattttgattaattctgggtttccagaaggtaagacttcttccattcttaagatatctttaaagtgacatttatatagtacatgcaaattgacagcaaagtgtattttagtttcaaattttagaccctatgatttttatatattcccgactatttcttagttctcgtgaacactggtctagttcccagaatgagtactttgctgataaccttatagtggtttgcaaagtaatttattagcatttagacttgaagtaaattctaccacattaaattttaaatgactttaatttatactttcggtgtacagatgattaaaggactttatgacatctaacatagaaaaaaaccaacccatgtttcttgatgagctgtagtacttttcttttccaactaggttaaaatatagaattacttcctaaaacattgagaactggaatgcataaccagaaataagactgttgagagacagaaggtagttgggcaagatggtaaatttttaaaggctgtaattggaataactaaacaaagtagtgagtggttctcttctgtcataagccagccgaaattttagtttttcctcaaaattataagaaagggaaaacttcatgtgctagaatcttgagatgaattttacaggtaatgaaacaggcaccaaggtataaattgtctttaattcatccaattaggaggctataagactagaactcgtttgtctagaacaaaatatgtctgtgctttcagcggttgactgtcatgctttccagtcagtagctaagtactcaaagtgtagactgggtaaaaacgtcagccttcattccagtaggtgtcctcttagattatctccatcttctctacaactaacagctatttaagagtagcagataaatactttgtggtcctatcagtcaagctcttattctcagagtagatggttgattgggggactttaaaaagtaatcaccccggccgggcgcagtggctcacacctgtaatcccagcgctttgggaggccgagtcaggtggatcacgaggtcaggagatcgagaccatcctggctaacacggtgaaacccgtctctactaaaactacaaaaaattagccgggcgtggtggcgggtgcctgtagtcccagctacttgggaggctgaggcaggagaatggcatgaacccgggaggcagagcttgcagtgagcagagatggcgccactgcactccagcctgggcgacagagcgagactcgtctcaaaaaaaaaaaaaaaaagtaatcaccccaagcttatttatggttgagtctataagagaatagagacgttttcgttttcttattgtggaaactcagtaacattactccttgaacttaatctgggtgtaaggattctgagaagagaaagttttacagacaggttatgtgaaaagagtgaggaagagtcagttctctgaattatcttaaatagtttgcatgtaatgtgaagatcagccagttatctgatttttgttttcactgtgctcctcttaacagattgtttgttgacacaagtgtttactaacactggaccagataataatttggatgttgttatctccctcctggcctttggtgtgtaccccaatgtatgctatcataaggaaaagaggaagattctcaccactgaagggcgtaatgcacttatccacaaatcatctgttaattgtccttttagtagccaagacatgaagtacccatctcccttcttt

SEQ ID NO: 3448 - DNA, 2300 bp, Homo sapien
gagaacaccagcagaccccacctcttctggctcttgggacacctaccttttaaccagagacgggactccagaaagactgtgccctctgagaccacactgcccagaatctccttcagatgggcctagctttccttgtcctggtgactctggtgtgattcctagttgaagactggctcagcaggaagaggactagagggcgagccaacagagcttccacttgggattgcggcagaaggttgagaacacaaagaccccttgaagaatgaccaagaaacgcagtggccatgggtggaactgaaagccgatcttgagcctgggcattgggagctctgtgttgggagaagggagtcattgtaggaaaaagggacagtggtattccatttgtcaaagcatcctggaggagacaggaggtgggagaaacaagctaaatttctttgggaggcaaaaaaaaagaaaaaagttgttttaaaaactcagcttaagtatcccttctttggagaagaaaggtccttttctcctacaatgtggaatatatgtgtatatatatacacacacacacacacacacacacgcatatatatacacacataaataaatacaaattatttgtgtgtatataaatatatatatgtatgtatttatgtgtatttacataaataaaagcatggtccttaccaaacacaatcatctactgacccatctgtatctttcactaggattacgagggcagggatttggtcttttacctctataactgtggcatctacgcattgtgtggcatgtaacagatttctaacaagtatttgccttttggaggaaaagggagctgttgctgtttttaaactttggcccaggacaggtggtctttattattcagaacctaagaattaaaaaacccataatttatcaaaaacaaacttttgaagaaacactagagtaaaacatttgtgtgtgtgtgtgtgagtgaaatatgcagttagtattgttataaacaaagtccaggactcaacgaaaggaataaagtaagaatagaattgaaacatgatgcatgttgtaattattccctaaactacagtaacatgatgttaattttttttttttttttttttttgagacggagtcccgctctttagcctaggccggattgcagtggcgcaatctcggctcactgcaagctccgcctcccaggttcacgccattctcctgcctcagcctcccgagtagctgggactacaggcgcccgccactgcgcccggctaattttttgtatttttagtagagacggggtttcaccgtgttagccaagatggtctcgatctcctgaccttgtgatccgcccgcctcggcctcccaaagcgctgggattacaggcgtgagccaccgcgcccagccacatgatgttaatattttcctcaaaataaactcagaatttaacatagtgttcttccagacgagtgtgaaggaaggcaggtgttttcccaatgctgttctccttgggagctgtcagcttcagtgcagtatttcacagctagactgtgaacaaacgttaattccaattggctcaatatacattcaacagtaaaataccagaagtgagtggtctctgttgttctccaaaatgtatgatctggaacagacttttatcgtgaaagtgttcatagtttgcacacatcactcccagctggaagttgttgtccagtttaacagttatataatataatcttttatgtgagaattttgaatagcacaacagagacaagaaaacagactaacttctccttggtatgaccacatcttggcaaaaagtgaaagtcctatttaaaatgtaaaggaaatcctatttggtgaaccctgtaataggtgggggctaaaagggaaatctaggttgctggatttgtcactagggtttcctctagtaatagccagagggttccagttagtgtcacctcccagtatgaaaataaattttctttcaggctttgtttgtggagtggtaggtggagcatttttttaggtcctgatgacctggaaggtgactcataatcaccctgaaacgtatgaggaccctaaggaaacctcccctgggggagacagagggctggggttagagccattgcgttgggctcgtctggcaccttctggtgtgtgcggcacctggtgggggttcggcacggagccgcacccaacactgacccgggcccccccacccctgtcctgagcccaggcgcttcgccctgtcccacctagctctgagcagcgccccccagcaccctgaatgcgtccgcaggaccccgcgctct

SEQ ID NO: 3449 - DNA, 2300 bp, Homo sapien
gatttgtttgaatcaagatccaaataacggagcaaaatttttatcatcaagcccactggctggttacactttacctcttttcaaaatagatgtttgtcactgtgacacatttccataagcaagagaattgagagattaattcaaggtctctttatgtgctttacaaatatcagataagctctggtaattaagttacggaaaattcgcataagtaatatcttgatgttagtcttggacattaggactcaaaaggcagcaatgacaaacccatttatgttgatttcacagcctttgggggtctccttgtctttattttgattgttggaaatagagacccacgctttggccactatataacaaagtactaaaaatgtataataatgcaaattcactaatatgtttattaaaatataaacaagtttattacaaatctgtagctttattcacaactaacatccttatttttgtcctatatgcccacgtttgtcctcaagtacaacgaaggactgagagagcatataatcccctctaggtgtaaatgaacgtatttatttcgcttcaactcatgtatgaaaggattaaaaaattattagtccccacaacttaattctcccaaagagaaggtgccaagaatgaggcacctttagccatgcataatctccacccatctcatcaaataaacggaacagtgatgaacataacttgctaagtaagctcagccgtgtaacaagaccctagattcccctcccttcttcatcctaccagaacattatccttaaggttttcctaatcagcagtctgcgtctaactaaccctaactatccagagtcacctaacatatacttatttccttgtttcagattcccattacgcctatcttaatgggacaactgggtccgaaattatgcatgtgtttttttgttttgtttttgcggtgtacttattatccgcactttatcattaaattcctgaaaagctagaacaaaacaaatccgtgtcattcactatgtgcatcctctctgcttggggacgccaagggtttcaagctgctgcctccctgccctggtctctgcttgccgtatccagcactgggtaagcgcccaggttctgctccgggactaaaactcatgatcttctggctcaggttctgtgaactgagtcattctggcactgagaatattccgtgactcagcaggcccgaaaaggaggatgtcagaatccacataatttcgagtcttttaaaggcaagccgaggaacacaaacaacacagtggaagaatttcgcagtgggtcgtgcgtacccaagggaaaaattcattccattcccagccttttcacttccttccttgccccggtaaaacgactggttacactttaaatcagcggcaggaaatcgcttcacgaaactcatctggctgctgcgaccaggcccttctgattctccagggaccgtgtcggccccatgaacgccccgggacctctgttcgggaggggctggagcggggccccgggcagcagcgggcgctcccggttcggacccacacctggccgggcggggaccctcttgccgcagcccaaattggcgcgaggccccagggacgaccccgagcgacctcctgacccggcatcgcccctctaaggcgccctcccccgactcctcccgcaatccggagtctcccaggccgcggagcccaaggaccccagcgactcccgcgcggggagcgggtctgcgaggccgcccttccctcccggcatgcaccacccagccgccctcccctcccctcctctcctctcccctcccctcctctcccctcctctcccctcccctcccccaaccccctcccccggctccccgcccacctcgcgcgcccctccccccgggtcgcgcgccgcgggcccgagcgcgagacgccgctgctcccgcccccgccgcctcctggagtcgccggggcggacgcgcagtccatggggcgcggtgggccggggagttgccccaggggccgcgggagttgctgagaggagacagggttgggctttctcctcgcccagaccccaccccaccctgccgaccccaccccctgctccttcctccccgggggcgcgcactcgggcacgcgctcggaagtcgggggtcggcgcggagtgcaggctgctcccggggtaggtgagggaagcgcggaggcggcgcgcgggggcagtggtcggcgagcagcgcggtcctcgctaggggcgcccacccgtcagtctctccggcgcgagccgccgccaccgcccgcgccggagtcaggcccctgggcccc

SEQ ID NO: 3450 - DNA, 2300 bp, Homo sapien
ctgttgcccaggctagagtgcagtggcgtgatcttggctcactgcaacctccacctcccaggttcaagcgattctcctgtctcagcctcccgagtagctgggattacaggcacacacaccaccatgccctgctaggttttttgtattttttttagtagagatcgggtttcaccatgttggccaggctggtctcgaactcctgacctcaggtgatgcaccctccttggcctcccaaagtgctgggattacagtcgtgagccactgtgcctggctggagaaacttataaagctatgaaatatttccagtgatctgaaaagatctacccacttaaaatgagatgagcttattgcattttgattctaattagtggacaaaggacttatgtaaataagactgctggggagaaaatggttcactcagacattatagtatgggatgtgtgagttatgatagatgttgaagatactttttatatcctaaagatagatttattcgtaatgtatttgagatcagacaaaaacattgacctgtaggcaaaataattcagttgaaacttttttctgagatggagtctcactctgttgcccaggctggagtgcagtggcatgatctaagctcactgcaacctccgcctcccgggttcaagtgattctcctgcctcagcctcctgagtagctgggactctacaggtgcatgacaccatgcccagctaatttttgtatttttagtagagtcggggttttaccatgttgatcaggcttgtctcgaactcctgacctcgtgatctgcccgcctcggcctcccaaagtgctgggattacaggcgtgagccaccgcgcccagcccagttgaaactttttaaattgttaggagaatacctacagagcattttgaagagtagggattgaagtcagcccggaaaagcttcccggatcttgaagaaaagtaatagacatgagtgtagggtgtttccaggaaggttgagttgtttgaataaagatctaaaagtagttagataatggtgaaggtattatttgccattcatggagcaatgaggacgtgccagatggattctgaggagaacttgaaagctgggtgacaaaagaaactaaattaccttttgtcaagtgcctcctggttacctctttgaattcttcagtcttgagaactattgttagccccggggaagaataatatgactagtgacttttctgaggttgcgtaggttgaaatccagacctgctgtggtacatagattatgtttttgccactctgccattttaggtcagacctgctgtaagtgatagtgaattctagaaagacctcaaattgaggagtaaaatgagagtgctaaggaactaagcattgtttctctgatagaccactgctttaggatctctggatttcgactgcttctgttaaaagggctttacacttaagaacagaggattttttttttaattaaaaaaatatatatgttttagacagggtcttgctctgtcatccaggttggggtgcagtggcacgatcctatttcattgcagcctcaaacacctgggctcaaacaaacctcccacctcagcctcctgagtagctaggactacaggcatatgccaccatgcctagctaatttaatttttttgtagagatggggtctctctgtgttgtccagactggacccgaactcctggcctcgagcaatcctcctgccttggcctcccaaagtgctggggttacaggtgtaagccaccatgcccagctgaggattgttttcagtggaagaattttaggttttgggcatatgtactagttgtatgatatttagctgttaatgcttctagaaatttctaaggaatttattgaatttgagaatgaggtcctggattttgtcagtgtctgttgatagaaaaaatatgctctacctgtgaaaagaaaatttctacacgttctgaatttattatgccaagcggaaaagttaggccctggagactgagtcacataacatggctgtttttcttctctggtgtgtgactgttgcttagggacctttgtgttgagatgttacctgtaaccagataccctattctttattcaaacctagactaaatgcagctggaggtagagacccctgtgattgttactgctttacaatggagtgttaagcaacccccttagagtataatagtaaccaatcaaatcttgtatctctatgttagccttatgcagaaaatgttgtaatcctgttccactcccctatttttcctatataaatgattctcacctttcccaatgctggggag

SEQ ID NO: 3451 - DNA, 2300 bp, Homo sapien
catgcatggagtggatagaactacatattcatgcagcacaccaacatggcacatgtatacatatgtaacaaacctgcatgttgtgcacatgtatcctaaaacttaaagtataataataattaaaaaaaaaaaaaaagaactacatattcatggagtgcccatgattcctgcaggaagtgtgattgagttcttcaggaatacttgtgtgtcctacctttcccttttctttcttctttatgtttaggttgctgatcatagagtgaagctccaggaattagagagtctcatagcaaaccttggaactggggatgagatggtgacagatcaagccttcgaggatagactaaaggaagcagagagggaagttatggacctccttcgtgaggcccaggatgtcaaaggtacgcatgattgaacagtgcatgacttctgtgagatggaccaatctttagatgtggctcctaaagcaaggttagtatagttttataaaattctttctcagtttttaaactactcatagattataaatcatttcattttttaaacactaattcaaaaagcaacctgacaaatttactgctttaagctacagtaagcatagggtgattttccaacaaataaaaaactattcgatattcaaatttcaagcattttatgaatctgttctattacaaggtgtcttaaaatattaaaatagttttaaaaatcattaaaggcatgcgtcttcataagctttttttttttttttttttttttgagccacaatcactctgttgcccaggctggagtgcagtggcgcgatcttggctcactgcaacctccacctcctgggttcaagtgattctcctgcctcagcctcccaagtacctgggactacaggcacatgcccaccatgcccggggtaatttttttgtattttgagtagagatggcggttcaccgtgttagccaggatggtctcgatctcctgacctcgtgatttgcccacctcagcctcccaaagtgctgggattacaggcttgagccactgcgcccagccaaaaaatttttacattatcaaataattgagtaaccttccaagcaggaccaccatatatagttaggcaagagtttgtagaatgtcacctctgcacatacatttggtagccaagttccaagttggttttttccaaacctgtattcatcttcattggtcttacctttgacttctcatctttttttttttttcccacattccttagaaaatttagaccccaacaccgagcatgatgctgaaatatgaattggtcaatttacttaatggtttttatatattaataaaacctcatgatacatgagagttttaataataacagacttatatttatcttttgatttgttaggacctgagtatgagatttaagttgaatgagcatattaataaagaataatttgaagaactattcaaaaacagagatcagtttgaaagaaattacactgatatgctggcacatgggggtggcaaaagagtctatttagtttaaaatacaaaatgagtttaatttgtcatacttcaacttatgttttaaacctagttttttctgggttttgaaaaatgttcggcttttagggctggcagcatttttaacaacattgtagatttatgactaaattgcatgtgctggtattaaagtcagtcattctcaccttcattaaacattccttgggtgtcttctctttgccaaccactgcataagaccagcgatatagtggtgagtaagaaagagttcgtagtcaagtggacagatggacgcacggttggaggtgtgatgagtgcacagtgaaggacctactgggtgtggtaaaggctgtccagctatggcaggggctttgtggaaacctggcagaaagttgcgatgtttagaagagtagagatacatagggcctcagatttcatgtgagatgatatgatcctcttcagataatttacagactttcttctgcaaaccattttagatgttgaccagaatttgatggatcgcctacagagagtgaataacactctgtccagccaaattagccgtttacagaatatccggaataccattgaagagactggaaacttggctgaacaagcgcgtgcccatgtagagaacacagagcggttgattgaaatcgcatccagagaacttgagaaagcaaaagtcgctgctgccaatgtggtaagtgattgcaaacgtctgaggtggggatgggggaggcccctggggtttgtagcaagtctgttactggcagtggagtgcttcttcaactaaattgact

SEQ ID NO: 3452 - DNA, 2300 bp, Homo sapien
acctaattcataaagttgttttaaagattaaaagtttaatgagataatggatttacaacagcgactggcaaatagtaagcattacttatgtgtttgtattgctattatcactgtcccaaaatgatgctagatgaaaacatctgttccaacttttaacatataataaactatagcaatctgcactaaaatgaaatcttccttcaagactttattttgtagggccctgttccttgttcctgcaggaccgtggtgaattgcacaacaaagatgggactcagggacaggacctcagcctccacaaggcaccagcgactagaagggaaaattctaaataccgtctctgtgaactgaaaccttagctgtagctggagactctgagttttgagagagaagaatatttgtgtaatttgtttgaatcctgggcagagtagaagagaatcaagccttggatgagaaagttggagtttcttttctattcctcaggttttattgctggagattttagaataggtgtcagccagtttgcagcaacctgtcttgcccctaccattcttgggttctgtattcagaccccagctattcctaacacccagttcatactccacgttctgtacaaagccatccctagctatcccagtcagcccacactggtctccatgacatgcatgaaccgaagtttttagaacctttgacacttatgtctgccctggatgatttgttcattatcttatgttgttgtcatccacagaacaatctggagaatattcatatatttagtcagcaaatagctatttattgggggcctttgtaggcctcaatgttgagaagaagggttggttgttttggacagattgtgtatttataaagctctagcaatttttaaatctctagcaggaaccaaagccttcttgacagccacctctctgaattattgtcactagcctccttaggagaagagacaatatagtttataccaagatttgcagttgtctagatattactcacttcagctagcactgtgctagtagataacattcaaagttggtctcaacaaatattttctctagtgcccatggagagtggctgagaaatacactctaagatgtaaaagagtttggtatctagatcctctttcttattcatttcaagccaatatttattaagcaccaactgcaagctagatactattatagttaggaatataaagtgggccagggatggtgtttatgcctataatcccagcactttgggaggccaaggcaggaggattacttgaggccaggaattcaaggtcagcctgcccaacacagcaagacctcgtctctacaaaaaattaaaaaattagctgggtgtggtggcatttgcctgtagccctagctactcaagaggctgaggtgggaggattgcttgagcccaggggttggaggctgcagtgcgctatgatggtgccattgaaaacaaaaacaaaaaccaaccaacaaacaaaaaaacaaacaaaaagaaaacgatactcagtctttatagggaggttggccagtcaataggttactttatgagttgctaaccctggtgagcaggaagttatgtggaccaggagagaaacccttggttcagcctggagaaaggagaggttgaccctaaactggagggtggagaggaccctgttgtgactctccgactgacttgtcttccttgatgtcctttaagccggagctgattcgggctgctgccttatttctgagttagcgctcttaagattgggcctcccagtttgaggaaggggcgggctgctgtctacctctgtgaatctgccctggaccaccccgggagagaaggagggctccggggaatctcgcacattccaggcaaaggctcccgggccgcagcctctgtgccacacccttggcccgggccaggtgtgcgccctcctcgctgcgagggggagcgggcggctgcggggagcgattttccagcccggtttgtgctctgtgtgtttgtctgcctctggagggctgggtcctccttattcacaggtgagtcacaccctgaaacacaggctctcttcctgtcaggactgagtcaggtagaagagtcgataaaaccacctgatcaaggaaaaggaaggcacagcggagcgcagagtgagaaccaccaaccgaggcgccgggcagcgacccctgcagcggagacagagactgagcggcccggccccgccatgcctgcgctctggctgggctgctgcctctgcttctcgctcctcctgcccgcagcccgggccacctccaggagggaaggtgagt

SEQ ID NO: 3453 - DNA, 2300 bp, Homo sapien
ccggcaccgtctcatcatgtgtcagctggccgtccagaattctgattggatcaggtaggactggcctgaagatgccagaggcagtggcccggagacttactgggagtggggtggggaaaaaagaagagttccagcagtaatttggatcctgaaaggatggggaggcaggggcaagatattagccttgtggaggcaataagtagacctccagggatacctataactttatttttgaaccaaactgtgaggcccatgaatgtaaagaatgtgcttgaatgtttcatctgctttgacatctctgaatcctggcatgattcttggagcttccagaaatatcactgggttttgggtgaagcatgaccagaaaatcagaaatgcctctcactttcattcccactaacttccgcgaaccctcactacctttcagggaatgttccctcaccttgacaatttcccattcctgaactcaggctccctaagggccccacactggccccaggagacaggtgcgggcctgcccctaagggcagccacaccaaatcacacccactgggtggctttcctgctcactgcctttctggccagacgtgctgctaggaaggcacctccacccacctccgctgagcttgcagtgtaattaaagcaagcttccactaattatgctaatgatgttccccaaagttcttaccgttataatttgcatgataagatgatgttttaaaaaaataatggcatgccatttgtgctgtaatttcccccactatggaaaaataagcagcacctagaggtttccatgaaaggggcgaagtgacgggatgctgacctcagaatgaggaatgcagagagtttgcccaggaagagcggggtgggcgggaatgagagcagtgaagggaagccacagtaataattcagcagtgatccttgctatttgtgcgcagtgatttgtgtgagaagcacatgccctttatagactttcttatccccctaaagataaagcttaggtagagagacagctgctttttctcaggtgagaaacaggcccagagaaatgaaagggcttgagcaatgatacattgatacacccgtaggcaagaaaggattagaaatgaggcctcttaacattgtaagtcctgatcttctggggatgctggggaccttgaataagggtccagtgaggaaatcactgggcaggagactgttactgcttggatgtgcttagaagattctggaataattccctcatgcattccacaactatctactgagtgcctaccaccttccctgggctgctctaagttggaaaatcagaatcctgagaattgagatcactagggagtctaagagctgcctctagagatggggttggctggggtggggcgcctgacactgggatcccatttagccaggtgaagtgtttgtttccggcacaggtgcgctcccagggcacagggcctggctagggatctagggggagccagggtcccggcaaatggcaagctgactctctaagggttttcagctagtgggatctcatctctgggcactttaggcatgtgtatgtggtggggtggtggggtagggtggtggtgttaaggggatgcatgactgctaagaaaatgttagacaaggcagggcacgggggctcatgcttgtaatcccagcactttgggaggccgaagtgggcggatcacctgaggtcaggagtttgagaccagcctggacaatgtggtgaaaccccatctctgctaaaaatacaaaaattaactgggcatggtggcatgtgcctgtagtctcagctactcaggaggctgaggcaggagaatcacttgaacccaggagatggaggttgcagtgagccgaggtcttgccactgcactccagcctgggtgacagaccaagactctgtctaaaaaaaaatcattaagttggcaattaagccccagtgctgcctcagtctggggctggatccctgcttacgtcacaagcagtatcccggaggggctggccattgttgtgtctgcgccctctcatctgactgtcatgtctcacctccacgcccacaaggcacctcactgcagagggaggcagggaagactgattctcgagggtttgcagcctggcaaggataacctgggccaccacttgacaaaggcctggctcagctaatccttgtcacaatcctcaagggtccaaaggagggtttattttgcaggtaacaataagagcaagatgctgtactgagcattgtacacataaaacttaccgagcctttctaacaaaactgtaagctcgttactatt

SEQ ID NO: 3454 - DNA, 2300 bp, Homo sapien
ggccaatgtccctgagtgccggtgctgtgctaaactccttatactgtttatctaacaacactgtgagccagattaatattattacctccagcctagggatgagagttggcagccagcgcaattgagtaactagctgggtacccaaggtcacccagctggtgacacctggggcaggatttaaatctgaacctgtaaacatgctctgttgcctctagggggaggttagtattttaacctaaggaattacaaaggctttattttggggcacgtgtaggttattgtgcatttctttactttcaggtttcttagagaaaagtccaaaataacagtggaattaatttaaaactgtgtctttctgtgtccctgaaattctcacacatggtacgttttcaatgagctgattttgtttctccactcaatgcagtaattgagcttctttggttcagtgcatgagtggttcagtggttcattgggcatcctggttgagggaggggctgggtaaccaactgtattcacttcctattgctgctgtaataaattactggaaacgtattagcttaaaacaatacaaatttatgatcttatagaagtttgaaaatcaaagaatgttttctggaagaaaacattctttctggaaaaatccattcttttgccttttctagcttccaggggctatctggattccttttaccatgttaagataacatattcacaggtgccaggaattagattgtgaacatttttggaaagccattattcagcctgcagcaccaaccaacacagtttgtcggggactaaggtctcccaggacatgggatttttagtgctaaaaccaagaaagtcccctgcaaacctggacagctggttccctagaagggaactctgttccatgaagatattcttactagaggaagtagagagggaagataaacacaaataagaaagctgtaaagggccgggcgcggtggctcacacctataatcccagcactttgggaggccgaagcaggtggaccacctgaggtcaggagtttgagaacagcctggccaacatggtgaaaccccatctctactaaaaatacaaaaaattggccgggtatggtggcgcaagcctgtaatcccagctacttggaaggctaaggcgggagaatcacttgaacctggaaggtggaggttgcagtgagctgagttcatgccactgcactccagcctgggcaacaagagagaaactctttctttaaaaaaaaaaaaaaaaaaaaggctgtaaaggaaactgtttttccaatatcattctttagggaaaaagcaactactgacctttcaaaaaatccccgcactgcagcctcagcactgccacaccttcgcaaaaaggaatctatgctgaatattctgtcacctgttttacccaggaaaaacagctatctcctggataaagtctatttcaagctcgaattatccctatgttaagaagcgtgtatggtaaacttgtactcagaaaggttaataaaagtgtagaataaaatagacgtgtagttaaaaatagagcctgattccatgcaaatgacacagacttgataccctaatgaggagccaaggtgggctcctccatcacatgtcctcctcctgtcttcattgcttcctccccaccttccactctatcccctgccccactccaccccctgcccagctatatttagtaccacagtctgtgggtttctgaaagaattctctcatgtgtttttgagtttcgctgaaggggaaaccttggtttcgtgtcatatttttacatatatatttagtttgtgtcatatttttacatatatatttagctttccatttctgaagaaataaataccaaaaaaaaaaaaaaggctttttcaacaatgggcgaattccaagaagcctggagcctgatttggaaaggatgcgggatgggaatggggtagtttttccagtggaaaggatttgaacagaggccacacttccggagtggctcctacaagcgggagcatatgagaggttctctcagcatggtctggcagaagtgacagttatggaagggagggtcataaatcatttcctggctgtaaggacaaagggattcaaattctcccaagctggaggtagtggagcaaacaagatcagcaacaatgagggagcagctgcaccactttgtgttactctctgatggccagcacagggctgcaagtagtggctgcaaaaaccagacaaatagatggaaatccaggaactagaggaaattcaggcctgccaggggctctgggaagtgtttgttactct

SEQ ID NO: 3455 - DNA, 2300 bp, Homo sapien
atgcgtattagggttgatttgctattcatcataatttaacaaatatttactccacacctaccacatgctcttggataagaaaaaacacagtgaccaactcactaatatggggtggaaatttatccaagaaacttgaagcccaggataggtacgtatttgtacttgtcaatctctaagttaagaattattggctctggctgggtctgtggcccatgcctttaatctcaacagtttgggaggctgccgtgggtggattgcttgaggtcaggagttcaagaccaacctgggcaatatagtgagatcccatctctacaaaaaacacgaagaattagctggacatggtggcaaacacctgtagtcccagctacttgcaaggccgaagtgggaggattgcttgagtccaggagatcgaggctgtggtgagctgagatcatgccactgcattccagcctgggtgacagagtgagatcctgtctcaaaaaaaaaaaaaaaaaaaaaaagaattatcctctatatccaattcatctgcaaagaattattggttctttctgttgtataagcatagaacatctatcttcccctaccattctcaatttcagtctactcattgtttaagccaaatttcaaaatctataaaacatatcctgagaccatctacttctcgttgctcccgtctctataaaccctggtctcaggacaactccacttgcctaggctaccagattttcctaaatgctttccttgtcttcccatttgccctccctttccacccagcagccagagtgatcctataaaaatgtaaattacatattattcccctgcttaaaagcttcagtggcttccttttgttattattccacttagaaaagtgtctaactcttgccctagtctacaagccccatttgatctggccctgatcacctgctgctcagtcttctatcatttttccccttgcccatactttctagcatcactggcctttcatttctatgaatacagtaagcccttccctgtccctgaatacgtgagctagcaactactcctgtcgctcaggtctcactgaaatgtcacctccccagagaggccttctcagactacttgattcgtcctctcttctccactcactctctgctctgtcagagagtaaattgcattcacttactgtgcattgcacaattgccatctaatatttattgtctatcttcctccagtaaaatgaagacagtgactttgcttcaccagcagggtttatagcaatacttgacacataatgagccctcaagaaacacttgttaaatggtaagtctttgtctcaactttggtagcttatggaggatccccatcattttcttttttctttttttttgtttcgagatggattctcgctgtcgcccaggttggagtgcagtggtgcgatcttcgctcactgcaacctctgcctcccaggttcaagcaattctcctgcctcagcctcctgagtagctgggattacaagcactcgccaccatgcccggctagtttttgtatttgctttttagtagagacagggtttcaccgtgctggccaggctggtctcgaactcctgacctcgtgatccgcccgcctcggcctcccaaagtgctgagattacaggcatgagccaccgcacccggcggatccccataattttctaatacagttttagtaactctgcccccttcatgttctctcaaacggatagcattgcttcgcccacgaaaaggatcagtattgcagaggaagggcttagatcacccctatctctctgcagccagcagatcaagatttggactcaactcaatagtttggaatcatcagataaaggaaaaaggaaaagcagaaatgaatactactgaaataaacaatggtcatttctcacttaaaattttgaggaagagagaaagaaaaaataccttaagatcaaacattttttaacttggagatgttagagaaagtaggggggacagaaaaatgttagaatgaggaggaaaactgaatcaagatgaggcaagaggcagaaagagctcacaccatgctgtgggctcttggttctgagcttggataccacgtcttgccttctggataaactctaaggaagacagtgatggagtgaagtgggctgggggcgatagagaggatggggtggggcaccaggcgagagatgcgaaggaagccagaacgaaaagagagcgaccgaggagagaagagagcagagcaatacaaaagcagcctcggatctagccggagctgcaagcgttaaggggaggcggagagtgacgcgg

SEQ ID NO: 3456 - DNA, 2300 bp, Homo sapien
aatgacaatctgtccttggaatttatttcaaagcaggttgtactttcgtttccgctaaacttatacctgatgtttcaactgaacattggtatagtcttattggtgcaggtctcagagaaggatcttgaaagtgcctcttcacctggcgtagaaaaagacagcaggaatcaggtagccaaaccagaccaaaccaaatcaaaatagcccattaaaatccttattttaactatcctatgagggctgcattcttggaaggttttatatagttacatatcctaaagtactttgggatagctccttaagtgactccacaatacgaaccgaaaatataacttgtaaaacgtcaatttcttcaagtcatggatgatgaattttccagctatttctcatacacttcatattattattgacttcgttctttatttcagctttttggcccgaaacctgacacaaaacacacataataaatatccaaaaagatttgttctaagaatgaaacttcttttcctagactcctttcaccagacagatgtatctagggttcgttcttcttgatcctcttttatccgatgttttcctctctaactcaacgacacagaatgacgacttttaaaacactgcagacccgtgagaagagaaaggttgcagagcagggaggaacttggaggtctgcctttaataatcaagcaggatccccactgcggggtgcctatcagagtgatggcgctagtcagccttccggcttgtccccggcttaaatgatagaaaaccacgtgttagccttctaggatgtgttcccaccctcaccctggcctcctcgcggcaggctcgcgacagctaggtcaggagggagtacgcgggtggggtggatttgggggaggggtcgactcgccagaagtcggctatccccgtcggcagggaaggcatcgcggctgtcgtgtgccgctctcctccctcagggaccccgtccaggcgggatcccgcctcccagagcccaaggcagttgtggggaaaccccttgcccttcctcgccgcttggcgctgtcgcctcgccctcccgactccagcccgccgcccgccagcctccaggccatgcatcctcttcgcaggcccagccctctccacgcccggctctgagaggaaactacggaggtggttcccgctcgcaggcgggtggaaaagcccatggtgaatgcctcggggtgtccccccagttgctgtgggaagtgggaagggaggaggaagtggacttcaccaccggggagaactatatcgattcctaacttgggggaggcctttagatggaagggaagccaacggggaaccctgggtggtttcctgggaatccattggccaaggggagggtgaccctgtccgcacacatcggttactatgacaatataaccacagcctccagttgccatggcagctgcctatccaatccgattgtcttctcttcctctccgggccccaccttatcccctccaagagtctcccagcgtgcatggggaggggctgcagcgaagaggagagggggtccttcgagtcactctctacgcgcgagggaagacaggcgttgagggactgctgggaggaactgtaggaggaaggggcggcgtttccggtggggaagagtggaggcgtgcaaaaaggaagagggaaatcggcaggagtgataagaagggggaagactttgagtgtaactcccgttcttttggcctgggtgttcccggtggtgggattgggattgcccccttgcgcgggaggagaagggtggattggcaggaagccgccaagcgccaccagccggtctctcagaagccgcacaggcgccacacagctcgttgatcccaaaagggagcgctacagagaggcggaaatcactgagggacaggcgctgctgaaatctcgcgagagggaccccctccctcgcccggtcgccgacttcctctgcttctcctctttcccccgcccctcctccctccccctcccccccgggtcggagtgtccctgcgccccacgggccagagcagcagcgagagcagctttccccactccctccccctcgcctcattcacccccacccccctgccgagcgaggaggagccggaggagaggaagatggcggcggccgccagcacccgcggtgccgcggggccgctccgaggagcctgagagacccacggaggcttcgcgggaagacgcggcggcggcggcggaggatgagcctgcagagcgcgcagtacctccggtgagtgccgaggccgggctggtacgtagggggagcgggccgcaggttg

SEQ ID NO: 3457 - DNA, 2300 bp, Homo sapien
aaacagctaaagtgacttttccactcatttcagacttccacctcatccaactccctcctccgcaaggtatgaaacaattttttaaaaaacatctttccataaggcctccctttcttagttctgctcctgaaagacaaaaaggaccaattttaaagtcttccccttttctaagcagtagtcactccccagttaatttcaggatctaacaaccttacttttctctatcaagatttttgacccactttacctctgcctccaagctcttactcagcttccatggaacctttcagctgacacaaaagctggtgtccttccattcaatatgttctcgccatcaggtactaagttcaacctatctacatcttcatcctgaaatgtgcatcaatcgccgcgccccccaccccagacacacatctcgcacacacacacactattcccatgtgtcactctacctctgacatacaagttccttacaccactcttaatgaatacacacgactctcagaatggtatcttccgactacactgattctaacccagtttcttctgaaaaacccaaccttgtccacagtgcctccctctttcctcacttccccatctattccccttcacgcctccccacaccgccaactaactacagatgacattattcctcaatactcccaacccgagaatgaagaacaagctccagtttcctgcggtctccctctccccctgtctgccctccgcggttcccccgccccaacaccccaggtgtgcagacttcctccccgtcctctactcatgcatcgctccaaccaatcccacgccacaccacgagtcccctgccacggggatcagactcctccacacccacctccactcggggtcgccgccgcctccccggacgtttctctccacccctcgctagcaaacccgagaccaagggcgcgcgcgcacattctcacgcttccccaacctccctcctcgcaccgggacgagccggcttcgccagagctcagcccgggcggtaggggctaggcacccatacccgttccgccccctcccgcagatccccttgcagtctccgccgacctgcccggcgaggagaggacgcagcaactcccccgccaccccggacttacctcggtgtctgttgctccatgccccaacctgcggcccgctccccctacgtaccagcccggcctcggcactcaccggaggtactgcgcgctctgcaggctcatcctccgccgccgccgccgcgtcttcccgcgaagcctccgtgggtctctcaggctcctcggagcggccccgcggcaccgcgggtgctggcggccgccgccatcttcctctcctccggctcctcctcgctcggcaggggggtgggggtgaatgaggcgagggggagggagtggggaaagctgctctcgctgctgctctggcccgtggggcgcagggacactccgacccgggggggagggggagggaggaggggcgggggaaagaggagaagcagaggaagtcggcgaccgggcgagggagggggtccctctcgcgagatttcagcagcgcctgtccctcagtgatttccgcctctctgtagcgctcccttttgggatcaacgagctgtgtggcgcctgtgcggcttctgagagaccggctggtggcgcttggcggcttcctgccaatccacccttctcctcccgcgcaagggggcaatcccaatcccaccaccgggaacacccaggccaaaagaacgggagttacactcaaagtcttcccccttcttatcactcctgccgatttccctcttcctttttgcacgcctccactcttccccaccggaaacgccgccccttcctcctacagttcctcccagcagtccctcaacgcctgtcttccctcgcgcgtagagagtgactcgaaggaccccctctcctcttcgctgcagcccctccccatgcacgctgggagactcttggaggggataaggtggggcccggagaggaagagaagacaatcggattggataggcagctgccatggcaactggaggctgtggttatattgtcatagtaaccgatgtgtgcggacagggtcaccctccccttggccaatggattcccaggaaaccacccagggttccccgttggcttcccttccatctaaaggcctcccccaagttaggaatcgatatagttctccccggtggtgaagtccacttcctcctcccttcccacttcccacagcaactggggggacaccccgaggcattcaccatgggcttttccacccgcctgcgagcgggaaccacctcc

SEQ ID NO: 3458 - DNA, 2300 bp, Homo sapien
gtcttgaactcctgacctcaggtgatcctcccgcctaggcctcccaaagtgctgggattacaggcgtgagcccccgtgcccggcaacgtttggtatctttcatggtacttacactctgtgctgtttaatttacttgcctaacagatactcaactgcaaattccttaagactaatcagcaccctgatggtttccatctctctatagcacctacaacagatctttgtcatagctatatttatttgaaatattaaacaacaaagggatatctaagatgaaaaaaaggacctcaaattacagacatcattccaactgtcctgtggtcactgggcatatatgttgtgttaaaatcaagcattcaagcattgttcaaatatctcatcattctcttctctccctattatgcttaataaaactttactactttaaaaattataatggccaccctatgtatcaggtaactacacacctcttgcaatatacatatagggatccacacacgtcaatactttcatgtcactaaacagctaaagtgacttttccactcatttcagacttccacctcatccaactccctcctccgcaaggtatgaaacaattttttaaaaaacatctttccataaggcctccctttcttagttctgctcctgaaagacaaaaaggaccaattttaaagtcttccccttttctaagcagtagtcactccccagttaatttcaggatctaacaaccttacttttctctatcaagatttttgacccactttacctctgcctccaagctcttactcagcttccatggaacctttcagctgacacaaaagctggtgtccttccattcaatatgttctcgccatcaggtactaagttcaacctatctacatcttcatcctgaaatgtgcatcaatcgccgcgccccccaccccagacacacatctcgcacacacacacactattcccatgtgtcactctacctctgacatacaagttccttacaccactcttaatgaatacacacgactctcagaatggtatcttccgactacactgattctaacccagtttcttctgaaaaacccaaccttgtccacagtgcctccctctttcctcacttccccatctattccccttcacgcctccccacaccgccaactaactacagatgacattattcctcaatactcccaacccgagaatgaagaacaagctccagtttcctgcggtctccctctccccctgtctgccctccgcggttcccccgccccaacaccccaggtgtgcagacttcctccccgtcctctactcatgcatcgctccaaccaatcccacgccacaccacgagtcccctgccacggggatcagactcctccacacccacctccactcggggtcgccgccgcctccccggacgtttctctccacccctcgctagcaaacccgagaccaagggcgcgcgcgcacattctcacgcttccccaacctccctcctcgcaccgggacgagccggcttcgccagagctcagcccgggcggtaggggctaggcacccatacccgttccgccccctcccgcagatccccttgcagtctccgccgacctgcccggcgaggagaggacgcagcaactcccccgccaccccggacttacctcggtgtctgttgctccatgccccaacctgcggcccgctccccctacgtaccagcccggcctcggcactcaccggaggtactgcgcgctctgcaggctcatcctccgccgccgccgccgcgtcttcccgcgaagcctccgtgggtctctcaggctcctcggagcggccccgcggcaccgcgggtgctggcggccgccgccatcttcctctcctccggctcctcctcgctcggcaggggggtgggggtgaatgaggcgagggggagggagtggggaaagctgctctcgctgctgctctggcccgtggggcgcagggacactccgacccgggggggagggggagggaggaggggcgggggaaagaggagaagcagaggaagtcggcgaccgggcgagggagggggtccctctcgcgagatttcagcagcgcctgtccctcagtgatttccgcctctctgtagcgctcccttttgggatcaacgagctgtgtggcgcctgtgcggcttctgagagaccggctggtggcgcttggcggcttcctgccaatccacccttctcctcccgcgcaagggggcaatcccaatcccaccaccgggaacacccaggccaaaagaacgggagttacactcaaagtcttcccccttcttatcactcctg

SEQ ID NO: 3459 - DNA, 2300 bp, Homo sapien
tggagaacattactgcttttaagtttgaaattttagatttcttaatattgtaagtcagcggttccatgaggaggtcacatcagagtaagcagtgagtttggcagggagattcattgatactgtgtttaggttgttttgctttaaatataatctttgcacacacatatttaatattgcaataggaatgagacatttttcaaaatcactttataaaatattgaaaaatacataattttcagatcatattgtatagtgtattttgttttgttttgtttttaagtgccatataactcaccccttcttgtgggccggctccaggtcaccagcatagtccatagtgggagctggtgatgcatgacactggaggacctgaaaatggggtctaggtaagctttaaaattggttacatgctgaatgtcccaaataaggaaggctgatggacacttcacacataatcctatagttaatttgttttaaagtattttgtctttaattttaaattaactttaatgtctttattatctttagaacttaaaactatagctgttttggaaatactaccctactgtttgttttttgggttttttaaaactaattttcttcttcttagctcgatacagaaaccagaccagccaggcagagtcctactataggcatgcagctcagcttgtcccctccaatggtgagtggacctgtcaacctgagattgaccgtgacactttgttctttataacaatgtggcagataactcagggctcacctttgaagttttatgaaagcaataaatgagttttgttattgtcatgtttttccatttaactgtacattccatgtaaactaaaatgaattttttttacaagtaagatgacttttattatttattttattttattatttattattgtcagtaaagcaatatagatagaatctcttaatgtaatctgatattgtttctacaactctggcttccttaattgcttatagaataattatttctttagataccaccattcccctccccccagaaaaacaatctattacctaaaagataatcttttaatggccccaaactaggcattagcagtagttcttgagttacagaaattacagcagatatttaattatttaaatcattcttactaagacgttgaaattcctttagattctagaaagagtctaaagcagggatgatagtctgaccacactacttgtttcatatttgtttatggctgctttcacactacagtggcagagttgagtggttgtgatagagaccctttggcctacaaaactgaaattatttataatctagcccttgctgaagccgctctctaccctaatattgactgtttaacctgtatatgatagtgtgtactgtcgctgaagtgtgctgttggaccttacgctggtttgcaatgaggcagtcatatttaccttataaaaatactccccattgtttgagtatttaaacactgatcatttgtattcttatagcaagactttgtcactcttggggttactccagaatcttaactttctcctgtaggtcagccttataatcagttggctatcttagcttcttccaaaggagaccatctgaccacaattttctactactgcagaagcattgctgtgaagttccctttcccagctgcctccactaatctgcaaaaagcactttctaaagcactggaaaggtagggttgtttggttttttttttctctttccaagaggactttgtaacctggagccttaattcctcataatttggtttacagaaaataacggcctatgcttctcttatttctaaacatatagatttttcataatttgtgtatagtcactgaatttcatccaatcaatatctgattcagtcccagtaaaagagtacacaggctgttaatactgactcatcttgagtgtgttgcagttgaaaaatcagtcaaatacagctcttttgtgtatcaagtatttagcaagccagtgcctccttaaacagttgtagccaatttgctgcttatgattcatggaatttttttctttcatttcagccgagatgaggtgaaaaccaagtggggtgtttctgacttcatcaaggcctttattaaattccacggtcatgtgtacctgagtaagagcttggaaaagttgagccctcttcgagagaaattggaagaacagtttaaggttagatttcagaaatagagaatttttgtcttgtctaaatcaggaagcataacatttggaggaaactgactcccagtttttgtagttacttaactgtgtgaactattggtaa

SEQ ID NO: 3460 - DNA, 2300 bp, Homo sapien
cacttaggcggtgtcttggtgttaacagatttgaattcacatcttctgagcctcaaattgtactcagtgggcgaatacaggcatgcttttgctttggttccatagtatggtaagattaatattaagaaaatagaaggtataacttaattacctttttttctgggactgtgaagaaatccttattggagaagccctcagagctcatgtcacattcatcctctttcctgtccctcaccggattctctctcaatcaggtaggtgaacaatgaagaatcctgctgtgtgcttttagtgtagactgatcattgtctttctcatactgtttcagtatgtctgttttttctttattttccatgtattagtgtattccagatatttgattttatcccccttgtctctgattggggcatactagtgacttgtacatcatgaattaaaaccctttaacttctcattaatattgaaacccttagggctctctttttgagccaaataaattattcacattttcaacctggatagtttacacagagcaaatttaagggtgagagaaagcaaagaggaaaattaatttgactggaaaattgaaacaaaaagaaataaaagccttcaaaatttctcttcctaagaaaagcttaaggtgtaccaagcatccatgaacaagacattggattttctcaaatctctttccttggggtgagtttataacttcactgtcatgtctttcaggaaagatacccaaataatagtatgttcaatgaggtatatgggaaaaacctgacatccagctccaaagcagaactcagtccctcaatggccccccaggaaacatctctgtattccctttttgaagggactccgtggtctccatcacttcctgccagttcaggtattaactactctttaaattatagaccttacatttcctgtacactcagattgattaagggatagtgagattctgtaattacaaatatatcatttgttgggttatttttattttttgtttgtttgtttttgtaacttctgaaaggaaatagaaaaaaaaaaagaagaagccggtttatgtaataaatgctactgacaaaactttttacatcctcagtagccagcagagatgtaagggagaaaatagaggttctatcttatggttctcagctgctttttagttttatttgtaggtgttcattctttgcagaaaaattgcacttttttttttgagacagtgtcttgtggtgttgcccactctagactcaaactcctgggctcaagcagtccttccatctcagcctcccaagtagctgggactacaggtgcacaccactgtgcccagctctgcactttttaaaattgagatttttaacttagagtctgacttaatagtaattcttaaggttagcaaattctttctgatacataagaccaataaacatgtatctgaaatagccgtgtgagaatagggcattcattcagttgacaaaaattgcctactattttattttgcttttttaaggcgaagaatatgccttagatatgtgtggcagggcaaattagtgcatctagcagatctctttggagcctttagtttccctttccttcaaagccctgtggttattgttagtagaattttagtgatcagatctacaggaacctgtagttctttgtatgtttgtgaaacaatgatttactatatcctgtgttgctattatttaatagatcattcaacaccagccagccagtctcctcattcctctaacccaagcagcctacccagctctcctccaacacacaaccataattctgttccattctccaattttggacccattgggactccagataacagggatagaaggactgcagatcggtggaaaactgataagccaggtgagatctacatttcattgccaggcaaaattgaaagaatttactctatccttccctggggtctggcaattggcagtgatagaacatcttcttgaatttttcttatctcttttcatcccttagccatgggtgggtttggcattgattatctctcagcaacgtcatcctctgagagcagttggcatcaggccagcactccgagtggcacctggacaggccatggcccttccatggaggattcctctgctgtcctcatggaaagcctaaaggtgagtagatttcaggaacaagaaccacaagattattacagcaaaggtgtctctgctttcattcacataaatagctagacttctcaggccctcggagttgactgatacatagcacatatataacaaagtcctagaaacatggtc

SEQ ID NO: 3461 - DNA, 2300 bp, Homo sapien
ggccttcgaaggctatgcaaggtgggtttgaaggtgcagacatgggagagggcagcctagaaagaggaactagcacgagtcgcacagatgcaggaatgaaggcatagcgggagaagagtaagcagcagagtttgtatgggattgtgaaggaaagttctggggataaggctagaaaagtcttggcagtcagattaaggagagttctgagtgtcagggtgggataataggagggcaaaaacattttttaaaaatgaagtctaatttagctacaaatccatttggttttctcaggaataattaatgtgctattcaagtcctgattatttattcactagatggaatagcaatacctctttctgccatcactgctacctgcaggtcatttaccaatgatttctaatttcttttagaatgtatcccttcatcatgtattgagtatctgtgctagagatcctagaatgaaaaggcatggtcccaacttccaaggagcccatgaattgagcagataaagagataaattgcagtaagtatgatgcaagtttttgggtaaaggtggtacaaaggagaggaaaattctcctactacccagagttcagggctagatttagcacagttggtgacatttaaactgggctttgaaagatgagtaggagtttgccaggcaaagaagagagctgggaaggccttgtaaacacaggaaaacaatctggacaaagacacacatgtcttcttaattctcacaccttcaatcctacaagcactgtggagtatacatttttaagttttattttcaggcttttaggggaagcttggtgataatgagtgaattctttcagttgctacaaaacaagagtttgcatctaagtatttgacccccataaacatgcattttacctaaaaagaagcctggattttagcaagccaaattggctataccctttacccccagttattcctctgggaggttttactgatttttacttttctggaaaagcaaggaaagaactcttaaatctgttttttcagagactagtaaatccattagtcatcagtgcaggactttcatctcttcaatttttcactggaagatgggagaagtcataattcactgtcatgtggctcccaattttgacatttgcaggaaattggtcccctctgaacttcatgaatgttcataaaagttatttcggctgggcacggtggctcactcctgtaatcccagcactttgaggggaggccgaggaggccgaatcacctgaggtcaggagttcgagaccatcagcctggccaacatggtgaaaccccatctctactaaaaatacaaaaattagcagggcgtggtggcaggcttctgtaatcccagctactcaggaggctgaggcaggagaattgcttgaacccaggaggcagaggttgcaatgagctgagatcgtgtcactgcattccagcctgggcaacaagagtgaaactccgtctcaaaaaaaaaaaaaaaaaagttatttcaggcccagatcagatggatctccaaagattatcctgtctcaaaaatttgttaatgataatttcagctcaagataaacactaacatattaatacagcctatgggattacaaaaaagtgagcaaggaattcattcaagactggaaagaattatcctctcatctgacactcccatttaacaagggtgtggaaatcaaggcccagtgacacaggattttttctccatcactttgtaagccaggaacctctggctggtgacaccctgcccaggcctcagtgggccacactacctgctgcaggagatggcctgcccactcggcctgggtggggagttttattgagtgatgaaaacagctttcagtggagaggggatgcaggggtggttcccctacccaaaggcaggaaagtccccccagtgcgggtgagtctggggcttttatgggctcagaataggggaggggcaggacataggtagtactggaaaaggcaacattcaattggttaaaaggcattagtcagaaataattaattgggaaagagcagacaaacaggaacagaagttctcactctaggtcacgggtttcatttgggaccagtagcctagtctttcagccttcaggctgtttttggcttgaaggtggggtttcaccagggacctgcccctatctgcctaggcatttggctgcctcctgtcattatcaccagggaggtgcctctacctgccaaggttaccctggctctagaagcagaactttggccagaagctgccacagaacaggggtgggagagagaagaggagc

SEQ ID NO: 3462 - DNA, 2300 bp, Homo sapien
accgagaatcacgtgacgcaatcggacgaccaatcgcttcttacctctgcccgcggtccagcttttggccctccctctcgcccccgcctccttcgcccagccccgccccttgcctgcggagagcccgcgcctgcgcgctgtgtcctgcgcgctccttccctcgcgcgcgctctccgtggaagagcaggggcagcgtgggaggcgccaagggagcgcgaacctgaggaggaagaaacggggctagcgcgcaggcccagaacggtccgagccgcggcagtcggcgacgcctcagagcggaagagggaagtgaatcaggcgccgggtagtgggttgctgggctgggcttgctgaggtagaggcagcgccaagaagaggcctttgccgctggtcgggattgggatgtcgaagaacacagtgtcgtcggcccgcttccggaaggtggacgtggatgaatatgacgagaacaagttcgtggacgaagaagatgggggcgacggccaggccgggcccgacgagggcgaggtggactcctgcctgcggcaatatccttgcattcaccgccctccccaccccagcccagcccagcccgcccttctcctgggacccgggagcctgcaggatccgcggggcaccggcgcggagctgccctctcaacctgcggcttaacctgtctctttgggatcgcccgctctgagagggcaagggggaagcccccgtttcctacccagtcggcaggagacgcgagggtcccactcttggaagcctgccctcccccgcgcgccttccacgcccccagattcctcaggttgcacccgagtgcctgcctgcctcgggaactggtcccgccggccgcgccctcgcggcgctggggaaggcggccccggctggtggggaaggctggtgccgagcgccttagtttttcttcctagaactctgatttcctggggtcacattagctccagaaatttctgattgtggggaacctgcatctttccttagtggttttgttttttgttgtgtttttgttattggtagcgttaaggtagtttattccttaccggggggcggggggagatgggactgttcgaaaattgagggtccctgtgctttcagcccattggcctttttaaaaaaaaaaaaaaaagaagaagaagaaggggatttggcaaaatatacattgtacagaatttgttaactgggggaggggaatgaatacaaaaaatacaaaactcctagaaggaagcttggagccttttacctgctaagaaaaggacaatagaaaaaacaacggggaatgcgtgtggagaatccttggaaatatttaaaataaaccccaatgaataagatagaagatgagtcattcgtataaagcagaatcatttttgtaatcctaaaattgtttccattttagttaaaatatggcagtcagttcccggtttctgtttttgcatatttgaatattcataactttggcttcgcatttgcattacatcttttttagaaaaatgtaaatgttgcaaaaaaaccgaagctgtagttttagaaaatctcagacactgaatttgtatgcatttctaattcttgggtgtattcataaggaagactctcaacaatgtcctgttatagtggggaaatatgagagtgaaaatatttaatggcaacaatatccttttttaaaggcacctaaatagagcattagacatttatcaatatatagatagtgctttgccacaactttcacaattaattagctgttgctcttttgcattatttaaatacttaagtgcttggagttataaaaaatgagctaatctacatcaggcatgcttctctagaaatccctgcagccttgaaaataacagcttgtcaaccagagattttgtgtaagaactttttctttagaaaataaatggtgaacatgcttcctaaaaacattatttgtgatggatagatggtgttttatgaaaccccagtgtattttaggtaatttgtggtgacttttaaatggtactgctgtatccatatcagtggatctgctttttgatcagttcatcttaaaatataaagatactgtctcttcttaccgttacatacagccaggaaagacagccctagtggtggggtactagagttggaggaacaagtgaactctgtggttttccttttaggggaatgtttgtacattctgacagtctgattggccttctgtttctcatgcttgctaactcactagtgctttcaaagagagcctgaatttaataggtatggtctaacacagtttgaataacctttgtgaaata

SEQ ID NO: 3463 - DNA, 2300 bp, Homo sapien
acagtatctttatattttaagatgaactgatcaaaaagcagatccactgatatggatacagcagtaccatttaaaagtcaccacaaattacctaaaatacactggggtttcataaaacaccatctatccatcacaaataatgtttttaggaagcatgttcaccatttattttctaaagaaaaagttcttacacaaaatctctggttgacaagctgttattttcaaggctgcagggatttctagagaagcatgcctgatgtagattagctcattttttataactccaagcacttaagtatttaaataatgcaaaagagcaacagctaattaattgtgaaagttgtggcaaagcactatctatatattgataaatgtctaatgctctatttaggtgcctttaaaaaaggatattgttgccattaaatattttcactctcatatttccccactataacaggacattgttgagagtcttccttatgaatacacccaagaattagaaatgcatacaaattcagtgtctgagattttctaaaactacagcttcggtttttttgcaacatttacatttttctaaaaaagatgtaatgcaaatgcgaagccaaagttatgaatattcaaatatgcaaaaacagaaaccgggaactgactgccatattttaactaaaatggaaacaattttaggattacaaaaatgattctgctttatacgaatgactcatcttctatcttattcattggggtttattttaaatatttccaaggattctccacacgcattccccgttgttttttctattgtccttttcttagcaggtaaaaggctccaagcttccttctaggagttttgtattttttgtattcattcccctcccccagttaacaaattctgtacaatgtatattttgccaaatccccttcttcttcttcttttttttttttttttaaaaaggccaatgggctgaaagcacagggaccctcaattttcgaacagtcccatctccccccgccccccggtaaggaataaactaccttaacgctaccaataacaaaaacacaacaaaaaacaaaaccactaaggaaagatgcaggttccccacaatcagaaatttctggagctaatgtgaccccaggaaatcagagttctaggaagaaaaactaaggcgctcggcaccagccttccccaccagccggggccgccttccccagcgccgcgagggcgcggccggcgggaccagttcccgaggcaggcaggcactcgggtgcaacctgaggaatctgggggcgtggaaggcgcgcgggggagggcaggcttccaagagtgggaccctcgcgtctcctgccgactgggtaggaaacgggggcttcccccttgccctctcagagcgggcgatcccaaagagacaggttaagccgcaggttgagagggcagctccgcgccggtgccccgcggatcctgcaggctcccgggtcccaggagaagggcgggctgggctgggctggggtggggagggcggtgaatgcaaggatattgccgcaggcaggagtccacctcgccctcgtcgggcccggcctggccgtcgcccccatcttcttcgtccacgaacttgttctcgtcatattcatccacgtccaccttccggaagcgggccgacgacactgtgttcttcgacatcccaatcccgaccagcggcaaaggcctcttcttggcgctgcctctacctcagcaagcccagcccagcaacccactacccggcgcctgattcacttccctcttccgctctgaggcgtcgccgactgccgcggctcggaccgttctgggcctgcgcgctagccccgtttcttcctcctcaggttcgcgctcccttggcgcctcccacgctgcccctgctcttccacggagagcgcgcgcgagggaaggagcgcgcaggacacagcgcgcaggcgcgggctctccgcaggcaaggggcggggctgggcgaaggaggcgggggcgagagggagggccaaaagctggaccgcgggcagaggtaagaagcgattggtcgtccgattgcgtcacgtgattctcggtgggggggttcccatagaaacgcttttctgcggtccagtctagggggtctcagattggcggggatgggcagcagcggcaggtggccttggcttttgctgcagccgtcaacgacctatcatcggggtcctgcgtaaggtccggctggctgggacttggctgtgggtgggatggactggctgccggaccgagtgccctgcagttggtaggagtatgaggcagagtgatg

SEQ ID NO: 3464 - DNA, 2300 bp, Homo sapien
ctaaagtatactgattagcatctactaaagttagcaaagactgaaactgaaaaaaaattgtaaaatctttattctaagttatataacgccattcaccatagtaatgattttatactttggtatatggctttttaaaataaatattgccaacaggtaaaaatttttcctttgctgtcttaaggcattcctaagagaatttttaccagtgtgtgttcataacttgaatgttaatttaaacaatgttacttctatcacctaaatgatatacttatagaagagtggtttaattgggaacagaaaaacaccacattgcttcttcccaagaaaaagggatgtattccattctcgaggtctctctcccactctctatttatatataatatactgcatagataaatatacacacattatatatgtatttttttgaacttaaagaagactggacatatgtatttacatgtatatatccaacaaatatttaattttgagatctctctccctcttctgatttattattctcagtatgattctcaaactgtacggtctttcacatttcattcattcatcaagcatgtatcgagtcccttctgcatgcttagctttttgtcatatggaaggaagatacaaaagaaaaactgtttctgcccttcagaatctttccatctcttctaggaaggagataaaacaccatatatcattaagaaatttataagactagtcccaaaaccaatggtacaagcaacatgcattttacatttatgtagaattttagagcttggaaacactttcgtgatatataatcctaagaacaatcttgtaaagtgcacattattagctccatttcagtgatgaggaatctgagacagaattttaagtgacatgtctcgttcaaacattatgagtggaagagtcaacacttaagcctgagttttctgattctaagcctagtgctcttttcaacacagcactggaaaccaaagattgtggtacacaacagggcaacagccagtcttctgctcgaggtccaactaaactggacccataccgagcagtgtccagccaaatgtccaaattaattttatcctgcaaatatttgttcttcagtgtaatacacacagcacaactaccatttccttcgtcttagtgcctttatctcctacattccagaaatggggatgtcaaatatttttttaaatctggcctagatggaatcatataaatctcaaatcataatataaatcttaaaggtctggtttccaccaatccttccacattttgttttcccccagcactagagagcctaacctaccctcacccctttcgagcattcttgctccaaacgaccacctattttaagatgtcaatgaccctttcccaaattctacaaattcaccccagttttgccacccgaccccagcgcctgcccggacacgttcccctccctcccaatagatttgataccgagttcaggttctgcagatcccgttgcgatgctgtcacacagcactgacagataagatttgacctttcgactccgtccttggggacttcccgctggccaagaagggtagttccaatcccaggaaacgggcttcctgctcaggaacgcagcctctagcagcgcacagtctgaggcaatgtctccggcaattagaacgatgctgggcgcccgggtgtgcatcactctgcctcatactcctaccaactgcagggcactcggtccggcagccagtccatcccacccacagccaagtcccagccagccggaccttacgcaggaccccgatgataggtcgttgacggctgcagcaaaagccaaggccacctgccgctgctgcccatccccgccaatctgagaccccctagactggaccgcagaaaagcgtttctatgggaacccccccaccgagaatcacgtgacgcaatcggacgaccaatcgcttcttacctctgcccgcggtccagcttttggccctccctctcgcccccgcctccttcgcccagccccgccccttgcctgcggagagcccgcgcctgcgcgctgtgtcctgcgcgctccttccctcgcgcgcgctctccgtggaagagcaggggcagcgtgggaggcgccaagggagcgcgaacctgaggaggaagaaacggggctagcgcgcaggcccagaacggtccgagccgcggcagtcggcgacgcctcagagcggaagagggaagtgaatcaggcgccgggtagtgggttgctgggctgggcttgctgaggtagaggcagcgccaagaagaggcctttgccgctggtcgggatt

SEQ ID NO: 3465 - DNA, 2300 bp, Homo sapien
actaaagtgatgaattatataattacttgggtacagtaggttcaaataaaactttaacattttagcaataacttataaatattttacttcctgccacccaaagagaaagttgccttataagcagtaactagcaacacacaagccatcttggatataccccaaactgggttgtcagaacatagattaataatttttggagtgccaaactgagtaaatgtctcttaaaaatttagatcattgcaggatagtttagtctttgtaaatcttcttcattataatctcataatatctctacataaataatatacatcataactcatctgaatgaagatgaaacatggcagattaacaaaggaagacagaaaagagaagaaaggagtctgttggggaagctagacatttcttccaagcatctcctttccaatacatgtcaatttcactgtgaacaggaaccatggtaaaggcctttcatttcctcctgatgaagtttagtcttaaaagtcattctgtgcaacctaaatggaatgttgccaacttaacattccttggagtcttcctacatctaacagacaactacctttaaagaataatgactaattggggttgcctatccctaaaatcaccctaaaatgcaattgataaatgtgctagtggacaaaggctcatttttcctgtttctttaggcttaaccttccataggtatatcatttgctgagcatctaatccaccatggaaggtgcacagtgcacatgggatgctggtgcagatttggggactatattttttgtcttttcctcccctcactggaacctgtcagacagctaatactttcttacagaactgagcaggccctcagaacttgattcttcagctagcgggagaaaaaccccaacatgttctcttcaacagtcagctattatcctttcacccagcttttgataagtaatatttttaaagtaatgtttgcaatagattgtcatttattaggattaaataaaagatgagctatgaggattgactttcagttccatatttacaagttcattcagttagaagatgcaagcaatgagaaaaaagggatgacccatggcaaactgtggggaagggacaggatgcagcagtgaccatgtgccagagcaagcaccaaggaagatgaaactgaaaataaccagctgaggagttcatgaatacacctgaggcccttaggagacaaaaacatctcgtctagtaggagcactctggatgagaaaggatgtgtgctgtggtgcagactggaagtctgacagtggaaacaggcgtggcgaagcttcgagaagacagaaggtgccctctgggtgctcagtatccctgagttatttttagagtatgtctgcttacagccaatagttattactggaatgtacacaatagcaatccccactcactccttcaggtggcctgggaaaggggaatgagggaataatccagagtgattgacagtgaattgtgactatcaatgtgccttgtgtctaggagatgatgtgggggtcaagggagactaaggaaaagaatggagaaggacaagtggctcttccgttagccacagagaaggggctacaaccgatcctggaacaaatcttgtcttaaactggagggaaccacatacataccaatagcaagagtcttccaggcaatttctaagaggagggaaaccgctaacacatagcctaggtttagacagaatcaaaaacacccccttcagggactatgggcctcttggaggaagtcaactctctgctccctctcacagagggcaagcctcccaaggagaagccctggcacccacgcaggcaacagaaccgccaggcctggcacctactctagaccaggagaaaggtgctgaggagcaggccctcagaacttgattcttcagctagcaggagaaaaactgcaacatgttctcttcaacagtcagctattatccttttacccagactgggatatgcagtcctgtatattttcatctttggaacaggtggcttgatatgcaaataaagtaataagtgtcagagctgtatcctagcagtagctactttgcaaacgttaccatggcacccaatcaacagtgttcttagaggtagccacacctcagcaagggctttctaacttggaacagcaaagttcaaatgaacgaatagacacaaactgtgaaagagtcctgaacccattacaaggtgaatctttacagcacaattgccttctgaagctacttgaaacagggcatgggacttaaaggagaaaaaaaaggaaatggaccatct

SEQ ID NO: 3466 - DNA, 2300 bp, Homo sapien
atattaaaaaatttgtaaactgcaacacacaattgctctatctagcataaagtctgcctctttttttgcagaacagcatttgtacaaaattacatacattgtgaggtgtaaatacaaatagttattcttggaaaacctctctgaaattttaaagtaattccatgagaagacatcatttcagatttcctagtgttgcatacataacacgcttttcactgagtctggataaatatggtttgggaggaagtacaataaggaggcagtggaatttttttggatcacttaccatgtgcttgatgatttgcatgcattatttcatttgatctctttcaaactctttcaggtagatggttgtcccattttgcagatgaggaaattaaggctcagggtagtagcattcaggttcactcactgcaaggctggatgtgaagctgtatccacttggcttgaagctagttcttttccctttacacactaggtggccagccagggaattggagtacagagaaaggtgagtagctctgaaacctgagtggggccttgtgaatttaagccgccctgtccaggaaggtttcctgggagagtgaggttgaagaaactgcttaatatccctgaaatggaaatatttcagttactgccaaatgtgtagccaaaaatcaggttaaagtagtggtgaagttaatcttacaggttgtttaactgtcctcagttgcatttcgtggtgtccaagatcacctaataggtcctctagaggtgggcctgggttcctgaggatggcttaacaagcagggaggtagggccttcacatgattttcctctggttcccagcaacattctgccctgatcatcatagaaggatttagtctatgtgtttttcgttcgtttgttttttaaattatagaacaaccacttcagcttgctaaaagggcatctcctctctatacagtgatggtgcccttaggttctggttgtatggggataacctggctgaatgacttgtagatgttctcaagtgtccacagatccttttgtttttgcttaatgtgcccttgctgtcatttattctgctctcctgggaacatcagtacacttgatttgctaaattgtcagctcatgatatatttaccattaaccaaaacccaggcttatgtcatagtatggcaattagtgggagacctatttttttttttatttgaaggtgattaaattcatttagggtgaatagtatgaaagacatgagccctaaaggtatttgcaatttgcatggaattctggcaggtgtcaagtttgactgcattatctggtatctcttgctgttgacttgttaaaactggatctaaaaaaatgtaataatcttttatccctatagcagatctttccattatgataaaactcctgctggtagtcatctgatgaagaacttttccctgtggctatgatcctactgtgtccctacagtacaggcaactcaacccatggtggctactcacaaagactcacagaacctccaggacactgtcagtcctagcaaaaccttaccctgctttgttcccttcccacccccaatggccagttactgggtaattggggtggtgaaaagcccagcgcgatttcctgttggcagtgtgctgatgcaggagagggtatagcccctgggcatggttttggaatacccgggtgtcctctgaccttatcctctgtcctaatgaaaaacttcctggcgtctagtattgcggctctcactggggtcattctgacttaattattctaaaatcaaaatagataataggcagataatggaagttttttggactttctccttccattgttttagcgaaggaagaagacacacacaaatcctccatcccacactcagttctattttggcacctggtgaccgtcaggaaaacctgataaacttgaaagtgttgtttcccaatcaccttcagaactggagaaacgctttcatgctgactttatccatgggactgaagaaagggagagtgtgctcacaagcacaaacaggaaagccttacatcacggagtggcgtggggaggagtctgctcctcgcttgctcgctcgctcgccgcgctccctttgtggcccgagtcgcgcgcaccggcggcggcgggggcagcgcggcgcgtgtctgtgcgctgcggtcgctcgggaccgggaccggggcgaggcgccgcggggctgagcccagcagacattgcgttggcctccgagcagggcgcatcatgcagcgttcgcgcaccggagagaaaactgagaatgaaattgctttggcaagcta

SEQ ID NO: 3467 - DNA, 2300 bp, Homo sapien
ttgctggatcatcaagtacaatgttgaatagaactgttgagtgcagtttcttgatttgttcctgatcttagagggaaagcattcagtccgtcactgctaagtatgatgttaattgtgggtttttcacagatggcctttactgggttgaggaaggtcccttttagtcctattttgttgagtatttttatcataaaagggtattggattttgtcaaatggtttgtccgtgtctattaagatgaacatgtgacttttgcctgttaatatggtacgttactttgattggttttcacatgttaaaccaaacttgcaaccctgggataatcctgggacccatttggtcatgctgtataattccttttataaattgctggattctcttgctagtatttgcttgaagatttccacatctatattaataagtgatattggtctgcagttttcttataatgtttttggttttgtatcaaaataatattggcttcataaaatcagctgggatgtgttccctcctcctctttttttttggaagtttgtgaaagattcgtgttaacaatttttaaacatttggcagaaacccctagtgaagccatctggttctaggcttttctttatggaaattttttttattactaattaaacttcttttcttgttatttatttactttctatttcttcttgagtcaattttggtagtttgtaccttcctatcaatttgtccatttcatctaggttatctaatttgttgccatacaattgttcatagtattatcatataatcttttttactttcataaggtcagtaggagtgacccctctttcattcttgactttaatagtttgagtttacttttttttaattcatcagtttaggcaaataattgtcaattttgttgatcttttcagaggactgacttttggttttgttgatttttctctattgtttttctattctctagttcatttatttgtactgtaacctttattattttcttcctcctgtttgctttgggtttaattttctctttatctagtttcttaagatggatgggaggattattatttgagatattctattttactagagacatttgcagctgtaactatatctccaagtactatgttaagtgtatcgcataagttttggtatgctgtgttttcattcatctcaaaatattttctaatttcccttgcaatttcttctttgacccattggttaggagtgtattgtttaattccacatttctgaatttcccaagtttcctttggttattgatttttaatttcaaaccattgaggttggagaacataccttgtgtgatttcaatccttttaagtatactgacacttaatttatgacctatatggtctttatggtctaaaaaatggtatttcttagagaatgttctatgcacacttgaaagtgtgtatttggctattgttgggtggaatgttctatagatgtctgctaggtctgattattttaagatattattcaagtcttctgtttccttgtcttcctcctgcctagttctattattgcaggtgggatattgatgtcttcccctattattgttgaattgtctgtttctcctttcaattcttccagtttcatggttctgaggttctgttaggtgcatatgtatttataattgttatgccttcctgatggattgaccttttttttttgagatggagtcttgccctgtcacccaggctgcagtgcaatggcacgatcttggctcactgcaagctccagctcccagattcacaccattctcctgcctcagcctcccaagtagctgggactacaggcacccaccaccatggccggctaattttttgtatttttagtagagatggggtttcaccgtgttagccaggatggtctcgatctccagaccttctgatctgcccacctcggcctcccaaagtcgtgggattacaggcgtgagccaccactcccggcccagattaacctttttatcattaaaaaatgtccttccttggctctagcatgaattttgtctgagatttattttgcccaatattagcatagctctgccagctctcttgtcattgctgattatatggtatatctttttctattcttttactttcaacctatttttgtcttttaatctaaaggctgcctcttatagataccacatggttgtattaatttttaaaacttactatgccaaattcttccttcattgcagtgttttattcatttgccttcactacatttttttccagatccttaaggtcagccagaggtgagagactagggacttctca

SEQ ID NO: 3468 - DNA, 2300 bp, Homo sapien
aaatttgtccccttgtggagggatggcaatcccctagtgactaatggtcttggaactgagcttccaattactgactgggtagaaagcacttggcattggctctttagggacaaagatttggcactaatgacttactatgtgaccttggacaagtgacagcctgaatctgatttttcatcaccaaagatagggataattacatcaatctgcaatgttaaggtactatatgagtacaagaaaatgtttaatatgtttaaaagaaaaacagtccttcaaaatgtagcgtaattcacttctctttttcaaaagaaaaattgtcttccccagaagcagcattcactgggagtgcagactctttcatagactttatctaattattaatacattttcttttaaattttctgttatcaaactgcccatgcacatggttgaaagtattcatatagttccccatggtttattaagaaatgaacagtcccctgcacatcaccctgcatcacttctgtcctccagaaggcaaccacttttatctctaatatttacttccatgttaaataatatgcatgcattgctacttcttgattttctggcttcaccgtgggcattatttgttgactctccactatagactgtgaggagttagctctttttcttcctttttgccctctgcatgcaaacacattcttctcatcaccctgttctcccattgtaatttcaaacagattgatggtcagtgttcttgttgtaatcatgcaagcctaactccaagcttggtcattcataggctatgattagttttcctttgccattctttggaggcaattcctttaataattgccttttttgcttagttttattattactagtatgatccaaaactaatcactaattacctcaaactcctctcagaatgtccagatttgtcagatgtccttttttgcatatttgcgaagacgtctgttctggagctttctaatatattctaatccaagtggtgctgaagctatcaacctaagacttatttctcttctcttatacactgactctcctgttcatgttgtttataatctttcttgttggttataatcgtcctcctcttcttcctcctcctcctcttccttcctttcctcctcgtccttctctcacatcatccagcagctttctgagaaagtatgatggcaagtaaatatattatggtcttgcatgtctaaaaatgccttccttgtaccctcacacttgatggataatttggataggtatcatatcatttttttatggaagcctcagaaagttaaatggtaaaatggtttgcctaattagggtagagatgcaactttaatatatttttccttccacttcctgaattcatcatgactttacaagaaggtgcactttgaagctccccagaagcattcatatgggcaaacagcagagctaatgagtttgctcggtgaaggcaagagaagggacagtgcttggtagaccagccttgattcaagccagattcagtaaaagcagggaataaaggttattttcttttctccttcctctctgttaatgccatgagacagcttcacctgatttgacagatgatgtagctgactggaggaaatttcatctgcacaaaatagaggagtccctatgcagataattatctctctggaaaacactgacaattatcgcaattaacaaatcacaggcttggatacatggaccagaggcttggatacatggcggactcatccttttcactaagcagtcttatcattgatcaggagtgtcaattgctgaccaatgatgtgtatgagaccatcctgattcctatatttctagctgtctggttaaacacagatgccttataactctgcaagttatcaggtggggctatgaagaacaatttgaatatgagaagggtattgcatacttctggtattgtcacactacaggttcttaacaggacattctgaaatgcagactcttttgtctctatatgaactgattttggaagtttcatgtctgttggttggctccaaatccatgcctgctaagggaagcaataaaaccagggagaatcttggagaattttaaatttccttcgttttttcgtttttttgttctatgtatgcctagatttagctttaataatctgtcagcgttacagaattttcctgtttgctttcatatcaaatgtggatttcattcctcattttcttgttatttcctgtaggtggattacagtgttccattctgctctccagaatgggaattccttgcctcccttttgatcctttcatgccttt

SEQ ID NO: 3469 - DNA, 2300 bp, Homo sapien
aatgataactatcaaaccaagtttggctaaggagtgcggattttagtattgaaagatgagtgggacatagttcaagaaagggaaacaagaaagacagaacaacatggagattgtctggacctttctaacagtcccatcactacctcccttgtggaaatgaccacatcttcctctatcccttcactgtagctggtacatctgttacagtacttctaacagatgtttaactctcagtcttccctacaagactgtgagccccttgaaagtgggaacaattcctgaaaatggatggaggggaaggaaatgtctgtaggccattcgataaaaaaatatgaagattagagaagagattagagcagaagacatagattttgaggatataaccacaggagaccatatggagtgggaagactagcacactatagggaggcacacagtgaaggggcttggctcagagacaagtagtatcagaggagatctaggatgggagattatgtaatcgaagtccaggaaggtgagaacggaagagtttactgaatctgccaatgctgaggccatctgttggttttgcagaacagtggggagggctgacgccttactgcactgtggtgggaaagatgggagatgaagaagtggagaatacaagtatagatctctcttccaaggagcttggtcaagcaaagggatgactagaagaagacacaggacttttttttaaagcttttctttcttttttttttaacggataagagaagactgaccaagtatttagcttgagagaaaggagttgatagagatcagttgaagattcagtagagagtggaatgatagagaaaaatcatgggctagaaagggagacctctccctttctagtctgtgatcaaagaccctgtcgtgaggaggcacctgcaagtaagaaaggtcttggtagggatgctagttggagacagtggtgttgggggagctggatgaaggaggtgatatacttcaaaagacagtagggaagacttctaatagttgctgagaaggattgataacaactaataaaaagactatgggacagacctgagggtgagttgggattggagatcatgaatgtgcactggcaccaaaacaccctccatacttatctatcaaaggctacacaatatatcttcaaaactaaatatccagccgagcatggtggctgatgcctgtaatcgtaacactttgggaggccgagttgggcagatcacttgagcccaggagttccagaccagcctgggcaaaatggtgaaaacccgtctctacaaaaaaaaaaaaaaaaaaaaaaattagctaggcgtggtgatggacacctgtggtcccagctactcgggaggctgaggtgggaggattgcttgagcccaggaggtcgaggctgcagtgaattgtgatcgtgcctctgcactccagccccggcaacagagtgaggccctgtctcaaaaaaaaaaaaaaaaaaaaagtaaatctcctttagcagtgtatgccagcagtttcattttatgtgctaattgtgttcttccttcaccccttcttttcttccttatctcttctctgctctccaacatgcgcgaattttccctctttgttactctatcatattggcttattacggaaaaagaaaaccagctaagtgaatttattctttcacagccctcctgtgaggaggcttactgggttcacagtagagtgaggcttcaggacagtgtctcccaagggctttcttttattttgcggggtctgatctggctccaaaattctccaagtcttcaaactttgtgttattaggtgtctactcagtcaagaatgaatttcagaagttgagtatataagaaaatgcgacatgctgcctttgcggtggttaaacaagtgtttgtcataatcgtgaatagttggggagacttttcattttagaactctactcagtcaataggtgcattatgaaaactggatacattgcatcactgtgaagggcttcagtctgcggtttgcaaaagcagaataaattttcttggggttgtaccgttatgtacacacacacacacacacacacacacacacacacacactcacaggctcattggcagacagggccacaactcgcggctctagggaaggccacagacctcagctgtacgagcggaacctggactagaggaactttcctcaggactcagggcacacagcccctcggccactactgtctgcgagcccgaggcgcaggggagcgccagcggctgcaggtacgctgcgcacccgcactggggcctgggcggtgc

SEQ ID NO: 3470 - DNA, 2300 bp, Homo sapien
cattcaaatgtaatgtatttgagggcaacatatgaatcttcatgtgtggctttacatttcattcaataatagatgcccttcttttccctgtgtatgatgtgttatttcttttgatgcattcaagcttttctctttatttttttgactttcaatagttttattacaatgtagacttctttgtgtttattttagttgctatgtatttagcattttgtactagtaaatgtgtttttcatcaaatttggggaaattctggccaccactctttcttcaaaaattttttctgtccctttttttttctacttctgttgtttacatgcatgttggattgtctgacatgtagcaaatctctgttggtctactcactttttaaagataatttttctctttgttgtttacttttaataatttctattgctctatcttcaagttccctactttttcttttgtaattttttttggctgttaaattcacccagtgaattttttatttctaaaattataattttcaattttcagaatttccatttggttttaaaaatctttttttttctttttctttgctgagattttctatttgtctcctgagattttcattcattgaaaacatgttttacttcattgaggatagttataatagtcactttaaaatccttatctgtcagtttcaatatctgattcatctcagggttgatctctagagtatgcgatccatttccttgaatttcatatgtcagatagttttggatagtactctggactttgtgagtgttaagtggagagtctggattctattattcttctctgatgagtgttatttcctttgtattagtaggtaattttcccggctagattttaactgaaaactctctcccttttggagacagctctggtctcagttcagatcttttgtttttaactgagctgctgtgattctgttttgggtggttcaggatctctcagagatgtgggttgacagtttggggatccactctctgactccttccttgggatttcttaatctcttcagaattcaaaattttctgtcttcacttttctgcttccccagacaagaataactgataagttttatacatgcatccctggtactgctgagcctgacttctggactgcactttgccccaagctaaatgccaaagagaggagaattttcttgtggagttcttgatcttcaagcaagcttgcccttcctaccagtctgctgttcacattccagtatattcagctttttgtattgtgtccaagtgtagttcctgatcttcaagcaagcttgcccttcctaccagtccactattcacattccagtatattcagctttttgcattgtgtccaaattgttttctgctgggggatggtccactagggtcttagtctatcatggttgaaaacagaagttatgtcctgcctgggactttggattttgagtcacccttgtcctggtcaatgcgatagcctcctaaccagtctctgtttgtgtccttgctccctccagtctatcctcaacatatcagtcagagtgatcctatgaaaacgtccaggagcctccaatagcttcccatttcactcacagtaaattaaaaaatacttaaaatgtgctactctgcctgtttgaaactcctcatccttggcttccagatcacatgcttatgctagtttgtatcctacctttctgaacactcgttcagcaactcgtgtttcctctaatcctgaaacgtgggtccaccctgaaagtatggttctactttaaagttctatgtcagggcactgagtaaggcctttcccgtccccagcaatcagaaaccaggaccccactgctgaaggcaaagaggacgtatgtatcccccaactttctcagagagttatcggcagcactgacttaaagaggattaagagcttcagggcgcaggctactctttaatatttttcacgttagaatttgctcagatttgaataaacgcagagcgaaactagagagcgttcgcgcaggttctagctaccttggtcagaaggaggggctgatgcaactttcctcccagtttctgagccctctcgcactgcagctgcgagcctcggggaagcggaacccacaggcgcgcgcgccgctgcttctggccgggcgcgggtcgtggtgcaccacgggagcgccgcaccggccggcatggaggagcgcggcgattccgagccgacccccggctgcagcggcctgggtccgggcggtgttcgcggctttggcgacggcggtggagctccttcgtgggcccctgaggacgcctggatgg

SEQ ID NO: 3471 - DNA, 2300 bp, Homo sapien
ccttctttcactgggtgattgtattgggccagccagaaaatccatgataacctctctgttttaaggtcagttgtttagcaaacttaattccctctgcaaccttaattcttcttagccaaccaatctaatatattcagtgattttagggactaggacatagatatctctgaaagcaactattcacctaccatacatagtaactgctatattagggttagcttttcttggtattatttttattattataaggtcctgagatttagagttaaggacttgcactcaaatcgtggcttcaaaacttaccagctgtgtggtcttgggaaagttaattgctgtctttgagacatgcaatttagtatgttatttggaaatacgcagcaaatagcaaaatcattagttatcaaaaattcacttttaaatggaagtccttggactgtaaaactgggagttagttagaaattggtggtgggggagggggaatagaggaggcaggagtgtgatgctttattgactttacaaacatttagctctatttgtcttaaattttctttgtggtaagatatacataacataaaatgtgttattagtgacattcacaatgttgtgtaaacattgctactgtcttgctctagaacattttcattaaccccaaaggaaatcttgtaccattaagcagtcacttgccattccccactcctcctggccactggcaatcactaatctgctttctgtctaaggatttgctgactctggatgtttcctataaataaaatcacacaatatatggccttttgtaactggcttctttcacttagcataatattttcaaagtttatctaccctgtagaatgtatcagtacttcattcctttttaaggctgagtaatattccattgcatggatacaccacattttgtttattcatttaccagttgatggacatttgggttgtttccaccttttggctattgagtgtagtgctgctgtgaatacttgtgcacaagttgttgtttgaacacctgctttacttcttttgggtatataaccagacgtggaattcctggatcatacagtaattctatattgaatctaatgtggacccaccaaactcttccacagcagttatgccattttaccttcccaccagcaatggacatgggttccaatttctccacattctcagccactggtccatttgtcttttaatgaaactaaaaatgtatgggacttttaatggaactaaaaactctgtatatagtactatgataaattaaaatcactaaaataaaaccataaggcaatactaatagtgggcataaggatgaaagaaaacagaatgtggggactggcatagccttaccaggtatattatttcctattgctgctgtaacaaatcaccacaaatttagtgggttaaacctacggaaatgtattcttttatagttccagtggttaaatgtccaaaatgggtcacactgggctaaaatcaaggctgtgttcctttctagaggcttgagagagaatccactcctttgccttttctggcttctagaggttgccaacctgtcttggcttgtggccccttcctctgtattcaaagccaacagcatagcatctcttctctcctctctgactgctgtttctatccttagatgtaacaactttctgactctgatcttccccttaccaagaccccgtagttacgtgggcttatctagattattcagaataatctccccatctcaaaatccttaccttcatcacatctgcaaaatatttttgctgtgtaaagtaacatattcgtatgtcctgggattcagatatggatgtctttggaaggctattattcagcctaccagcccagggaaattttactcatgaagaactcactcatggagaggtgggcagaaagggctctgtcaattagaaagtggcaaagttacctagtgaagtcaaaccccctaagccttagttttctgttccataaaggggaggtaataacagtaaacatgttatctattatgtatttttttgggtggaagtaaaatacgaaaaaaatgtttacctatgctaactcaaatttctaccaagcacctttagtgcttttagaagactgtaggtaaagctcgtagctgcaaatttcaggcatgactttctttgaagtcttatgttttatctgagaaattcatgtgaattatacattgtagttaataatagatgtgtgtttgttttactacataaataacgtttcaagtgtctcgccggcaggaacaatacattgatgctctgttctttcatgtt

SEQ ID NO: 3472 - DNA, 2300 bp, Homo sapien
tctattcagggtggtctatgtagatgagagaaggaaaaaggagggggaagaacaaaacttattgtgctcaaagatccttttatatggatgtacacacacacacacacacacacacacacacacacacacacccctcagttatgtatttatttcattttaccacaggcaaaagtttcaggcagggcgtaaaaacccaagggaagagtggactacatttgaataaatccatcagctgtgtccattctcctccctaacttttcagaaggaatggaaagagaataaaattctaccaaatttgagtttaaaataatcaagtctgaaacaatagcttctatttattgagttctcacccatgtgtcaggcactatgcaaagtgttttacatgcattgccacctcgttttattttctttttactttcacaagcttatgaggtaggaacgatcattatcaatgcctttacagatgaggaaagaaagaagaaatgaaacaagtcaccagtggtgaaagggatggggctggctgcccctgattgaaatctcaatttatctaccctcccttcttaaccgctcctttccaagaggctagactacaaaaaatttgggctccaagaagtatgaaccagaatatggatattttgtaaaaatggaatgtaagttgaggttcctgaacaatgtgatgttaggcagggtgcggtggaattggcctgtagtcccagctacttgggaggctgagatggggaagatcccttgaggaggatctcttgggttcaggagttcgaatccagccttggcagcagaccccatccctgaaaacaataaaaattaaaacaacaacagtgggatactagtcttttaatttgaaaaaaaaaggggtggagaaagggaaaaccagttttcaaaaaaggccaatttcctagacattagtggttgattactaactcatttcattaaactaaattatgaattggcttttctcgtcagtgtcaccactctgatggcgttcttttccattttccatcttcaccctggccgaatgtgggaaatgatctggtttgtgcataatccgcgaggcccagggaggatcttttgcccctattgttttcttgggtgttctcactctgggggcctgacattcctcgcgtgtctaaggcaatgagggagcagtgaagcgcggggaagccgcacaaaagacatccaaaggctatcaatggaaaaagatcaattaggtgcacacaagaaacacccaatatgccagggaagagaaaaatacccttttccagagggtgggaaattgattgagcttctgtgagggtccacaaagaactggacggatgcagtggtggatggcgatctctctggaccactccggacgcgcccagcagacgcagcctacgcctttaggtcctaggaggctgagaagggtggggagaggggggcagcacgatcttgtgtctttcctccccgtgccgcctctaccgaatcgcggatgcttcattaatcttgcaggcgccgcagctcgggtcagtatggaggcggatcggtggcagagcccgggcctctgggctgcgcccgcccgttcagcctggcccgggaggggagcggccgcgcggtgggccaaagacgcccggccttccctccgtctgcttccagcaggcacagccgggaggctgggctcaggggctgacccgaatctcccctagagctgggcccacccggctgccccccgagcagcctcgccgctcccacgccaccgcccaagtgacaggcccgggaaggccggacgggacgcagtcttcccgccggggtcttccctccggctggccggccgctgcagggcgcgcgcgcacacacgtacacacacacacacacctgcccacacacacacacacacacacacacacacactgccgcctccttcccgccccgcagccctagcagcccccaacccgctccccagcgcgctgcgccccggcggcctccgcaggccccgccccggggaggagagccaggcgcgcgcgggagctaggctcggggaggggccggcggtgggggagtgtctgctgcccccgcccctcgagtgagtgactgagcgaggagctcccctccctcgctcgctcctcgcaagctcccgctcgctccctgcccactcccggggggacgttccgtgccgcggccgccgcggccgctgcttctttcacactttagttgggagctgcgcgccgcgctcagttactggagagctggccgcgcgccgccgcctcccgcacgcttgcacgcgggcccggcttcggggttttggg

SEQ ID NO: 3473 - DNA, 2300 bp, Homo sapien
ccaatgtaggattggagatccatgcaaaaaaataaaggatattaaatattgtacagaaatgacttcatgtgttttcacagcatccacgttagtagataaaagcaaggatccccaagcctggggcagtggactggtaccagtcagttgcctctcaggagcagcaggcgagcaagcattaccacctgagctccacctcctgtcagatcaactgcgtcagagtctcataggagcatgaaccctattgtgcactgcacatgcgagggatctaggttgcacgctccttatgagaatctaatacctgaagatctgagatggaacggtgtctcccccaccctgtggaaaaattgccttccacaaaagtggtccctggtgccaaaaaagttggggactactggataaaaggaccatattattcccactttatagataagaaaactgcaggaataaggaagcaagtatatttaacatttattgagacactgcaatagtttaggagagaggtaatggaagcttgaatggagcaaaagtgggaatagaaagaaaggtaataatctgaaagatagaagaggtaaaatctatataatttggtaattaattgcacgtggaccccgaaggctaaagatgagttgacaatgattccgatgcattaatttgaatcagaaaacatcttacgtttgagctacccttgggctagacattaggacatttctattagggaggtggaaatgtgggtctaatgatcaggacagatattgatttagaaatcaaccacagagatatgttggctgaatccttatgagaagaaatcaccaaggaataattagagtacagagagaaaaaggacaaaaagaaaaccttaagggaacacctgtattttaatataaagtagcgagagaatgaaggaaaacgggtcagccagagaagaggtaagaggttaagaggtaagaggtaaggtgataaaagtcaaggaagaaacgtttccagaaagaccgccgaatactgcttaaaggacacgtaagtaatttactgtggtcacagagatcacatcgaagctcctaaactccgcacctattgaatgaccacactagaaaaacaatgtggtttttcaagaggaaccgatgtgtcattttaccaatagttaacctgggactcggtcatcaaaattcattgcaagttccaatctccttcattaaaccttctttgcagcccacacagctctccttacattgagcttttgaggtaactattattaatcatgtacgaggacccacgtgctccttcatccttgtagtactgcgcggtggttaaatgcaagggcttccgaatcagaggctggatggattctaatacagcagtgtgacgagctcttgttaaccaacttttctaagcctctgttttctcgtctgcaaaagggggatggtggtacttactctatcagagttgagaagagtgcatgagatgattgcgagtaaaaaccttagcgcaatgccttcaaaggctcaattcattttgctgttactgtgttttggaatttccctgagggtagacgactactccaacactattccctaacgcagcagcactgacatggggacagtgcgcctcattcagccagctctctgggaaacaactttctgaggaagagagataaacagctgacgggtttcccgggactccgcagcccaccgagacagggttgactgtagggcgccgaggaaagggggaggtgggatcccagcaaccactggcgacctcggaggaccgcaagtcccagggtgcagcgcgcctaccccgggtagaagcgagagacacggctccgagtcggctcgcgggagagccggggaagaagcagtgcacactgggactggtagtcctcagggggcaactccgcgggtcggaggcgggtcgaagcgagagatcccttcccagtcccgccttttgtccacgtctcacttctcctggccaatgccctctccagtcgccggagacagcccctctcccatgaggtctccattggtcctgaggctctacggcttcggccctacccggaagtaacgttggggaggcggtttcctagactacgacaccggaaagctgggggaggcgctccgggatactgagggcggagggcggtggcagcgctggcgctggggaccggcttggtggcttcgggaaacagtttggcgccggcggccgtccgtgttactccgcatcccgccccgtctcggcacggctagcagccccctggccaccagcgtccagcaatgtgtctcaccggccgggcgtagcagctgcgcgtg

SEQ ID NO: 3474 - DNA, 2300 bp, Homo sapien
tcttacctcttctctggctgacccgttttccttcattctctcgctactttatattaaaatacaggtgttcccttaaggttttctttttgtcctttttctctctgtactctaattattccttggtgatttcttctcataaggattcagccaacatatctctgtggttgatttctaaatcaatatctgtcctgatcattagacccacatttccacctccctaatagaaatgtcctaatgtctagcccaagggtagctcaaacgtaagatgttttctgattcaaattaatgcatcggaatcattgtcaactcatctttagccttcggggtccacgtgcaattaattaccaaattatatagattttacctcttctatctttcagattattacctttctttctattcccacttttgctccattcaagcttccattacctctctcctaaactattgcagtgtctcaataaatgttaaatatacttgcttccttattcctgcagttttcttatctataaagtgggaataatatggtccttttatccagtagtccccaacttttttggcaccagggaccacttttgtggaaggcaatttttccacagggtgggggagacaccgttccatctcagatcttcaggtattagattctcataaggagcgtgcaacctagatccctcgcatgtgcagtgcacaatagggttcatgctcctatgagactctgacgcagttgatctgacaggaggtggagctcaggtggtaatgcttgctcgcctgctgctcctgagaggcaactgactggtaccagtccactgccccaggcttggggatccttgcttttatctactaacgtggatgctgtgaaaacacatgaagtcatttctgtacaatatttaatatcctttatttttttgcatggatctccaatcctacattggttccatcctagtcctctttggcagcattaatgttgaagttaccgattatctccctgctgccctactctcctctatacatggctgtcagaattggtattcaagaacatctgcaaaccctctgaataccttctttcttccttctagtctgccctgccctcaaatcctatgtgataactaaataattcctattctgtatcctttccatgcctttgctcacaccatctcctatgctaccccatcatctttgtacaacactcaacacctgttaaggctgggctcagattccatttccacaaaacccttccagaaccttctagttagcagaagttatcctctctctgtgcctccatggtattctgtgtctttgttattgtgtttttcatagtctgcatacccactacattttaaccacatgaaaagtattgactttagcttatttgtaggttgtcttagtccgttctctgttgctataatggaatacctgaaagtgggtaatttataaagaaaagtaatttatttcttacgattctggactgggaaatccaaaaacccggcaccggcatctggttggcttctgacgagtgcctcgtgctgcatcatgacatggtggaaaagcaggcacgtgtgaaagaggtgaaacacgaggggcagcctctctgcataacaacccattctggcggtgactaatccagtcctgagagaataagaacccactctagcaagaagtaacccagaccggagagagcagcattaatccctcttaatcacctcttaaaggccccatctccccagatcaccataccagggaccacatttccaacacagatattctgagggacacactcaaattatagcataaggatattctgaaacacctagcactgtgcctctcctgctgtagatgctcagtaaatgttgaatatacttgtttttgtattccttcagtttccttatctaaaaagtgggaataatatagtccttttatctacttacatagatgctatgaaaacacatgaggtcacttctgtacaatatttaatattatcctttctttggacagatctgcaatccaacattggtttcatcctggatcctctttggcagccttggtaatgaagttagctaaatcaatacatgtgagttggtcttggctcttgcatagagaacattacaaactaaaggtcaacaccaatcatatggtatttgaaaactaagaacaaataaaatagaaaaacagtgacattcagttatatggaaatatagtcaagtcaataatttgaagtggattattaacaataacacagttttctttaccttcctgatgttccaaccctttataagaagtcaaaattgactatgaactatcat

SEQ ID NO: 3475 - DNA, 2300 bp, Homo sapien
actcatctgacaaagggctaatatccagaatctacaatgaactcaaacaaatttacaagaaaaaaacaaacaaccccatcaaaaagtgggcaaaggacatgagcagacacttctcaaaagaagacatttatgcagccaaaaaacacatgaaaaaatgctcaccatcactggccatcagagaaatgcaaatcaaaaccacaatgagataccatctcacaccagttagaatggcaatcatggccgggcgcggtggctcacgcctgtaatcccagcactttgggaggccgaggcgggcggatcacgaggtcaggagatcgagaccatcctggctaacacggtgaaaccccgtctctactaaaaatacaaaaaattagctgggcgtggtagcgggcgcctgtagtcccagctactcgggaggctgaggcaggagaatggcttgaacccgggaggcggagcttgcagtgagcctagatcgcgccactgcactccagcctgggcgacagagcgagactccgtctcaaaaaaaaaaaaaaaaaaaaaaaaaaaagaatggcaatcattaaaaagtcaggaaacaacaggtgctggagaggatgtggagaaataggaacacttttactttgttggtgggactgtaaactagttcaaccattgtggaagtcagtgtggcgattcctcagggatctagaactagaaataccatttgacccagccatcccattactgggtatatacccaaaggactataaatcatgctgctataaagacacatgcacacatatgtttattgtggcactattcacaatagcaaagtcttggaaccaacccaaatgtccaacaatgatagactggattaagaaaatgtggcacatatacaccatggaatactatgtagccataaaaaatgatgagttcatgtcctttgtagggacatggatgaaattggaaatcatcattctcagtaaactatcgcaagaacaaaaaaccaaacaccgcatattctcactcataggtgggaattgaacaatgagaacacatggacacaggaaggggaacatcacactctggggactgttgtggggtggggggagaggggagggatagcactgggagatatacctaatgctagatgacgagtaagtgggtgcagcgcaccagcatggcacatgtatacatatgtaactaacctgcacattgtgcacatgtaccctaaaacttaaagtataataataataaaaaataaaataaaacaaaaattatatttatggttgaaaattgaaaaaaaatctcaatttttatcaacctgagtgcagataaacaatttttgtttatccatataatgaatactacttaacaataaaaaggaatgagctactgatagatgcagcaacatggatgaatctcaaaaacaaatgcaaaataattatgatttcatttctataaagttcaagaacaagcaaaaactatcatgataggtataaaatcagtgctcatatcttgggaggtgcagactggaaagtggggtgggggaactttgggggtgatggaaatgttctccttgatctgggttatggttacataagtatatttacatatttaaaatcattgagctgaacttatctgtacattttactatatataacttaccttggtaaagtgctattgtgattaaacaaaaaagaaagaaggaaacatcttggtgatgaggggaaaaaaggaggctccaaacctgctaatgaggccttgagatgataaaaaaaaatcactgctgtcttctcccatgaagtgtataaaatgcgtggccagtacaaggaaagggaaaggaaccaccaatggctgagtgagttccacaccttatcatggacagtaatagatgtgtcgaggtcaggcatggtgcctagacagtgaattgaattgaagggaacccaataaaatattattgaattgagtaatttgcccctgggccaacatggtccttctcttatgccctccaagaagagaatcatgagtgggaatcgtcctttctgtatctcctctaagaacaggcatctcatgccttttcatctttatcttctaatctcttgctctccaggagcttcagaaatacgagcagttcatctttgcagatcataccaatatgattcacgttgaaaatgtctatgaggagattttacatcagatcctgcttgatgaaactctgaaaggtaagaaaggttacctggtgctgcagggacactccatagaggggagcatccctgaaataggactctgtaaggccagtcagggaggaaaagagaaga

SEQ ID NO: 3476 - DNA, 2300 bp, Homo sapien
tggaatcagagttggggggaagagacttttaaaatttcagagtccctggcattattccagacctacgaattagaatctctgaggaaaggagcccagaaacgtacattttaaacagcatcccttcagagttagagaatcgttgttgcctagggtcttccttttaaacataaggtattttgcttcagcaacttaatttttatttttctcaaattgtattactggtaaagattcatgatttttataatatgaatttaatgtttgaagtgatattcaacagcacaataaaaaagtggtgaatggtgggccgagcgcagtggctcacgcccgtaatcctagcacgttgggaggccaaggtgggtgggtcatttgaggtcaggagtttgagactagcctggccaacatggtgaaaacccatctctactaaaaatacaaaaattagccgggcatggtggcgcacaactgtaatcccagctactcaggaggctgaggcaggagaatcgcttgaacatgggaggtggagttgcagtgagccgagatggagccactgcactccggcttgggaaacagagtgaaactctgtctcaaaaaaaaaaaaagtagtgaatgcaaataaaagtagtgaatggtcacaatgtgcttagcaattgtaagataaaattaaactctttataatattttagtgagaggaccacaactagactcttcatgggatttcctttttgaaaataatcctgaatctaatagcaagcacaactgagatacattttctttactgagttttgcatttccagtgtgaccctttcgctttttatactggacgatctaattttacgtaagagctcactctggtaagctgtaccgtgtgtaggtgtacatggatgatctccactagtaagataaaatacctctcttctcttctacttttatccccttcttctgtccgagtgagaggcaatgtaccacctttcccttagacatgaccataaaatcccagaggaaagcaatatgcctaaaattatttagtctgtttcccttgcttgaatatgcactggaattccctggcctggggtgggtcctaagaatttgcatttctgacatgttctcaggtaatgctgatgctgatactactggcctggggaccctacttggaaagccactgtattaactcatttaatcctcacagcagtcctgtgaggtaggcactattattgtcatcatgcccattttatagacgagggttctggggcagctggtaagacagctggtgatcaggacaagattttaaagccaagcaggccgacttcaagcccgtgttctaaactactgtaccatgtgtcttctcagtcagcaggtacttattaaacgcatactgtgtgccctgtgtttgactagctgatatttttaaaaaaaatctaatctcattccttattcaggaacagatgatttgaggatactcacttcctactgaacttgacatggataatttcttgatatctacttgagagggacatgagctgctacatcaattgaaactcaggtgacaattgagatgcagaagttaagtcttttctctgcttttaaacatgaagttgtgccttaacccaaaagggtgttcctgtggtaaactgtgtactctataaatgttctccaaagctagaattttcttggtttatgcaaatgtacagctgagaataattttgtgggatatgttgcaggggtggggttgaaaaattcatggtacttatctattaccagttctttgtgttttaagtacttagcctttatttttttttcctttcagcattttcttttgttaactggattcccatactggctgttgctgagggggttggggaagtcctgatctgacctgaattttttaaaacaattttttagcattttcttttggagaccacaaatcatattgcaagtcaacaacgtctgggtgttagtgggacatttctattttaagaggcttagaaaaggaggtaaaaaagaaggaagttggaagttaggaaggagcaatgaaagcaaagcacccattttcacatcttaccagacaaagcccctccctgccaagttcctttctggtgggagatcagggcatggctcatgcaatcaccagctaagaaaggaactgagacttctcttcatttgttgttttttccttccccacctttccctagaaactattagactgccacactgtcccgttgtgtgacacgggacactttaagtgacggggtagacaaaagctggaacaaaagagcctctattaaggtaagggtctactgtgtcca

SEQ ID NO: 3477 - DNA, 2300 bp, Homo sapien
ttttaacaatattgattcttcttatctatgagcattgaatgtttttccatttgtttgtgtgaatccatctttgtactctgtttcatccgtgaatatttacaaatgagtggataagggtagatgaggataatcagtcctttctcagagtattcctgaagtagaggtgacaagctaaaactacacttctggcaggagatccaagctagttttcttcaataacaataacagtattctgaggcacagttatagcaatttatatagtcaaagaaattacttctccaagaagatacacttaattctaggagccaactagagtattgagagaagagttcaacactaaatattttaaatcattgagttgttatctggaaatgcttgagatcacagtttttgttgagtacagatttttacattttatttttcattcattcacttattcagtggttatctactggacacctactacatgctaggtgctcttctaggcatttgaaatacagcagaggacagaatagacaaaaaaatccctgccataagaggaaaaataataataaaaaaggaaacagaaattttgagggaaaaagccccaagaaacaacaataacaacaaagaaaatccctgatcttatagagtttacatcgcagtgggggaagatagacaaagaaatatgtgttagatgatactaagtgatatgaaacagaaataatgaagagcaagtggcagagagaggtgatggctggtgttcctgggtcaaggagaacctctctgaattactagcattaaagtggaggcttgaatgaaatgactgagagagtaacctatgtgaatatctgaaggaagagcatcctacagaaatgaaaaacaagtgcaaaggccctgagcttgatgtgtctcagaaagagtaaaaaaaaaggctagtagggctggaacagagagaacaaggagtggtggtagagaagatcacagaggaaactccacctaggccctgatagacgtcgtggcttttctctgaagaaggtagatcagttaggcagctagtgtaatgaataaggtgaggaatgatatgggatgtcagtagaggggatgagaattggttggctattggacatatttaaaagctgaattgacaggatttactgacagattggaatgtagagtgtgagagattgggtgtgagtgtgatgaaataattgtgttaaagtgcaagttagctaatagggaaggcgggggtgtgtgggaaagccttcaaagtcctcctcaggcctggttctagtgtatacagaccatttgaccttgaggttaagtcaataggagtcgcaaaataactgactactaagaataggatgaaatcagcggtgacccctctgcccaagtgggtcttgttccgagaggctgccaagctaaatagtggttgtgggaaaagaacaaatatcttttctaatgattgatttccagttaaggagaggaatggaaagtaaaggggtaaggacagacgttcatcaagtcttaggaagtttcagggctgggagtatattgcaggaccaagccttagtttttccctgtctttccatttttttttctctttccttttttcctcatttccccactccctccttggtccaggttctcgcctgcagaaaggtatagtttacctctagttctcaaacttcagcgggcatcagaattccctggagggtttgtgcaaacacagattgctgggctccactcccacagattctaagtgtgtgtgtgtctgtgtgtgtgtagaggggtggtggacgaaagcgctgagattttgtatttctaacaggctcccaggtaatgcttgggaagaactgttgcttcttggacagcaacacttacaaggcaacgtgatcttgagctccacctcgaaggatgtgagctgggaaagttccagctcacagagatttagtcacttgagaaatggtccacttcctccaaggtgtttcttggatgccccaaagggatgaaaacaagaagtgaccgtgggcgaggaggaggagctggccgacctcctcggttgccagcccgtcggagctcaccagctaggcgagggcgggaagacagcccccgggccggcccacggatcatcagaaggcgcggacctggaggaggcgccccagaaggcgacgcctcttgcctcctgtctctcgcctctcgaaggaagtttgctcttaatttcagagccgggttcgccgtcggatcaacctccaggagctagcagcgggcgcggaccgggcagtttccgcgctcagcacaggcagctcgcggtcatgggc

SEQ ID NO: 3478 - DNA, 2300 bp, Homo sapien
tcacctgactcagtcaaatactcgctgcatgactttaacatctcctagcctcatatgcttttatctgtaaggtagtgataatttacctactttatataaatactacaaaaattaaatgaaaaatgtaagcttctaaacatttagcatataatctaatacttgagggatattattttctgtatattacgaattatgttttaaatatgacttcataatatgggaaaatgctcataatatacaatattaagatttaagctatatacagatagcaattacaattatagagttaatttaaatatttctgtaacctgttgatatgaatacaacactgcacaatttttctttctcattttccccttgctggttaatggcaagcccttagctctgtcttcccagtttctctttttttttaatttaacttttattttaagttcagggagacatgtgcaggtttgttaaataggtaaatgtgcgccttgggggattgttgggcagattacttcatcacccgggtaataagcatagtactcattagttatttttcccgatcctctccctcctcccagactccaccctccaatagacctcattgtgtgttgttcccctgtacgtgtccatgtgttctcatcatttagctcccacttataagtgagaacatgtggtatttggttttctgttcctgtgttaattcatttagggtaacggcctccagctccattcacgttcctgcaaaggacatgatcttgttcttttttatggctgcatagtagtccatggtgtatacgtaccacattttctttatccagtctaccactgatgggcatttaggttgatttccatgtctttgctattgtgaacggtgctgcaatgaacatatgcatgcgtgtgcctttatgacagaacaatgtatattcctttgggtatatacccagtaatgggattgctaggtcgaatggtatttctgtttttaggtctttgaggaattgccacactgtcttctacaatggttgaactaatttatactcccaccaacagtgtataaacattcctttttttcccgcaacctcgctagcatctgttatgttttgactttttaataatagtcattctgactggtgtgagatgaaatctcactgtggttttgattagaatttctctaatgatcagtgatgctgaggttttttttttaatatgattgttggcctcatttatgtcttctttaaaaaagtgtctgttcatgtcctttgcccactttttaatgtgccttcccagttttcctctgacattgctgagatgccccagggcatatctcatccacatttcattcccacagcacccaggctactgctggtgttaccttgtccacagcaactgagctggagttttctcagcctccaagactagtcctgtttttaaatgtgatctctgcacttcttggctgtggtacctgaacctaaactacaatattctttaaccgtacatgggaaattaatgctgcctgacttctactaactttcctagtactcctcctcttctttcatttcttttgttttggtcatttgtacctcagaatcaacaccttattttattctaccctgttttaaaattgtctttgtttcatacatacagttttgccatttatttttcgatgtgtttattgatagagacttccatctccttagatgataaacactttaggagaagagattaggtgttatttttctatagcataccctacaatatgcagcataattctaccatagacacaaagtataaactgaggacattctttttcacacaggctcaaagatgcactgaggaataaattgtgtaataggtaactataactcagcaagaaatttctttctttctttcttttttcctaactgagatatcaaggcaaagaaatttctatatggtaatagggcacactcttgcatgtcgacatatccctttcactcacggtactaccaccatccagccctaaaatagttgaaaggcagcaagcctctgatctgggctcctcagacctggtatattcctctcctccataggctgctgaggcgctgatctgagatgtgcttccataaggaacaaggcagtagaggaggagccaagatggccaaataggaacagctccggtctacggctcccagcgtgagagatgcaaaagacgggtgatttctgcatttccatcagaggtaccgggttcatctcactagggagtgccagacagtgggcgtgggtcagtgggtgtgcgcaccgtgcgcgagccgaagcagggcgaggcattgcctcac

SEQ ID NO: 3479 - DNA, 2300 bp, Homo sapien
ataacctttcctgattaatatagtcagagaagatccagtgccaagtttctgagtaagagataaaatagataaaatgagttccattaatttgtcagtagtgtttttcatattaaggatgttagcctgaggtctagctttttaatcacatttaatccagatatcccataagttttccgtttttccactaattctcctgtgagtcttttttaagcactatatttaactttcatccataaagttcctgcgctttctacaaatcatcacttttctcaacatcaattgaattgcttaatctaaccacacatcatgattttcaaaggcattttaattagagcaaaagttctaaattatgaacacctgtcttcctttaattgaactacacatgcactcgtcatgaaggaagaagggagatgcttctgcaactgcactgtttctagaaagtggactttcacaagaagggagaagcagagcttccctgattattttgattttgttgttgttgttgttttgttttgttttgagacgcagtctcgccgagacacccaggctggagtgtcatggcgcgatctcggctcactgcaacctctgcttcccaggttcaagcgattctcctgcctcagcctcccgagtagctgggactgcaggcgcgtgccacgacacctggctaacttttttttgtatttttagtaaagacagtttcaccatattggccaggctgatctcgaactcctgatctcaagtgatccggtggccttgggctcccaaagtgctgagattacaggcgtgagctaccacacccagcctttttttctccccccacattggaggaagagtttaaccttgaagggcttgtagagtcagataactgtcacttgttatttaaagttatagatagtaggcaaaagctttcaagccactgaaaaagaataatgcttgttttctttgatggattgttaggtagcatatataatgtgctgtatttaacacctgtcctttttctttccacccatccaaggcgtcaaaggccatcttaaatcccggctcctcaggaaatcatccccaaacacaccagctggaattgatatttttcttttccaaattcctatgtaaattcatgtcatttatttggaattgcttatagagagtttcagagcgttaaagaactggaaaggacctaggattcaatacaattctctcatctcgcagacgaagaaaatgaagtgcagaggagctacgcaatctacgtaagtcacatagacacacattggaggctatgaacctagtttgcccaattcccactgcagtccattggtttatgcctctatgccttcagatttacggtctggtattgctggttatcttctcaagagaacatgacatctcaacaatagtacatatagagatcagggaactttcaattcttcgttacttcttcagctcataatttatatgcattaaatgtcggataatttactggagactaactggctgtgttttaggtaatgattacatctattaatctattacttcgtaaatcctcaagttcagaaggtaacactggaaggggccaaggaggtaggaataaagcagcagcaaggtaaatagtaagagctgatgaccacaatcagaatgttaagctaagtttagagtggaaggtcattttcccaggagcaattacacttgcagttttatcctgcaaggatgaaaagtgtatgtttgttgtacgagagcggaagggtgccgaagttcatgtgaagttctgcaaaccaaagcctgatgaggatttccgccgggtgggacaggtttaagaggacgaactcatgagaaagaagtctgagcccaaaccccagaagccggccaggaaggtgtaaagggtgggccgaagccagggcagaagaacccaagcagaaggttgagcacgaggtggctgcgccgtcatccgggcgttgcccgggggctacgtcggaccgcggtgggcgccgggggggcgtggccggccagcccagggcggggcggtggcgcgggttctccaggccaacacgcggcggcgcaccctccctcgcgccgcgggcctccccgcgccgtgcacgtcctcgtcccgcgcctccgcccctcgctcgctcgctccttcccgccctccccgcagcgccggccgagccggcttcccctcagtctctcatgaatattgagcggcccctgttgtatttcccgagctccattgcggaagctgaggctcgccatattgtgcggcggcgccggcgtccgcggcagctgataccagagtcttgctccggccgcgg

SEQ ID NO: 3480 - DNA, 2300 bp, Homo sapien
agacttatctatatattccaaaatttacaaatatgtaatttgaagaaggtatactatatgggaaactgaaaatgcattagtaggacaaatatgtaatgattgagaagtctgaaatgcattagaactaatacatatattaatcacattttaaacattatttttagttgatctagttagtcctttgaaatcagtcataactaggtaagatgaagatagcctatctgaaatagaattgaaaattgaggaaaaagtaatagaataagttgtaaaagaccctcctagcatcttggagacatctaatttaacaagaagtttgcctgttgacttctggattaatagtgtgttacaaaaagcagattgagtattttgcatacagattgtctgatacgcactatcttaaaccagaaggtgatttcagagatgtttataggcatatcatgcatttttaaacagatcttcaagagtttcttcagtagtagaccacaggatttttagttttctaacttaaccaagctcctttctcttattttgtgctatttaatagaataatttcaataggcacgtctttattgattgctgtttatcttgttttacatacacagatctttgaactctggaaccaaaagcctttatggttacaaattagataggttagtttgtacacatggattcatttctggaatattgctgtctgacctagcaaaagatttttatgaaacatgaagaagttttacctgtttatagaaattatatctcattataactcatttgaccagtatctgatataggaaattaaccaatattgtttgttgcttctttaaaaatgaggtgaataaccaggcaccagcctatactcccagctactcaggaggctgaggcaggaggattgcttgagcccaggagtttgaggctgcagtgagctatgattgagccactacattccatggaggctgggtgacagagcaagacccatctttaaataataataatatgaaaaattaccttttaataaatttgagcaggagtgtctgatagtgctgaattggattccaaaattattgacacagtgtgctactgcatccaaaaagtctaacaatttttttaacttcttgtttaacaaactttagtgcctcctatctgcaagctactgcattaggcacttagccatcagaaagatgaacaagaaataggccttgtcttctgttgattatttgtggggaaagcgaacaaggacacaaattatacaaatgggtaaacgaactgatagtgaagctcggagaggagtagtcaagaaggtgctaatatcaagaattgaattttaaagtctcaaggttttaaattgtataacctaataacataatattagagagccctgtggtttatcccaccatctcctgtctccttgggctctttacatatcagtttctcctaatcttaatatatattcagtccccactttgtaattgttcctttctcttggaatgcacatatattcaggttccccatacttaaaaaaaagcaagttacagtctgattcatttccttttttataccgtcaaacttctcaaaaaaagaaaaacctaattttctgtatttcctttccccttccaattctgtttctactctgaaacacctccctgaacctgttttcttaaaggtcaccagatgtgctttcttgatctctacaactgtttgtgatattcagtgttgaacgttttgcgtttatagactcttctcccttggcttctgcattaccttgattccccttaccatttattctttctgaatctacattcctgattccttctacttaatttttcttataaatatctacatctctcatacctcactaccagattatatctatctataataatcagtagcgggttcagcaacaggtagggaatgtatcccctacccaccccagtcagaacatgttaaacttattttagacttattcatgtatttccaaatttaatttaatttgaagagtgtgtaatgcttgagaaacctgaaaatgcattagtgggacaaatatgtaatgattgagaaatttgaaatgcattagaattaaaatataaatcacattttaaaattaattttacatagcctagttggttgtttgaaatcagtcataactaggtaagactgggtcttggctttttctcttatttttcacactttttttcttaggctttcttatttattctcatagtttcacctaatgtgttacttacgatttgtatctctagaatccctcctgagctccaaaaacaaattgccagctgcctattatacat

SEQ ID NO: 3481 - DNA, 2300 bp, Homo sapien
taaaaataatgtttaaaatgtgattaatatatgtattagttctaatgcatttcagacttctcaatcattacatatttgtcctactaatgcattttcagtttcccatatagtataccttcttcaaattacatatttgtaaattttggaatatatagataagtcttttctatgtttaacatatttttgatggtgaggaggtagagaatgcatgcatttcccaaagctgctgaaccacttctgactaatataaacaaatacaacttcgaagtgaggtaggaggctacttaggagggtggaaccctctcagctccccatgcctccccgatccctacccactgtagttgaagaaacaactggccttattttgtacctacaagctctgatcttatataatgagaaggggcttacctgaagcattctgacttttgtctttcctgtgattagccctactctgaaatctataacaatttgtatgttgtttcaaaactgcaaaataatcctatctataactatctaaccttttataaatattaaactcaaaactggcctagaagtagaaaaaataatgaattaaagattattttaagttccaattcagaaagcacataaaggtcaacttatgaccacaaactaaatgttaaaagaacttaaattatgtctttcttagaccttacattttaaaatgttagaagatccttaagaaagtgttactcatcagtcttttaaattcctatatggtccaataaaccaccacttagaaaacatgcaggcacattcagaagcacaataatatgggccattaattctcaacagtctatttctgatggaatggagtacaaaactcaattggtatttatgtatgggggaaaacatccgtaaatttagtcgactctttcctaaactactactcagcctcaaaatcttttcggaggcaagctgctagcgggggaaaagaaaactgaaatgagaaaaactcatctccttgtggctgtcgaagcagaaaagctagttgacagtaatggtttagaaatgttggcagctaggatctactaccgtaaacaggttgcctcggttactatgtcacatttgaaagaacttagttaaccatggcagactggactgcgggaaactaccaaattatgtgtaacttcctatttttgtaccttaaaaagactcccttttaagaaaaagcccttaacctcattatttccttctatctgcagcattcctgctctccgcatatccctcaccgtgacatcctcgaggcttatgaagatgccgtctcccattctgtaaccctgctttagccgctacacgggcccctctttcctccccaccattttcctaaacctgccttgccccataaaaaccatcccggtgaagggcctcccctacttcccagcaaggcgcactttctctcttctgcagcagaaagatctgggccttctgcacttactgcttttagcctcctcaggggcagaggctagggacggggacagggccggagcctgggccagggcaggggctggggctggagccgaggccggagtcggagccgagtccagagccgaatccggggccggagctgggaccccagccgagtcccgggccggggtcgggacctggacctgggccacctccacctcctccttctccaggggcagcagctcctcctccgccatattctccatagttaccgcctccgtgccaagcccgcccggggacccggagcggggctcacggcggggtcagagaactgacgtgaatgcccacagggctggatccaaggagtggggaagcaagtggggagggcgggatgcgtgcaacagacaaaagatgaagaaccagtgaccaaatcctgttagtagaaaacagaaagccagaggcagcgattccagatgcccgtccgcttccctttccccgaggcgttacgacgccaccacaaactgcgcagaagcgtactggggacggcgtccaattgggtaagagggttcggtttctacggtgcgtctccggcccaccggccaaccaccaaaccgaacaaagactacagcacccaggatacactgcgcagtctgggggcggggccggagttcaagcctcggaggaagtaaatgcaaatctaagcgagcgctgtggggcggtgagtaggtagtgcggatgcgggcgcagaactacgtttcccagcaggcatacagttggtggggcggggtgtgtgtgtgtgttgggaggcgggggtccctctcctttggcttggggctccggagttgccactgccgccggcgctggtaaggtaggaa

SEQ ID NO: 3482 - DNA, 2300 bp, Homo sapien
actcaaacagcccatggaaaggctcgcaagggaagaactactggcatcttgccaacaaccagaaccaactaacagccaggcatgtgagtgtgttacctttgaagctgatgatcctgcacccctaatcaagtgacatgacagcagccctggcacatatcttcactgcaacctcaggagacccaaagccagatcaacccagaaagtcatttctgagttcctgacccacagaaactgtggagtaataaatgtttactgttgttttaagctactatgttttggtataacttatgcagtagcaatagatgaataacattatttaattcttcaaacattgacgattccttcttcaggatgtcttacaagcacagaccatgcttagaaattcttacaaaaattcccacagaatccagacactaaaatctgacccttttaatctggtttccagctggtgttaaatgacattaacatactgaatctagctttcagttaaccatctagtcatttagaaataaaaaatcatcatgaacgacagtaaaaaaaaaaaaaagaaatgagaacaagaattattggatgatgcacagatatagttagcatttctgtaagttatagtcagtgttatcccatttttaattgactgttgagccatgagtcaactacacattcaggaatactagataaaagctgtacgggacgatcagtaaaagggatttaggactataactcacagaagctccacagggataatctgttcccattaaactggggagaggttaaacacacacacacacccctccagatatatacttcttaactatagggggaggagttaatttccagttagtgcttcaaagtgccaaataatcatgctatctcttccccggggttctgaaacaagtaggaaacaaatagaccaagaagattggcgtttatcaacttaattaactaagaaaagctaactggaagcgcgcgtcttgttcttgagactaaattgggcttccctctcctgccctgatgcctagaaggttcggaccaagcccaagcagggcagccagaaagttcacgtttttctcctttctgtcccagtggatttatcgcggggggacagaagaaagaaacaagaaaggctcgaatgtcaagtaggcactaagagtgaaggggagagaagtacgggggacaggggactcgctagcatatgttttggggatctgaaacgcatcaaaattaaatgccccgaagctctacccactcagagctctggttattaaaagcctgaaaacaaagcaaaatagagcaaaacaactaatttctatccactggccacaccgcagaactgctgatactggcaacatgaagactaaagcaaaaataaaaacaaaggaaaagagtgttcgggtcacggtgtaggtgagggtgcgaaatgaagaacagaccctaattccaagtcagctggatggacaggcaagctcgtcagctgctagtaaaccgccgcgggcccgcgggctccgcacgaaccgaccagaccccaacaccgggcaaggggcagccccggaggcaagccgggccagaaccacaccctccacggagctggctcgtccccggacccgcccacagagtcgccccgcccaggtccgtgtgactcctgagtccccagtccggccggccgcccgcccgccagtatacttggggcgggggacgagggggaacctgcccagcaaaacgtcaacgcaccccgcagttcctaccttaccagcgccggcggcagtggcaactccggagccccaagccaaaggagagggacccccgcctcccaacacacacacacaccccgccccaccaactgtatgcctgctgggaaacgtagttctgcgcccgcatccgcactacctactcaccgccccacagcgctcgcttagatttgcatttacttcctccgaggcttgaactccggccccgcccccagactgcgcagtgtatcctgggtgctgtagtctttgttcggtttggtggttggccggtgggccggagacgcaccgtagaaaccgaaccctcttacccaattggacgccgtccccagtacgcttctgcgcagtttgtggtggcgtcgtaacgcctcggggaaagggaagcggacgggcatctggaatcgctgcctctggctttctgttttctactaacaggatttggtcactggttcttcatcttttgtctgttgcacgcatcccgccctccccacttgcttccccactccttggatccagccctgtgggcattcacgtcagttctctgaccccgccgtgagc

SEQ ID NO: 3483 - DNA, 2300 bp, Homo sapien
cgggaagctgaggcaggtggatcacttgaactcaggatttcgagaccagcctgggcaacatgacaaaaccccatctttacaaaatatacaaaaattagccgggtgtgttggtgtgcctgtggtcccagctactcaggtggctgaggcgggaggatcgcttgagtccaggaggttgaggctgtggtgaatcacagttgtgccattgcactccagtttgggtgacagagtgagaccctgtctttaaaaaaaaagtttgggagtaggggtaggtgggtagtactactgacattctggaggatagaggtcagtgatgctgctaaccatcctgcaatatacagggcaacccctaaagtgaattatctgaccctgaaggttaatagtgacaaggttgaaaaaccctatttaggttatgctttattcttagctaatgaaattactttcatttcagagttttgaagcaccatgttgttccgtgtcatctgaaagtatccaggatgcagatcaagaggttattgatattcttgtttactttgatatttttaatgaaattaagtcagttcctacttttaataaaaaataatgactgtagaaaccctgataatatgaaaataacaatgatgtctctatttaaatcaatatgtaaggttttatgaagtcatccaaaactattcagaaaagtatactttagtactttttacttttgtttctagtaaggttatctattgtgaacaaagagcatgaaaccagtggcccacaagtaatctgaattttgatttaatattatgacactttccctgtttatgcctagggttgccaaaatgcagtaggacattaacatgtttttacttcattttaaaaatcatcaataagatgaaaacattattcaatgaaaatgagagtacatgagtgtttatctttttacctgttgcttcatttcccaaccagagtcccctgactgatcttcatagaattttatgttgacttgtcctaagttaagatgagattcgtggaacactttgtaattgtctttttaaagactttcaggcaaagcaccgtggctcaagcctgtaatcccagcactttgggaggccaaggcgggtggagtacccgaggtcaggagttcgagaccagcctggccaacatggtgaaaccctttctctactaaaaatacagaaattagctgggcatggtggtacatgcatgtaatcccagctactcaggaggctgaggcaggagacttactggagcccgggagatggaggttgcagtgagccaagatcatgccactgcacttcagcctggctgacagagcaagactgtgtctcaaaacaaaacaaaaaactttcagactatattaattgatttttatttgtgacagtcaattgtatttttctgttttgaggtgctccttgatagaagaaagatgtctcacctctgatctaaagctagactgtattttcatttctttgtgtcacaatacatcagagaagtatttctgtgaagtgagaatggttttaagatctagatttcagtttatgatggttcataacaatcttagaaatctcaagaagaatgcttactgtcaagataaaaaaaatttgactcctaaaatgaagtgaggattggaatgagaatgaacttactttaatgtctaggtatttggctctgtgcaaggagcttcacctagcttatttcatttattcctcacaaaaatcctaaaggaaatagatattaaagattcctattttgtgaattaacaaactgagacccaaagttgttaaataatttgcttgcataggttatggaggtaagaagaaaactattttgaaaaccacgtgtgtgtttataaatctttgttcttttactatgctccttcagagttttataaaattttttctttccataaaccatctcaagtgaattaattaagaattaattgctttcctctcttgtcagtctgcaaagtaactcaaaatatttcactggggtcttttacactttagatgcagatagtagaagagcttcatgctgcacgtgtgggaaaaagtgtggatttacctggagagttaatgagtatggaaattgacttagaagatgatgtacattcctcctctggtataccctatatgttgatgtgtatgctcccctatgctttcctaaaaattaatgtgccaatattcaatttttataatatttagatgaaaaatgttaaaatgtgctcacttgaaatgaatgataaagtaatagtttattttttaggtacaggaattagatccaatatttgtcttattggttttaca

SEQ ID NO: 3484 - DNA, 2300 bp, Homo sapien
ctataatagagatacatgtttctaaattgttttgaaaataaaatatttgtttgttttatatataattaaaatatatacataaaatgtttactgtttatggcaatatactaattatatgtataataattactgttagcattctaaataaagtctgtaactatttgttttaaagaaacaacacccttgaaagagagctataaggaggaatctacaaattctggactgtccattctgcttgagagcattgtatctgatcttgaaaaatctcttggaacaggtttatcttcaatattagaaacagaaatgaaaattgcttttggaaacctttggatggaggtgattagttgaactctattagttgaaaatttcttttttattgctgaagatttgttatcttaagaaatattacttgtataaaatgcatacgcttcattgaataatctgtatcatgttacatttttcttcaagtttttgaaatagttttttgacagttaaatgatggacatttcttaatggttaggaatatatgttattcttttttttgagcaaacagatatttattttgcatctgctgtgtgtcagatgcactgtcccatggtgcttaaattgaatgaaaaaaaacttgtctatttaatttgagtcaaaatgtctaatataaggaatctctctagcaatatgtattcagaaaaagaagtatgtatttttgcttgtgccatgtaaatgtaagaatcagagtataagttgattgtattagtaagatattttgaaatttctttggattcacacctttttgacaatcagtaaaactctaataataatggtttcaaaagttcagtgttttttgttttgttttgttttgagacggtgtctcgctcttgttgtccaggcttgagtgcaatggcatgatcttggctcactgcaacctccgcctcccagattcaagtgattctcctgcctcagccccccaagcagctgggattacaggcatgtgacatcacgcccagctaatttttgtatttttattagagacgaggtttcaccatgttggtcaggatggtcttgaactcctgacctcaagtgatccttctgtctcagcctcccatagtgctgggattacaggcgtgagcatttatagctaggagaaacatgattttgcatcaatcatagcttgtatctattccagctgttctgtgagattctaatatttgccagaacggtgcatttgctacttgattatattgacaaagttgaaccaaaatgatgacgaatcatcagaagatactaggagtgttgatatctcatagtagagataaggaaagtaattgtatatatgtgagtgattcagaaaaggaagtgctgacatcttatagaattaaatgatcaatgtttttaataggcatgtctttgcaagagtgtaacaagtgacagttgtcactgacatcttttttcttctctttttttttgagatggagtttggctggagtgcagtcgcgtgatctcggctcactgcaacctcctccttccggtttcaagctattctcctgtctcaacctcccaagtagctgggaatacaggtgtctgccaccaggcccagctaatttttgcatttttagtagctatggggtttcaccatgttggccaggctggtctcgaactcctgaccttgtgatacgcccacgtcggcctcccaaagagataggattacaggcatgagccaccgaacatcttttttctatactgattttcacccagttacatgaaataattagattaattttcttatagcgatgactgcgttgacaagtagattgaaggaccttagctgataaaactatgtttcctctgattagatgtatgtttttcttttttgcacagtttctgaaactattaagattaatactaacatgagttttacaaaagcaatttgcaatggaattagcattttaatgttatgattgactttacatcttttaatttaaaaagaatccaactaattatattttgctcaaaatatatgtaggaattcctaaataggtactttttaataattggaataataaatctagagatgttaatttttttctacatactctttagatcctgtacctgaaaccaccatggactctactacatttactacagtgctttaaaaaacattggttggctgtatttggattagttatggaaaagaacttgcttttaactattgagagcctatacaaaaatctccgtaaaggtatgaatcttttatttttctctttagcagtgttgtattaagtcagactagcagatatatttcc

SEQ ID NO: 3485 - DNA, 2300 bp, Homo sapien
attttctaaaattgttgccttggacccttcctatttttataaccagacacagaaaatcaataaaagtttgagcccagtttatagactattgccagcagtagttcaggttttaaaaaaatgatgagggattaatctaggggcatgaaggagaaaggatagattttttatttatgtctatatataaatagacatttatatttacaaaggttgacttagcaggccttagtgattgcttagcaagattagggaaaagaaagaatttgagaataagtgggattctgacatgtgtgactcattagaatgtgatgccatgaatagagatcatgaagaggatgcgagggacacatgttagacttcaggaatagaaaaaggaggttgagaagaagccattagaaaagtcagaggacaataagaatctaatcatgttgtaaaagctacctaaggtaggagaagaaagtttgaaggaggactaaacactgtcaagttctctgggaggtcatgtaaaataaggtttagggatatattctttacatataaaggatttaatcagcatttctatattaggcttgttattaggcattgcttttgggcctttctctttcacagtcattttctcttaattatagtttgtacattagaacagtttttttacttcagtacagcctcaatgtaagcatcatccatttgtgatatttggatcccttcttcccataggttgggatgaggttttatgtaccttgtaattcataataatagataaggttagataagtctaaccttattttttattcttaatattcatagtataaaagtgatatgaaagatgcattcacaactttagtaacagtggaaaacagcctgtcatagtgtaaatctgttttatagtatgacataacttgtcatagtataaaaaggatggggtttatcttcataattcctaatctttattttagttgtattgccttgggcaatgcatatcttcttgagtttcaatatttttatctataaaatgggtagataatatcaccctcactggactaaaagagatgatgtaaataaagtacctagtaatacctaggtacatagtaaacatctaagtggaatttaatcataaccattgataatgatacattccctgccttttctcaaaatagcctacgtatgttgtaaccacactcaggcctaacttttgatatagctttttcttaatagcttcaagtagctagcaaaatctttttctcaattacttgttatatggctttttgcttccactagcaacagaaatttccattagaaattttacctatccatgtgttctggccatctggaccagcacaagtgggatgagcaaactaggccaggtgctgaagttgctacctgttcatttggcagttcctctcagagtagtctttactcttccaattccatatgatcatatcctttggaagtggcaaaggctaaagtaattggaaggaagccatcaaggaaaactcatacatgagaacacatgtgtaaagtagttctcttacaatcatttggaaattggcagctttgttcatttctccctctttagtattcctgtatattctacttttgtgaatatttggttgtttttagtaatgtttcatttctgattactattttcttgtgttttgatgtaattttgtctagaaaaccactctataatacctataaggtaatcctaaagaaatattctttaagtgtttcttgtaattgccacttttttcctgtcaagtactttcagagaaactggatgaatctatatctgcttacgttttgctggcattgtatgaaggatacctgtacatatgatttagttaggtttgacaatttcatgaaaatagtgggttaaatgtattctctgttaattcacactattttaaatttatagcattcttttaaaagattctatacttaatataaaaataattatagattggttttttcttctgctgaggtcttgatttgcaacatgtttttcaaattgttaaaactgagctttttcttacctaggctaattgtgtaggcgtagttgtctcatcattgagtggagatggaagtatgccagtaatttgtgtcatttggaaagtgttggcttgagttaaagttagtgtcctataaatgtcatatataggtgaaggatactcagtgttgtggaatagctcaggaacaaaggtacatcagatgtggtctttggctaggtttctgtagctaccttttgattttgcagaaaaagccaccacgtgagaatggccataagcagataagtagcagttcaa

SEQ ID NO: 3486 - DNA, 2300 bp, Homo sapien
gtctttaccacactgaacattaaatatttgttgaataaaagatatgtaagtgttggcactcatatatttcttttccaaggtttgtggtgattatttactgtctagaatggatgttaccagctgcatctcttaccgaaattttgcaagttgtatgggagactcccgtttgttgaataaggttgatgcttatattcaggagcatttgttacaaatttctgaagaggaggagtttcttaagcttccaaggctaaaggtaaggagtaaagtctataaacagatatatactatctagttccaggcgtggaatcttggtctgtgtttcaagcaagtgagtaatgattatgaaataatacattgaaattatattgttattcttagcagcgtaatgggtttctccctaccagtttgtttactttgtttttgattcagtaatcaaattccttacaaattcctggttccttacaaattcctggttccttacaaattagagtaaatgtatggaatgaattgtgcatctgtgacaactttattatgaaattgggaattaagctgagaactaggagcccaacactgatccatgtcattgtttttcccaattctagttggaggtaatgcttgaagataatgtttgcttgcccagcaatggcaaattatatacaaaggtaatcaactgggtgcagcgtagcatctgggagaatggagacagtctggaagagctgatggaagaggttagttttaaagtaaatgggattcaaccatttttaaaaattattttgctataacatgaaggattccctttcacttttattttataaccatgaccctaaagaatttaaattttgctataggtacccctaagctgagaaacagggggggtgtccaggtgagctgaatgaactgttcagtttggtcttctgcttttctttttttatttctttgcttattatgtgctgttaactttctttaaagtagcatgtaatttgctttagaaatgggaagtggtactgaaattttctgtagattcttaatttttcttcacaggtttttgctttaaatttgacaagtaggtaaaagcttctaatggttgttcctccccattgatttatctccccataggtttattaacaaaactaggatacccaagactgaagaaacaagaagaaacctcaagtgtattgacacgtaaagaagcagcagtcctgccccagttctcctaagaaaaatccgctgtgggcagagaacgatgatgatttaatggtgtttactcctttacaggattcttgtctttaaagctgtgtgtttttcaatggtgttgttcatacatatagtcactcacttaacttgggctacttttaaaaaaaatacacaagataaaattgatggagaaatggtgggaattgaaaacacgcaggtggagcagtggagtaaccttgagtttctctctccacttaaacctttcggagttcctttatgagggcttaccaaatctgttaggcctgcagaaacactgtcatcattatggtctaaaagggctaacagattatctttaaattctatgattcccacttgaaagtcagatgcatttgccatgtatttgcatctgtctcaatggagatgactctacagcttgcttgaatttttgcatttgttttttctttgtttttcttgacattgcttacaggaaggaaatatgtttatgcaaaccagaccacttatctgcaaaggtgtaaactatattcagtattttattgtaaatatgtatattctttaagagtatatattgtactagtgctttttttcttactgttatatgatagaagctatgaaaaaaatgaagatttctttcaagccaatcaagccaacgactcttcagccagtattggaagattttgtatttgattttggttttttgtttttgttttttaatttttaccaccatgacatgtatttttctttacctccggatcctgccagagtaatatgtcaagaagctcaagaagcacactggaggttaccttgaggcgtttgtgtaatctgcatactagtggagtagccatggtgaccgtagccacatgggtgttctgttgctgttttgcaggttcaaaccttgtactactcagctgatcacaagctgcttgatgggaacctactagatggacaggctgaggtgtttggcagtgatgatgaccacattcagtttgtgcaggtacacattgcacagtctgaggtaacctcaggttaaaatttgactagagaatttgatagcatacttaaattttcctttaataaaggaaagtgga

SEQ ID NO: 3487 - DNA, 2300 bp, Homo sapien
attaaaattaatatttttcttaagagttaatcacataacttatatcctcaattctgtgttctcctaaacttcctgtgctctctaaaagtattccttctagaatttaatgccagtaaaaagtacttttggaaaacaggcatttaatcccctaatgcatgggggtcagtaaacttaaggcctactggccagctgcctatttttataaagttttattcaaacacagccatgtgtgttcatttacatatggtctacactgctttccagctacagtgacggaattgagcagttgtgacaaacagaatggcctacaagcctaaaatgcttttactatctggccctttaagaaaaagtttgatttgctagcccttcttctaataccactcctttgttcaaaaatccttccttaatttacagtacatatccctgcatttagtttctagattttcccttatatagttgctgtctttccaaaactatttcctagttatcttttctccaaccaaattaaattgtttgcagcatcttctctacttctgtctgcattcaacatcaacatcatctctcctgtagagcccagttcagatactgcgtttcatgaagccttaccaaattattctacttgaaaatacttatgtgaacttacatagcatttcaatttgttgtacctctccttaaactaaaacttacatatctgtatggcataattagatgtttatcatttgtatacgtgttattaccactattaacatttgttgtattaagacagtgatttttgattctttgtatcttcacatagtctttaccacactgaacattaaatatttgttgaataaaagatatgtaagtgttggcactcatatatttcttttccaaggtttgtggtgattatttactgtctagaatggatgttaccagctgcatctcttaccgaaattttgcaagttgtatgggagactcccgtttgttgaataaggttgatgcttatattcaggagcatttgttacaaatttctgaagaggaggagtttcttaagcttccaaggctaaaggtaaggagtaaagtctataaacagatatatactatctagttccaggcgtggaatcttggtctgtgtttcaagcaagtgagtaatgattatgaaataatacattgaaattatattgttattcttagcagcgtaatgggtttctccctaccagtttgtttactttgtttttgattcagtaatcaaattccttacaaattcctggttccttacaaattcctggttccttacaaattagagtaaatgtatggaatgaattgtgcatctgtgacaactttattatgaaattgggaattaagctgagaactaggagcccaacactgatccatgtcattgtttttcccaattctagttggaggtaatgcttgaagataatgtttgcttgcccagcaatggcaaattatatacaaaggtaatcaactgggtgcagcgtagcatctgggagaatggagacagtctggaagagctgatggaagaggttagttttaaagtaaatgggattcaaccatttttaaaaattattttgctataacatgaaggattccctttcacttttattttataaccatgaccctaaagaatttaaattttgctataggtacccctaagctgagaaacagggggggtgtccaggtgagctgaatgaactgttcagtttggtcttctgcttttctttttttatttctttgcttattatgtgctgttaactttctttaaagtagcatgtaatttgctttagaaatgggaagtggtactgaaattttctgtagattcttaatttttcttcacaggtttttgctttaaatttgacaagtaggtaaaagcttctaatggttgttcctccccattgatttatctccccataggtttattaacaaaactaggatacccaagactgaagaaacaagaagaaacctcaagtgtattgacacgtaaagaagcagcagtcctgccccagttctcctaagaaaaatccgctgtgggcagagaacgatgatgatttaatggtgtttactcctttacaggattcttgtctttaaagctgtgtgtttttcaatggtgttgttcatacatatagtcactcacttaacttgggctacttttaaaaaaaatacacaagataaaattgatggagaaatggtgggaattgaaaacacgcaggtggagcagtggagtaaccttgagtttctctctccacttaaacctttcggagttcctttatgagggcttaccaaatctgttaggcctgcagaaa

SEQ ID NO: 3488 - DNA, 2300 bp, Homo sapien
agagaagcacataatccacaatacttataattataattcttcataatttcaggtctgtggccatgaaatgttagcacacagagcagtgctagcttgctgcagtccctatttatttgaaatctttaatagtgatagtgatcctcatggaatttctcacgttaaatttgatgatctcaatccagaagctgttgaagtcttgttgaattatgcctacactgctcagtaagtacatttgaagtaaaccatataattagggaatatcttcagaaaattccaagtcttgctacatatatttaaattaagtgtgttttaaggctttggtatcataagtaactttttttttaaataggttgaaagcagataaggaattggtaaaagatgtttattctgcagcaaaaaagctgaagatggatcgagtaaagcaggtagagtatcagaagtaaataaaatcatttatggagtcttattttgtgtgattgcaatgctgaatttgtcataaaacatcttgttagtttcaaggacttgaacatgtcccttttttccctcagagtagtcaatatgttattttaactgtttggctataataatgtagcaagatcacacttcttctcagataatttgggctgaagtctgaccctttcagcaatcttctctggtagggtggctatgtcagcctttgatagcatgaattaaaattaatatttttcttaagagttaatcacataacttatatcctcaattctgtgttctcctaaacttcctgtgctctctaaaagtattccttctagaatttaatgccagtaaaaagtacttttggaaaacaggcatttaatcccctaatgcatgggggtcagtaaacttaaggcctactggccagctgcctatttttataaagttttattcaaacacagccatgtgtgttcatttacatatggtctacactgctttccagctacagtgacggaattgagcagttgtgacaaacagaatggcctacaagcctaaaatgcttttactatctggccctttaagaaaaagtttgatttgctagcccttcttctaataccactcctttgttcaaaaatccttccttaatttacagtacatatccctgcatttagtttctagattttcccttatatagttgctgtctttccaaaactatttcctagttatcttttctccaaccaaattaaattgtttgcagcatcttctctacttctgtctgcattcaacatcaacatcatctctcctgtagagcccagttcagatactgcgtttcatgaagccttaccaaattattctacttgaaaatacttatgtgaacttacatagcatttcaatttgttgtacctctccttaaactaaaacttacatatctgtatggcataattagatgtttatcatttgtatacgtgttattaccactattaacatttgttgtattaagacagtgatttttgattctttgtatcttcacatagtctttaccacactgaacattaaatatttgttgaataaaagatatgtaagtgttggcactcatatatttcttttccaaggtttgtggtgattatttactgtctagaatggatgttaccagctgcatctcttaccgaaattttgcaagttgtatgggagactcccgtttgttgaataaggttgatgcttatattcaggagcatttgttacaaatttctgaagaggaggagtttcttaagcttccaaggctaaaggtaaggagtaaagtctataaacagatatatactatctagttccaggcgtggaatcttggtctgtgtttcaagcaagtgagtaatgattatgaaataatacattgaaattatattgttattcttagcagcgtaatgggtttctccctaccagtttgtttactttgtttttgattcagtaatcaaattccttacaaattcctggttccttacaaattcctggttccttacaaattagagtaaatgtatggaatgaattgtgcatctgtgacaactttattatgaaattgggaattaagctgagaactaggagcccaacactgatccatgtcattgtttttcccaattctagttggaggtaatgcttgaagataatgtttgcttgcccagcaatggcaaattatatacaaaggtaatcaactgggtgcagcgtagcatctgggagaatggagacagtctggaagagctgatggaagaggttagttttaaagtaaatgggattcaaccatttttaaaaattattttgctataacatgaaggattccctttcacttttattttataacc

SEQ ID NO: 3489 - DNA, 2300 bp, Homo sapien
tttgggaaaggacttttttttttttttttaatcacttgggttgttgcaagttaaatgaaaaatgtttatgtggaattgcatttgtgttctttttttatgtaatgggaatatttttgccatttatgtcaaatctcttgaagatcaggacttgttttacatgatctgctctacctagatcaatgacagtctttgattattctgaatatctaacttaaatttatcattgttatagattatgatgcatcattatcacagaagaaattcgtgtctatagcttttaaggacttgattacatcattttcaagcctgatagttttggaatcaccattagagcttaagacacacctgccttcatttcaaccacctgtcttcataccctgacgaagtgcaccttttaacactcctttgtccttggattacttaagagttcccagaaatacatttgccaccaacagagtaggtaagtgaatgttctctgcctagtccagtattaagacacattgtttttctgaagacggatgtcgagtacagtaaacctttcatactctttttttaaaggcagagaagtcagtaatcatttgagtataaaaaacatcatatttttcttttctatattttgactttaaataaatcagtaacttcaaattaaaatttcttactgcctttttttttttccttaaagagataagatctctgttgtccaggctggagtgcagtggtgggatcatagctcactgcagcctggaactcctgggctcaagtgcttctcctgcctcagccttcctagtaactgggactacaggtgtgcgccaccaccatgactgcctaatttttacattttttgtagagacaggatttcactatgtttcccagactggtctcaaactcctgggctcaagcaatcttcttgccttggcctccctattactgttctttattttattttatttttttaagatggagtctctctgttgcccaggctggagtacagtggcacaatctcagctgactgcaacctttgcctcccaagcaattctcctgcctcagcccccacaagtagctgggattacaggcgcccgccaccatgcctggctaaattttgtatttttagtagagatagggtttcaccatgttggccaggctggtcttgaactcctgacctcaaatgatccacctgtctcggcctcccaaagtgctgggattacaggtgtgagccatagcgcccagcctatcactgttttttaattatgcattttgtgtagtcattagtcagttgtttataagtaatggtaaaatgcaaaaaagttgtaagttcccatttatatttatataatctgatgagataagtgatttagaatatatgaaagaaaggaacagaatataagttcatctttttaaatcactgtatatgtttcaaaacatttataaaaataatttcgtagatacagtgacaagactaatcagactttttaagtttgtgtactaggcaagggaggaagacattaggcaattttctgcatataaatcttgattatatataattttgaagactagaagcaaattgggggccctttaagacaactgaaaaaggctaggattaggataagtaacagtttttctcatttgtgggtaaaggaatgacaggagcccaaatccaaggaaacctatatgtactggctatttcaccctttcaggcttttagattacttattatatgggtttgggcaggatggagtttcgtttccttcccttcccttcccttcagaatgaatttgcttaatgggcatgggaacctggccaaaattgtcgagatagctgctactgtttgaatcctttaaaagtcttatgaccaaagtattagggaacaaagacttggacattcaacacaggtgttgtttcagctaagtttttgtgtgatgaaatttttatgtgttgtttataggatggaatttgagaataaagagactgtattactctttagcattatatttttaaaaccatcagttgcaagtaaaataactcagctttcttttcatcatctagccaaatttataaggaaaaatgattcccaatggatatttgatgtttgaggatgaaaattttattgagtcttctgttgccaaattaaatgccctgaggaaaagtggccagttctgtgatgttcgacttcaggtatttaaaacttaattcaaaatttatagaattttttattactaaaagccataagttcttagatttgcttatttctttttcataggcatttaatgaaatgattttttaaaagaatactgagaaatgta

SEQ ID NO: 3490 - DNA, 2300 bp, Homo sapien
gatttgggctggcttttaaaatcaagtagctttgtactctgatcagtagatattaaagagatgaggttcatattatgaccttgatgtactaaaaatcaggtactgtcatggaattagagtaaaaactaaataaaaatcaagcactaaatacaggattcattttactgcaaaactcataataatattgtacaaatttgtctgatgcaaattgccccaaaaattctccagtgttttctccaagggctgcagtaattttaaccatttttttccaaaataaattttaggtagatcattcaatttgtcaaatatagtaagtggataccatttttattttttgttagatcaagtttacaagtaaaaagtgagtaaaactggtcaaagtttaaaatagtaccttcatattataatgtttttggcttttcagaggatgcattttaatataacaatttgcatggggactccttcctcttattttaagagcagcttatgaaactgaagttaggagttgccaactatgcctgtgaattgaccatgccagtataaatcatatatatatgaaaattttcttagtttgagccaggtcttggctgaaaatgtttgaaggtttctttaggatagtgtgttctctctgtgtagaaagaattatgtatatttggaaaacatttgttagaactagtttcttagagaaaagccaaattaactaacctagataaaaggtagagcagaggaaatcaatattacctaatgctgtgatatagttttgatgcaagggtaagcattcacaacaatcccaacccgaattggcattattgggtttccttgaaatgaaacctgttacagagagacctgttaggacacatgttgaactaaacatagtaggtttgttgaattcgaactggaccagcctgcagtggagtcctgtggtaagtgattattcactttgacgtaattgttagatttagaattgttgtattgatgtataaggcaaataatcttaagatatccataaaaatgaatatatttgcacgtatttcaggtaagttattccttagttctggtttccagagttaatagtggtgtaatagcagttcaggtgattacaaaataagtaccatcagaatttgacactagtaattgatgatgtgaaaatgagggagggagaataggtaggaggactgattaccttgaagattaggtttgaaccagaatgattccattggtagtttattactgtgtatgagaaaaatgattatacaaagcacaggcatcagtattttcccttctgtttagtttattccaacaaattactcatctttatgttcaagtttttaggctagtcctggtagagaggagatgggatggatacaaaagatgaacaagacagaaggtttgcccatgagtcaaggaagataaacaagtatatataaatacagcatgaatataaatacagcatgaaacagaccagctggaagatcataaatacccctcagatagggttctaaatgtggaggatgaggagaaactgcttcccaactgggagcatttggcagaggctctatggctgtaagatttcctctggcagaggttgggttaagggccttccaggtagagagaagaacttgaacaaagttaacagagcctgggaagtgcagagttcattttgaggaacagtaacatagtatatatgcttgggaataatgcctaaggttgcttgctggctcaaaacagatctcatgtttgcatattagttggaaattaataataaagaatattagaattaaacagtattgacatttgttttgtagtcttgtgcttttatacctctcataaacataggtcattagcccctgccctttgggaaaggacttttttttttttttttaatcacttgggttgttgcaagttaaatgaaaaatgtttatgtggaattgcatttgtgttctttttttatgtaatgggaatatttttgccatttatgtcaaatctcttgaagatcaggacttgttttacatgatctgctctacctagatcaatgacagtctttgattattctgaatatctaacttaaatttatcattgttatagattatgatgcatcattatcacagaagaaattcgtgtctatagcttttaaggacttgattacatcattttcaagcctgatagttttggaatcaccattagagcttaagacacacctgccttcatttcaaccacctgtcttcataccctgacgaagtgcaccttttaacactcctttgtccttggattacttaagagttcccagaaatacatttgcc

SEQ ID NO: 3491 - DNA, 2300 bp, Homo sapien
acataaatagcaaattccagaaataaacgattcataagttttaaattgtgcaccattctgaggagcacagtctgctctgtccctgcccagattgccattagccagttgctgtctgggttgtcagactgttgcagtgtgacagtgcttgtgttcatataactatcattttatgtaataataccccccaaatgcaagagtagtgatgtaacatttttgggccatggttgacaaaatcttggaaagtgaaaccaaggataagggggactgctatattaagagcaaaatcttacaacataatgtgttactttaagaggtagaaattaaccatcaggttccctgaaaggcataaatggaatgcataagttatgctattattcatagagaaggtaataagtaaatttgaaattccatacaaagcaaaaatacaatgagtgtgggcacactgtagctttaagaaaagtgttgactgtttcaggtcacaaagacactatttagagtatagcaagtgtgaccatgtgtccaacaggccagcagtcatgtgtctacgcagagtgggcaattcatactctcccactggaaggatgaaacccattgtattaaagagcttaaaagtacgtaccctgatagtttcatttgtaagaaaagtaaacattgctgtcagttattatcagcaagacaaaacaagagcacagtgtcaaatgtcagtctttttctccttaagaaagatataaaaaatcactcgaatagacatcttagttcttgtttcctcctacaattaattgtccgggggcggggggacggggtgcgggcggggcgagggagacatacaagaaatctgtgagaaaaaaaggggcgggggaataagtctccttgcctcaagattttagaaaaaaagttgtaaacctattgcagatgaaggctcccacaatttatttttcctgcttctataagcataaatagttaatgataaaaatggtaagaggcattgacaaagagctcctagaatgtctacaaattaaggtgagtgatcaaacacaaggttaggcctagacagcttaagtgtcctccacaaatcaggataagcgttaacaggacattaacctggaagcctttaccaaactctaatttggatataattttacctcactaaatccctcaccttcaatcaaaactcctttcccacgtgcccttcagagtccacgaagttgctgccagatcccagcttaaatcacgtttcgctttcacagatctccctcccgggcaaggtggtggggtggataatgaagtttggcacctggtataaagggccccagtaggttaggataggaactaccacttctcaggtgtgttttctttttccggaagagggcaagaccagtagagaactgactcagcgtctccgacacgaggagagctgcacgcagacaaaacagacccggggggtgaaaagtggaagtaaactggtgtttgtggcaccactgatttacaccttctctgacttctccaatatttttttccccaagtgactcaatcttctcacccaaaccaggccaaatgaggggttagttgttcgacttcttctcagagtgcctctcttcttcctcacactctccacgcctcctctccgcacccgccacttcccccccgacccttaagttaagggctcatgcccaactagatcctaatgtccacgacgagcagctccagtctagggggggttgcctagaagtaggtctgacgccgagcaatctaatctcccacgtctgatctctcaggctattgtgcctcgaggggaagtcagaacaggtgagggcggcttgagggaaccagttccgggacaggcaacgcacagggcggcgaaagtgagggtgcggggcaaggaacggagggagggacaaaggcgcgataagaggaacgagggcgccccccgagcgccgcctatctcctcaggatcaccttgcgctgacctagttacaccgagaaggaaggaaccccagtagaccagggaggaaggcggggcgggatgtgggcggggccgcgggtggggcggggcttagagtgggatctttatggagctcgcctgtgatttgcagatggattcgagacggaagcgggctgggaggcgtcggcggcggcagcgcacgtggtgacgtgcgagggggtgcggcgcgagcggtcggcggcggcggaggcagtgtctcccggtcgcgcgtggaggtcggtcgctcagagctgctgggcgcagtttctccgcctgctgcttcggcgcggctgtatcggcgagcgagcgagttcccgcg

SEQ ID NO: 3492 - DNA, 2300 bp, Homo sapien
tatgaataatagcataacttatgcattccatttatgcctttcagggaacctgatggttaatttctacctcttaaagtaacacattatgttgtaagattttgctcttaatatagcagtcccccttatccttggtttcactttccaagattttgtcaaccatggcccaaaaatgttacatcactactcttgcatttggggggtattattacataaaatgatagttatatgaacacaagcactgtcacactgcaacagtctgacaacccagacagcaactggctaatggcaatctgggcagggacagagcagactgtgctcctcagaatggtgcacaatttaaaacttatgaatcgtttatttctggaatttgctatttatgtcacaatacttatgtcattcacctcacttcatctcatcatgtaggtattttatcatctcacatcacaagaaggagaagggtgagttcagtacactaagatgctttgagagggagaccatacataacttttattacagtacactcttaaaattgttttattttattattattattttttgagacagagcttcttgtctcccaaccaggactataatggcacaatctcagttcactgcaacctccgcctccaggtttcaagtgattcttctgcctcagcctcccgagtagctgggattacaggtgcccgccaccacgcctggctaatttttgtatttttagtagaggtagggttttgctgtgttggccaggctggtctcgaactcctgaccccaggtgatctgcccacctcggcctcccaaagtgctgggattacaggcatgagccatggcgcccagcctgttctattttattattattgttgttaatatcttactgtgcctaatttataagtgaaactttatcataggtatgtatgtataggaaaaaacatagtgcatttagagttcaatactaaggtttcaggcatccactgagtgtcttggaacacatccaccaggcataagggggtgggggtgactactatacttaggtaagatttatttggagagtgcttaataaaaattatgaatttcttgcatacctattttgtgtcaggtcctgagaaagataatcaggaattggtgtcaatctgccatcttttctttattcaccctgatcctgcttcagatgttgtctccatccttaactgacttgtgttttgtttattcttgatgtattagtttgctagggctgccataacagactgaatggcttaaacaacagaaagttgtcaagcatgatggcttgcacctataagcccagctactggtggtggggagaggatcacttgagcccaggagttcaagactgcagtgagctatgatcgtgccactgcattcagacaacagagtaagaccttgtttctaaaaaaacaaaaacaaaaaccctccagaaatttgtcttacagttcggaaggctagaagtctgagatcaaggtattgtcagggccctattccctctgaaggctctaggccactctcctaacttctggtagttccttggcttgtcaacataactccagttttcacatgttctccctgtctgggtatctgttgttcagatttcccctttttctgtggacaccagggttaattgaattaggggcccaccctactccagtatgacatcattttaactaaacctgcaactactgtgtttccaaataaggtcatattttgagatactgggggttaggactttaacatacaaatgttgagggaacacagctcaactcataaaaccttagttcattttttaagtgtggtccactgaacacattctttggaatcacctgtgtattcttcctagaaatgcaggtccttatgtgtccacaattggggggttcttggtctcactgacttcaagaatgaagccatggaccctagcggtgagtgttacagttcttaaaggcagcgtgtccggagtttgttccttctgacgttcagacttgttcggagtttcttccttctggtgcattcatggtctcattggcttcaggagtgaagctgcagaccttcgcggtgagtgttacagctcttaaaggcagtgtggacccaaagagtgagcagcagcaagatttattacaatgagtgaaagaacaaaacctccacaggatcaaaggggaccccagcgggttgccactgctggctgggcagcctgcttttattctcttgtctggccccacccacatcctgctgattggtccattttacagagagccgattggtccattttacaaagagctgattggtccgttttgaca

SEQ ID NO: 3493 - DNA, 2300 bp, Homo sapien
acaggtcttcttaaggaaaaggtgattttgaatggagttagattgttcccagcccaatcttcaggaagctgtgtccctgtcaggggaaaaatggcttacaaatagtgctggtaaaaaacatggagccacatcacccagatatctgtgggaaacatctcaaaccagcacagttttcagacagacaaatgaggggtgaaggactagcatcattatagtgcctatgccaagagccacagggcaccagaaataccacaaggtagccagagagaccacagaaattcaaatcgctgtctgacaaaccttgggaaccttctgcattagttgggagaagttgtggggagcaggatgcatgtggttctagctccctctatttcatccaatctgtaggattagcatctcattgctgttcttgatagctcattgggcatggcctggggaaatgcaggtaacactttagataaaatgtctagaagtcattgaatagtcaatccctttcttcattgtctccacctccagcctccctctcttcccaatcaaatatgaggaaactgaggcccaacaaagttgaactgtcaaaagttctgaggcagtgcctggtcaaaatgagaaaggaacacagacatttccatttctgtttctactcagctctcctaatttcaagtccagaattttagccacaaaccagacactactgcaaataaactcccagaaggacattactttgtatttttctcaagttgatttttatgtcatttggctaagacacagaattggatgtggacaacaagctgcgtgtgaagttgtaactcttcctgaatcaccaggtgcaccactccacttgggcagcagctcacccatcaataggacaagccctactaggagatggtggcagggatttgtctggatgctgtgtgatcaacaacgacacaacaagtactggttttcttccttcattcccagtctagtatacctcctcttgatagtgtcacctgttgtagggactctgggagatccctatgggtaacagaggccccatttgtaaaaggaaagaaaattatttatattgagaacttcatcaagaattttcagtactgcttggcaaagtacagattaattaacatgaatttgttaattcatgttattaacatgaataagaaagaccaactatacaatctccagcagaaattctcatacagacactatacaaaatttgaagacgtacacttcatgtgctaaaagatatttgtagacttctttgtcaaggactcctttctatggggtcccgggttgtaccacatttctgcaaagttcacacttctaatctaaatcaacgttacttggctcccttgtacaccagtttcttctagacctatagggttacatacattctgcacaatttgacaaaatcttgtgaatcattctatttctcaaatttttgtttctgatccaatccagctcacagcaccctttacaacttaacatacttccaagtataacttagaaaggggatggaaactacaaggatggggagcttcacacatttcccccagataaggcagatattgctcatcaattgccacatttgtttcatggattcagttgaggttcagtctcaactcttctcgtcctaatactccaggcaacactgacaactaattagaattgacatctaaatatctcaattaaaatctatttgcttgggtaagcatatgcacagaagaaaagaaagaaaaaatctattttcaaccccaggattagatttaatcactaaaaaatctagttcttgagagttttttgtatttggggttttttttttttttttttttttgaagatgagggctcactattttaccttgaactcctgggctcaagcaatcctcctgcctcagcatcccaaataattgggattacaggcatgtgccactgcactggccttagagtttgttgaggatcccaaatcttattcctggcacttaaatgttacattcccaatggcaacattctttagatgactccaaagttccacctctctttgaatacacgttagaattctaacctcctgagttttgacatgtaccaagaaatatcttcaggtgtggagataagggacggtttatctattccctcttttcctttcattctttggagtgagtagacctgctatttcccaaaatttctactaagttggcccttaggattttagtttgatttgagtttaaggtggacatcatatctgttcatattttatctgacttatccacccttcagaactctgagaaatagtcactgcatagttatta

SEQ ID NO: 3494 - DNA, 2300 bp, Homo sapien
tgtatctgagtatagaaagtaacaagaacacacaaagaacttcttccaagtcagtctcctgggctactagaaaaggccccaaaggcagcctgaggaattctgagcttttcaggaggttctgttcaagaaaatacattcaaccaaaaaaaggaaattagacaacaaaataagtgactttgggattttaacccaaagtattaaatgggtccatactaatctaaataaatgaataggatagaagagacaaacctcccatacaaaagaacaaaaaccaaaaaactttaaatagtttatatagatactgcctcctcaaggaggtggcacataactctccacctctcaaatgtggactatgcttagtgtcttgattctatacaacacagaaaggaaaggggaaaataactttataagagagaaacccagcaaacactgcctcagccaggtattcaaagttaataccatcagtgataagtctcatacataacatgcacccttgatgtgatatacccttatcaaagaatggcacttcacctctgttatcttcctctccaaagccatcaccccagccaaatcataataaaaaaaattagacaaaactaatgtgaggggtattctataaaacctgagcaatgcttctttttatggtttgcgtccctccaaaattcatgtagaaacttaatccccaatgcaataatattaagaagtagggactttatggggactctgccatcatggaaggaatttgtgcccctaaaaaagggatcaagcaagtgagttaggccctttgccccttctaccatgtagagacacagcaacaaggcatcatctttgaagaggagaaaaagccctcaccagacactgcatctcctggcacattgatttggatttcccaggctccagaactgtaagaaataaattccttttaggaaactagatttgagatataaatgaactctttgtactacttttgcaactattctctaaacctaaaactattctaacattttaaaagttttaaaagtggctcatgcctataatcccagcactttgggaggtggaggcaggtggataacttgaggccaggagttcaagaccagcctggctaacatagtgaaatcccatctctattaaaaatacaaaaaattagctgggggtggtggtgggtatctgtagtcccagctacttaggaggctgaggcaggaaaattgcttgaacctgggaggtggaggttgcagtgagcggagatcgtgccactgtactccagcctgcgggatagagcgagaccccatctcaaacaaacaaatggaatttagaaataacgtaaatcatttgcttttccttgaagaagaaatctaagcatatagttgatagcaaatttatgacaatcccctttactactgtaaatcagctctctgaaactcactggtgaactctttctttcaaataaatccacattgatccctcatcttcatctgcctccctggtcactttcttgcttgcacccctttcctaattccatcttcctcaatacaaaatgttcccccaccagacatagatcaattgaaatgtcatttgtcatctgtaaatattttccttagagaaatgatgtctcttgggctcttgtcctctgcaccacttctcatatttactgcaattctggtagaggaccagatggacatgttaataattctcagtcccattagatacatagataacattgataaatcagcaaattaagaaaaaaaaagcgaatttattttggaaaagctactgttcaacctgggcaatccagcaagatcccatttctaaaaaaaaaaaaattgtttttaattagctgggcatggtggcacatgcctgcagttccagctacttaggaggctgaggattacttgagcccaggagtttgaggctgtagtgagctaggatggtgccgctgcacacttcagcctgagtgacagagcaagaccccatttctaattaaaagaagaaagaaagaaaaaaaaaactgctaaattagtgagggaggaagtaaatatagaacttaactaccatgctttgtatatttagccccaaatatatatttaattaggaaacattaaatatgaattttgaagggaatttactgaatatctaatactatactctcaagttacatattaggaatggcttaagtgaccagctcaacttcatgcagttaatgaccaggagactcatgattattttattcctcctcatttttcatgttcttcaaacaccaagttcgaatttttgtcgtgatgcaagaaggctaaaggctttga

SEQ ID NO: 3495 - DNA, 2300 bp, Homo sapien
attgtttaaaaactaaaacaataaaaattaagaatacatcaattaaaaataatacaaataggctggcctgaaagcagtggtgtttacaactaactgatcacaaccagtacagagttctttgttttttctccactcccactgcttcatttgagtagccttaaaaaaataaaataaagtaaaaataatacaacataacagctatttatacagcatttacactgcattatgtattacacgtaatctagaggtgatttaaagtacacaggaagatgtgcttaggttacatgcaaatatagccaagccctgcatggcaatatttgggtcaaggacagaccgcatatcgtatggtggtcccataagattatagtaccatatttttactgtaccttttctatgtttagatatgcttaagtagataaatactacctacatttgtgtaagtatactctatgatgttcattcacacaacaacaaaattgcctaaggacgcatctcagaacaaattcccatagttcagtgacactatgtactatgccattttatgtaagggatatgagcatccttggattgtggtgtcttcacgggtcctaggactaatacgttgtagataccaggggatgactctatatggaatttatattggagcccttgtacttctcaactaaatcaaatttattcttttagtagctcaataaaatatgctttcacctgaaactataacacatcatggcacaaaacttaaattgctttcactataaatagtgggcaaagtacacatataagatgtgtgttgatagaaactaaaaagcacatcctttctatgttctgacctgctaggttttttttaattccagaaagttatttgataaccacataacatctcaagaactagttgggtttgaatttcagctctgccttatattaactctgggatcttaggtaatttattcaacttttccttacctcagtttcccatttataagatgattaatatatatgcagtactgctttgcatataataatagctcagtgaaccacagagatgaccccccaaatagatattctattccatactttgtcctgttgagccaattgctctaccacaaccacagcaacatttaaatattttgcgggaatcttaaacacagcatgccccaaatcacacttatcatattctgactgaaaactggttcttccattgtctccattttattttctgaatttgctataattctccaatttaagctaattggaagctcaagttgcttccccaattttggtacagttaccacatagctttcttactccattttaagggttaaaggatttcaaatctgaaatcttgcacagaattctgtctgcaaagaaaactgcacagaaaatttataatgggatatttgaagaaaaaaatagcttatcctgaacagcaccagaagtttcatttttttctgtactgttgtaactcagcagataatgtttacatttgtgtatatgtcctccaacacaaataagtatggttgctaaataatattatgtcattaaacttcttgtttaatgcttcttcattatgattcattatgattgtttaatgcttcttcattatgatgtgttagaagtttttcaaaagtttatactttgtctcttagtggcaattaaaaaagaaataaacatgaactccccaaatgagccacaaaaataaatcagcatgtctaaatttcagaatgagaaacaaagatgcaattctctcctcagaccaaacgaagcagagattttcaaactgcagaggtgccacagaaaaggctgaattctcaagcatagtgagcttagactttatagctaaaatagaaatttcagcttttagagctgaaatagaaggtctgagcattaacaaaacattagaaccttgcatttaaaaattagtatgagaaatttttgttattgtgctgagacccttacacacatgatttcttctagccaatacaggcacagattcaacaaagatggtgctttattgtgaaaatagaatattcaccttgtcttctgacatcataaagaccacccacatttgcacagatgctgctgctatagtactttcaggcaaggccaaggcttcttgaaaggctggtcatgccccagtgatcaatgaagaactcagggatatcccaaaactcaggactataaggtaggagaaagacattaacccctggcctgagaatgagattagaaacttaatatgcctcccctaagacttaattcaaagcaagactgaaccccagtgaaccagtcactgaatggaaatt

SEQ ID NO: 3496 - DNA, 2300 bp, Homo sapien
atttaaaaaaatttaaaaatcaacactagattttttattttatgtccttcaaattattcagacaattctactcgtcttaagactgtaataaaaattcctatctccacagtgtgggagaattgtcaaagaaggcaggatcctcttctgatgtagtaggttggtgcaaaagtaattgcggtgtttgctatttcaatggcaacaaggcacaattacttttgcaccgacctaataaatgtgggctttgataaagctactgtcacatacaacttgaaatcatgaagaggccctcaggacaaaatctaggagttgattgagaaagaacaaatggaaagtttgtgaaagcagaaatcttcaagtaggatattttgtttaaagatgggagtgttatgggaaaaggcagaagccatttgactcaaccctattactgaaggctgaaaagaacatatattttttaaaaatctaccattgaagtagtttaggaaaaatgtctgtgagctgcaaacccccaaaggaaaagaactaactgagaggaatacctctggaagaacatgttgagatgactagggtacaaattgggcctgaaattcaatgtttattctggagagactagataaacacttagtactttagcagtagtagaactaaaagaaggtacttaaattggcttagggtagaagtagattgcaagagctcagccttgaataaattaaattagtcaattgttttacttacttatacataatatgtaccctgtatttcttcatgctaatagataatatgatttttgcaatttatctgccctatgaaacattttatggaagacctcaggtaggaaggttatttaagaggaaaaaaaagcaaaagggacagatatcaaggtggagatagccaaaaaactagagagcctttcctgtgagactgcccaagacttatttcttctttttttttgccttcccttcccttcctttcccttccattcccttcccttcccttcccttcctttcctgtcctttcccttcccttcccttcctgtcacttcccgtcccttcccttcccatcccttcccttcctctttcaagacagaacagagtcttattctgttacccaggctggagtgcagtggcatgatctcagctcactgtaacctccacctcctgggttcacgtgcttctcctgcctcagccccctgggtagctggggttacaggtgtgcaccaccacactcagttaattttttgtattttttgtagagacagggttttaccatgttggccaggctggtcttaaactcctgacctcaagtgatcaggctgcctcagcctcccaaattgctgggattacaggcatgagccactgtgcccagcccaaggcctatttctttgcaataatttacacagtaaaatccaagattaacacttgaattattgcaacgcattccttccatttttccttccttccttcttttttgccctcactccttttcttctttccttcctttctttcctttctttctctcctccctccctccttccctcccttctttccttcctcccttcttacccctatccttttctcttcccttcccttccctttccttctttccttctttcctttctctcctctttcctttttttttcctcaaaaaaatttaaagaaggtttaggggcacctatgtactatttaaaaaaatgataaagaatgtgaggaagaaaatgtccatgaacactattttaaatgccatgtcttaatatcagtttcccttgttattttcctagccagtctttgtcagggaaatagcagtcattttcctaagcctaaatttaacagacacctgataactctgtatagtacttgctgataggaaccgaagtaaacaagagtgacgcatagcaatgttgtcatttctactctaccgagtccatgtgggtatggagatagaaagaatgtgacttgattgaaaaggaatttgttgttgaatgagaggttaaactatgttcttaacttttaatcctatgtgcaaagccttttaaataatttggaaataatattacaaaaggaacaatttaacctaagttagttgtactctaccatttctttttcagagagaagaatcagtagagctacattttcttggcactccaaaatgtggatttcaaaactgttagttcagaagtgttcaacttttgctgcccactggaattatctggagagctgcaaaaggacactgatgcctgggctgcacctcctagaggtcttgatttgatcaatccaaaggaaggcctgggcagtaaatttttaaaa

SEQ ID NO: 3497 - DNA, 2300 bp, Homo sapien
actaccagggacaatgaaggcaacttcataatgataaaggcgtcaattcatgtccattatgtcaaaaggacataataatcctatgtgcttatgtaactaaccacagagcttcaaatacatgaagctaaaactcatagaactgcaagaagaaatacacaaatccacaattgtcgtcagatatttcaataccactctcaaaaactgatagaacaaataggcagaaatcagtaaggatatagaagattggaacattattaaacaacttgacctaattaacatttatagaacattccacccaacagcattcttttcaagtgcacatggaacatttatagatcatttaatccttattaggtgggtgctatcattattcccatttacagctgagtaaacacaggtctgaaaaagtttggtaaccttcttgaaggtcacacagttaaatgtcacagctgggctttcaacccagggtatctgacccagaactcttaatcactaggctctgtggcctcccttgagcacctggaatagctcaggtctctaagacttagaatgaaatcctttttaaataaacaacggaatgggagactcaaatagcattctctaaatactgcttgagaaggaagtaccttccccctttcctctcatattcccactcagcccaaatggcctgtctgcttcctttaagtgacatgacttataggtatcataaactcgggttccacagccgctgggactgaaagagaagacagttgtagattacaaaaggttggtgggagctaactcttcctcaggctgcatctccgttgggtgggcggtctaatatacatccaaacagagatcaagatgcctgtttgcccctctttaaatgctgggatctggacaacaactccttttccaggaaggaaatgcgtttttattaaaatgacataaagaatccttagttcatggtagactttctttgcttatcctcttatctctgttattagtactataacgtatatagcaatcacaacacggaaaaacgttggcatgtcttccagggtgaggtttccttcttgactggcaagaaaatgccatagaggggagcacctttccaatagatctttggctgagacctgaggcatgactgttccaggggaggaaatctgaaacggggatattattctgccttactatgctgagcgtaggattcaaactgctcagcaaatgtgaatcttgataatacaattaaaaaatcaattttctctttaatatgaattttatgtctcatctttccccacacctctctcgcccctcctccttgtcctttctacggggcttccatcctgtattcacattcccctctacagttagtgactacctagttcttgtctctcatttccctcagcagcccctttcctcttcctgggcttcttgccccttcagcgttgtcctcccttccttccctgcagtccagagtctcagaggagatcaaagagcgatagtgtggctgcctcgcagctgagagaattttccagctccccctcctggctgggccgagttgtgggctgagaggcaggaggctgggctggggcgtcttgacttttggggggaattaggaaagaggtgtctaaagccgcgttgtacacaatagaaaaacaaaattccctttgtgctagtgtggtgtccctcggtttgggtctttgccacacattcttgaaagccattgtttacactagcgttttgcaggttaggaacggtgccggtgggaaccgagctgacaccgtaagcgcttccctgggactgaattgaccctacaatcagtggagggaaaagtcaccctccgggggggcctccagagcaaaggagggaggacggcaactggccaatcaggaggcgaggccgagccaggcttcccctcgtcgctcgtgagctgcaaacagtggaaagttgggaacctcagtcgctggcccaggcggagagcagcggcggcggcgagggcagcgggattcgggccgcggcgccgcaggctcagagctgcccccggggcatggacccgacgcgccgcccgcactccgccacaggctgtccagggcccgcgggcagatagcagtccaggaggaagccgcatccagacaaaagctgccgcatccctgccctgcccaacccctggagggattcgagtttggtgcttgtccccgtctgattctcagcgccaaactttttgctagttcagagattccaagagtctgatgagttactctgagaggaaaccctctgcctgttgttgaggaggactgagcacagtgcttaggcgctga

SEQ ID NO: 3498 - DNA, 2300 bp, Homo sapien
gttcagtggaactatcccccaggtaatagtatttttagattaaggtcccttcccctttttctgtgcatggttaggtcaatatttctctgtctctcatatcactcctttcctcctcatagccactgacaccatgctcatccaactcaaactaagctattagaatcctctttttatggacttactttcttttagaatggggactttcttcccccattccaatccatcttccactgggcaaccgagtgaattttccctaaatattgttttaactgttcattcattgaaaacctttttgtgcttttctaattaccccagaataaaatttacactcctctgtccacaaactaactcctacacaattcttttaacatttaatcctgaattgtatcctcataaagcaatgcatagagaaaaaaaagaaataaaaatttttcctttcaatatgtgagtactatgtatcttcaaagaataaggtagccatacatcttttctttatgcatgtttccttaaatgggtaactgaatatttgaacttgctattgatattaagcctctatgtgtaactaattctgaattataggtagacaagttgtcagattaattctttcatatcataaaatattattgatgctgctaattttatagtcatactactgttaggcaggtaattttgggtatctatgggttttgaattttctcagtaatgaatttctcaaaagaatggataggtgttgctcttgtcctgtctttggctgccagagctgaacttttgatggccacggaacattttctctgtcagcctctatgtccattacaccttcaaaggtgtgctgtttcctactgcttgaccctagcccttctttcattacttttcatccttccgtgatttgtcccaactccagtttacattacttgagtcatagaggtatcctcactgcctccaaatgttatcattcttattctagttctattatccctatctaaattctacctataatgtgaagcatctcataaaccactgcctttctgatattggtctctttgttcggttatcctctagaacttatttttgccacaaaattttgcacttaatcacgtgtttagtcattattaatcatattatatatacactgtgagatacttattgtctattagagatacaggaaaagtcaaagtgtatctttcccattccatataccgaacttcacttctgacatcagatatgtgggatttttttttccctcatacaccaagcagttctccagcagacaccagccaggtgatcctccaattcatttctgaaactatctagatcccacagattgaaggctccgtcctgcaagatggtccacccacttctgatgccaattgcaaactgtaggttgtgatctgtgcttctgactggctataaatcagggttcctacaaccccctcctggagtttgattaatttgctagagtggctcacagaacccagggacacactttacttttactcatttattataaaggatattacaaagaatacagatgaacagccatagggtgaggtatggtagaagtggcacagagcttcacaccatcctccaggaacctctatgtgttcagctattctctgcatgtttagctatttcagaagctctctgaaccctggctttttttttggttttggtttttatggagatgtccttctgtagacatgattgattacatcacgggccatcagtgatcatcgctgccttcatctcctctcccttccctggattttgagggtggggttggaagttccatcctgccttgatctttctggtgaattagccccatcctgaagccctctggggacccccagtcaccaatcatcttattagcatgcaaaagaaacttttatcactactgagattccaaggattttagtagctgtatgtcaggaaatgggacaaagacaaaatatatatttcacgatatcacattgtcattttttaaacccatagtgccttgcacagagggaaaaacataattgcacccaatagatgtataattccttaattgctgaataaacctcagtgtaacaataacactgtagggaagtctgggtcattacccttatctatcatgtttccatgttaacttcaatgggttatttgaatcacatcagcagttagaaatgtcattatgtaagtactttcttgtccagttccagcacaagccagcatattactgcttgcatttaaaatcatattttagaacaaaatctggtaattatctcatgaaaaattcatagttgttatttttaaagtattgt

SEQ ID NO: 3499 - DNA, 2300 bp, Homo sapien
aaataatgcatatttcaatacgtaaatactctggcattgtctacagaatatgaagatacatttatgtggcatcattatgaattcaatagctcaaatgcagactcatgcaggagtataggattgatgactcaaaaactccaagctggtgaagtgattttctaagatgatgtgcaattattactaaagttctgtctttcttctgcacatacagaattaggttgcagactcatgtagttacaaacaaagttatgaaatacacacatttcagtgggagcttcaaagtcgtgctggacttgggataattgtttctttgcgaatctggcccatgtttcacctctctagtttttacccactgaatgccagcagacttctccagtcattgcatcaactaaaaaatctcccctgcaaacttctaacagggtggtggtgcagagcaccaccattgatggtgcagctttccattctttgtacaggccatgatttttctagtcatgctcttgcctttgtaaccgattagaactggactgcccgtcctctattctactcactcagatattacctcagtgtgaatccttctccaattgcctttcatgcagtcacttctgtctctgcttccagagctcactgtctggaactctttgttagcacttatttcactgtggtgtgatggctggtttctgtgtatgtcccttcttcaaccagaaggcagtgcacactttccatgcacagatctcagcactgtttctggcacatagttaattctccatagatggtattggatgagtaaatgagttcttccttttagacttatgggcaagtgataaaggaacctatatttgtgaagctgaaaaccagtttggaaagatccagtcagagacaacagtaacagtgaccggacttggtaagatcaattgaatgtctacataccatggtcttcaaagtcatcagacttcttttactatgtcatctcttgcctgtgccacttaaaaaaaaacaaaagataaatgactaattactagaccagccttcccttccctgccacacttcatatttcttagaatgttagtcctggaaataaccttagagattatctgctccaaaatgaagggcaatttaaataaattatttcaaatctaaatatgaatacacacatgcacacacacacacacacacacatattagagttgtggtcttttctgattccttttttacatttgttattttagtcaacatggaattatttttgtgtatgataggtaaaaatataatatcatttatttccaagtaagacatttgatgcaatatctattattgaatattctcttcccactgactaaaatacccatttgatcatgtagtaagtttatgtccccatgtctattccttagaattctatttctgaaatagtactacgttgcttaaattattatagcatttaatatgatttttatatctgtcagtacatgtttctcattaatacccttttacacagtttttaaaatatgtcttcattagtctacatacacgttttccaagtaaaatctcttagggattttactttatgttaaatttattcattaatttttagagaagggcatatttacaatactcctttaccattccatctaagagagtcaacctcatattatttgcttgagatattacaacagcatccttattgatcccatttcttccagtgtacttacagttttcagattaatatttccccagaaaatgatcctgatgattccacttttccacttataaatgctttcagttactctccatttgtctactgaatacattgcaaatatcttggcttgacatttcaggccttccatgccataagcattcttttttaccttctttactactgcagtaatgtattacctgtccttttgcattccccctacttagaaggagactttaatttttactttcaaaatcatacccattttcatgtaaatattttgtttctgaaaactcaaacttttatagcataactaacagtctttggggcctgtgaagtggcttacctttcttttgggtgaaatagagttgaaagtgcctgtgctctctcttgatttagttgctccacttattggaatcagcccttcagtggccaatgttattgaaggacagcagcttactttgccctgtactctgttagctggaaatcccattccagaacgtcggtggattaagaattcagctatggtaagaacattttaaatgcatgcattcacattcttttgtgagttttcttttctttttttttttttttctttgagacagtttca

SEQ ID NO: 3500 - DNA, 2300 bp, Homo sapien
gttgtgtttttagttcttgtttttttgcatcatctagatagcatgatgttttatgccaactccagtttatattatcattctcccttttttcttgctatcattccattcttataaaagaaacacttgaactctacaacattttgtatcttgaagtccaattctagttaggattttccatattgattaaaaaataaaaataaaaaagtctttagctgaaaacctgtatttatatgtagtagaaatgacacagaaatgaataaatgttacccaattgttaaccctccaattaaaaatgcatctatattaaatggcattatattgtaagaggctgaggcttttgttaaccaacagccttgaaaataaaatgtattaaaataattggaacttcagaatttttgaaatcatacagtcaatatttgagggctatgagcatccacagcctgaattaatacagaagtagttttgaatatctgccatatatttaaagcctttcttctttcctctgaggtttagccaaatactttttagtgcaaattcttgttggctaaaatagatttgtgtgactatgtttttgtctacaaagcacaaggataattagtcaactcagtcagaaacccattaactataagaaactgtaacatgcatttaaaaatatttttctaaccaaagcagacaaatgataatttcattacatggttttcaacttgttctggagaatatttacactcagcctttgaggctcttatttctgctcatattttgattaaaccaggtgaccaaaagatgtactttatgagctccatatctagcaagttccctgaaaacaaaaatatgacctggtattcacgtgtatataaggaaagccataatgttgaatctcagcccaggtacctggtaaaacataaggttgtttcattcttgtggtccaatgatgtgatgtgttagttcccaaaggaaggccttaatatcactccttggaaactactagtcagctttttatgttgtttaggaagcaggttagtatgttattcagaactttaattcatgaacacatgtaatggaaaaagttttccaaagaattacagctgtgcaaatcatcatgttgttgaaagatccaagtacatatgtagatatgaagctgaatcaggcttaaggatgtggtcttgctgtctagggtccaaattatctttgtggaaatatttgtattgtctataaccacatctcaatctgttatacagccttgttcccaagctcccagttattttcactttctccagagcaaagaacacagacaaatacttagctaagggcttaaacactcagactgtatttatatatggtagtttgagtaaatttaattgtaataaaatagctcctttgggtgattttaaacatttatcttggcatcaggtaagccttctgaatttccctatagacacaaattcctctgaaaatctaaccagaaggagaaagatcatcatttgttatgtttcatttggttcagtttcaattctcttagattggggactaattagctcattactgagttaatttatttatataattttggttttaaacaaacacggttctgtgacttgcaactgtcttttggggtgtttgcagttcatggagcatggagcgcttggcagccttggggaacatgcagcgaaagttgtgggaaaggtactcagacaagagcaagactttgtaataacccaccaccagcgtttggtgggtcctactgtgatggagcagaaacacagatgcaagtttgcaatgaaagaaattgtccaagtaagagaaatacactgtttataccttaataaattaacatctacctatcttatctaggtagtatgtcaacaagaatctatcccattctaactgtgcccacaagaacatctctcaaactaacaatgcccagagtgtaacacgatggttcctaggtagtaagaaagcatgtacctttttcccttattccagttcatggcaagtgggcgacttgggccagttggagtgcctgttctgtgtcatgtggaggaggtgccagacagagaacaaggggctgctccgaccctgtgccccagtatggaggaaggaaatgcgaagggagtgatgtccagagtgatttttgcaacagtgacccttgcccaagtgagtgttggaaatagtgagtcaacattatactttcataaagtttcattatgactgtaattccttaaagttgcaatattccgttatttggttcttcaacctttggtttaggatgtcagaatgttgtaaggttgctgtcatgtctg

SEQ ID NO: 3501 - DNA, 2300 bp, Homo sapien
aatattgtgaaaatggccatacttcccaatttaatttacagattcaatgctatccccatcaagctaccaatgactttcttcacagaattagaaaaaactactttaaattttatgtggaaccaaaaaagagcccgtatagccaagacaatcctaagcaaaaagaacaaagctggaggcatcacactacctgacttcaaactatattacaaggctacagtaacaaacagcatggtactggtaccagaatagatatacagacaaatggaacagaacagaggcctcagaaataacaccacatctacaaccatctgatctttgacaaacctgacacaagcaatggggaaaggattccctatctaataaatggtgagaaaactggctagccatatgcagaaaactaaaactggacaccttccttacaccttatacagaaattaactcaagatgggttacagacttaaacgtaagacctaaaaccataaaaaccctagaagaaaacctaggcaataccattcaggacacaggcataggcaaagacttcatgactaagacaccaaaagcaatggcaacaaaagtcgaaattgacaatgcgatctaattaaactaaagagcttctgcacagcagaagaaactatcagagtgaacaggcaacctacaaaatgggagaaaatttttgcaatctatccacctgacaaagggctaatatccagaatctacaaggaacttaaatttacaagaaaaaaaaaaaaccatcaaaaagtggtcaaaggatatgaacagacacttctcaaaagaagacatttatgcagccaacaaacatgaaaaaaagctcatcatcactggtcattagagaaatgcaaatcaaaaccacaatgagataccatcttacgcaagttagaatggcaatcattaaaaagtcaggaaacaacaagatgctggagaggaggtggagaaacaataagatgctggagaggaggtggagtgtttcattgacatagttatgtgtcattagcagttgtctacttttaagagtattgaagggagataccctctccagcaattaattctatcaagtatttggcaggtggaatgttttacattgttggtgggtgtataaattagttcaatcattgtggaagacagtgtggcgattgctcaaggatctagaaccagaaacaccatttgacccaccaatcccattactgggtatatattcaaaggattataaatcattctactataaagacacatgcacacgtatgtttattgaagcactattcacaatagtaaagacatagaaccaacccaaatgcccatcagtgatagactggaaggacttttaaaatgcataggaggagggaatgattgatggactacagtcctcatcttggtgaggaagggtaagatgggctgcagagctcaaaagctcaaatagggggacttttcttcagtgagagaagagggctttcttcctccaggactggaggaaaggaaagtaaaggaaagaaggtacacaaaccacaggcaagtccccaagagtttgaggagttcatgcctgcacactgtttttgttacactatgacccagatggtgtttgggaagtacaatgtggcagtgactgccaaatgtagagaaatgctgatgttgatgcagtcaggcacagggtgataaagacttgcaccaagctagtagcaacaagaaaggggaagaaaggacaattgcaaaagaccttagtgttgttggagttttttccctctgtcttcagcatcccagtctgtcagtaacattccaggactggaacttccgagaaacaggagtgagagccatatggcaaaatacttaaagtagaagagtgtttcattgacatagttatgtgtcattagcagttgtctacttttaagagtattgaagggagataccctctccaacaattaattctatcaagtatttggcagatcacatgagtgcaatatattggataggttttagagaagatcttaaacatggtaatgatcaagatcattaaaatgttaaacatttgggataaattcaggtttcctaatagcatataatgaaagttttgttttatttaacagatattaatgaatgtcaagaatccagcccctgtcaccagcgctgtttcaatgccataggaagtttccattgtggatgtgaacctgggtatcagctcaaaggcagaaaatgcatgggtaagaaaagggctttgaatttaaaggaatgacacctctataacttcttaatgatgtctgatctaaatgcatacactgtgtcttggtact

SEQ ID NO: 3502 - DNA, 2300 bp, Homo sapien
taaaaaacagagtaaccaagacttagaaagttatcagaaatttctctctctgcgtggttgcttcatatttatggatctttttactctgaaggactttctctactcctttagaccatgggcagaaatgtacacattattggtctacgtagacagacaaatttgtaatctctgaactataatttcaaatttccaggagaagaaaacatattggctcgggttgttcaagttccaattcctaatcctatcagctgtggctgatgtgggaagataacatatataaccagagctaaaaggaaaatagcccgatagaaagagaagtagttcccagaaaagggggattatttagagatgagcagatagcctcgaaattgtctttacatatttagtcctgtgaaataagcactgtagaaagaaaatagatgcttataattctagtcttaaaaaagtcacaatctcacaaacctatgtatacatgtagagtaaaggagtaaaatttagtataatgattacaaattaagtgatggttttgatcaaaagggagctggatgtagtggaaacatgacggaacttaaaatgcaaagacatgggttcaaatcttggttctggcctctagtctttatagatccttggatgggtcacacattcttcatttgtgggtcttcatcttcttatttgtaaatgtggatgattatatttaactttaagacattttgtgagaattaaatgcagtacctaccaaatgagtagtagacagcagaatccagcctacaaccatgtggttcactgaacatgttttcttttttttcttttctttttttttttttgagactgagttttgctcttgttgcccaagctggtgtgcggtggcgtgatctcagctcactgcaacctctgcctctcaggttcaagtgattctcctgccttagcctcccgagtaactggaattacaggcgcctgccaccacacccggctaattttttgtatttttagtagagagggagtttcaccatgttggtcaggctggtctcaaactcctgacctcaggtgatctgcccacctcagcctcccaaagtgctgggattgcaggggtgagccactgcacccggcgtgagcatgttttaaacatataacattggtgaaacaactgggctgtatgttggcaatagactaacatataggtgttggttgtccttagggaaatcatagtctgttgggggtgtgagacagatgaagagatattttagtaaaacgtagtacaattgtttactataattctagatgtgattggaatttgatctggaaaggtttcagggaggtgctaggacatgagcgaagccttatgttggtgggtaagattttacaccgatacattccgtatgaaagtggggtaaagccttgggctgagctgacttagctctgcaatggtgatggttcacattttcattgtgggaaggaaacaaaattagtaatttaaaagaccttttccaaacatgcttatcttaaaggaaggatctaaggaaaatatcaatacattttttaagcagatttttaaaataataaaggaagctagaaaatccagtgtcaataatctacctgtaggtaactgagagcatgttttctgtgctcagagaaaatgaaactactcaagaaatgtatatttgatataatggtataagtatataaaatgtatgccacaagctaacactaggtaaatttcaaagctacctttgctagatttaactggaaagcagaagaaataaatgataccagtatgtgaatattttaaagttgctgcttcaatatactagtcaaagtctgccagagctatttaccatctcaggacaatttgttcacttcacttagaaattagaaatgtgctctggccaatacatctaaatttattttgtggtagtcattttgcttaatggaagtgttttccagatgttgcctaagtctagtcgtctgggcccttttccaataaatgaggaaagtttgatttcataggttgtcactgttgattttgtctaacctttggactaattggttcatcccactgtatttgcactgatatataagactcccaggacgtgggataaactcatctatcctttacgggtaagtgtcaaagttaacttgcttcatagaattaaatgtgttttcattagaggtgtttgaaaaaaaatgtgtaaagatagtagttggaaatttttgaaaaggattatgtttatgcaatacacctgttggaagcctttgaatttatattgagaattaagaaaaagttggaacagtaactccatgat

SEQ ID NO: 3503 - DNA, 2300 bp, Homo sapien
cttaaaatgcaaagacatgggttcaaatcttggttctggcctctagtctttatagatccttggatgggtcacacattcttcatttgtgggtcttcatcttcttatttgtaaatgtggatgattatatttaactttaagacattttgtgagaattaaatgcagtacctaccaaatgagtagtagacagcagaatccagcctacaaccatgtggttcactgaacatgttttcttttttttcttttctttttttttttttgagactgagttttgctcttgttgcccaagctggtgtgcggtggcgtgatctcagctcactgcaacctctgcctctcaggttcaagtgattctcctgccttagcctcccgagtaactggaattacaggcgcctgccaccacacccggctaattttttgtatttttagtagagagggagtttcaccatgttggtcaggctggtctcaaactcctgacctcaggtgatctgcccacctcagcctcccaaagtgctgggattgcaggggtgagccactgcacccggcgtgagcatgttttaaacatataacattggtgaaacaactgggctgtatgttggcaatagactaacatataggtgttggttgtccttagggaaatcatagtctgttgggggtgtgagacagatgaagagatattttagtaaaacgtagtacaattgtttactataattctagatgtgattggaatttgatctggaaaggtttcagggaggtgctaggacatgagcgaagccttatgttggtgggtaagattttacaccgatacattccgtatgaaagtggggtaaagccttgggctgagctgacttagctctgcaatggtgatggttcacattttcattgtgggaaggaaacaaaattagtaatttaaaagaccttttccaaacatgcttatcttaaaggaaggatctaaggaaaatatcaatacattttttaagcagatttttaaaataataaaggaagctagaaaatccagtgtcaataatctacctgtaggtaactgagagcatgttttctgtgctcagagaaaatgaaactactcaagaaatgtatatttgatataatggtataagtatataaaatgtatgccacaagctaacactaggtaaatttcaaagctacctttgctagatttaactggaaagcagaagaaataaatgataccagtatgtgaatattttaaagttgctgcttcaatatactagtcaaagtctgccagagctatttaccatctcaggacaatttgttcacttcacttagaaattagaaatgtgctctggccaatacatctaaatttattttgtggtagtcattttgcttaatggaagtgttttccagatgttgcctaagtctagtcgtctgggcccttttccaataaatgaggaaagtttgatttcataggttgtcactgttgattttgtctaacctttggactaattggttcatcccactgtatttgcactgatatataagactcccaggacgtgggataaactcatctatcctttacgggtaagtgtcaaagttaacttgcttcatagaattaaatgtgttttcattagaggtgtttgaaaaaaaatgtgtaaagatagtagttggaaatttttgaaaaggattatgtttatgcaatacacctgttggaagcctttgaatttatattgagaattaagaaaaagttggaacagtaactccatgatgcttattaaattacatttctgtgacacaggttattattttccttaagataaaattttaaccttgcactgttaagtacatgccatactttggctagagttttaagataagtctattctatattggagatttcttaagaattaaaactgtcaataacgtggctgagggtgacttgatttgttctgcataagattaagtctaatggccaaatattttctataaaattaaagctgatttaaagtcttgtttcaagaatgggatggttttattattgttacatttttaaagttactgaaatgtgtataatgcaagcctaagttagtggtgagatgaaagagctgttttctgatacttttattttattttcagcaagggtacctacggtacctgaaaacaacgatggcatggaaaacacttcccatttacctgttgttgctgctgtctgttttcgtgattcagcaagtttcatctcaaggtagcttaaccatcgaacatacttttatttaacaactattgctaatcattcagtcttgatttttataacaacggaaatatatttctaaaaattt

SEQ ID NO: 3504 - DNA, 2300 bp, Homo sapien
gaaaaacaagaacttcaggatgataaaagaagagccatagagagcatggaacaacaggtaaataggttaaccgtattaattttttttttaacttgtaaggatttgaattctttcaactaagtcattagttgccatttagttcatctcaacagaaatttattgaacacataggcaaaattttagttttatgttttactcttttctgtacctctatatacatttcccgttgaaatttttagactactttacagaaataggtatcactggttctttttaaaagcccctacctgagacttgacttatgcaaatgttagggaatggatatggagttgcaaaactgattatatcagggtgtaaacattttaaatttagcagcagttttttgggctaattggatcttaaaaaatgagacttcaatttagtaacactacaatacagtattttccaagtaagtttgcaattaattttggttttaatcttgttctttctgcttagttatctgaattgaagaaaacactttctagtgttcagaatgaagtacaagaagctcttcagagagcaagcacagctttaagtaatgagcagcaagccagacgtgactgtcaggaacaagtaagtatagccaattattgagaaatgagcttcgatcctagagaatgattcttgaagtatatttatgcattataagaactggtggaccttacaaaaattcaagataatttccacttttgtggaacttagacaagacaaattgaaaagtatagatggaaggctaaaaataaatacatagggcaatattcattaacaaagcaatcttgacaatgggaaaataaaaacaggactaggagactaaaatttgtacttggctctcatttgcaaaaattattttactattgtccttcactagatctgattataaaattacagatacagttgattagaggcaacctttgctaacaaaacaagaacctcttgataacattgttaatgcattaccaagtttgcgcagatatctatatactatttataaaatgttaaaaaagtatcattattttgagtgtatgtatgtatgtgcacacagtattgaagctttttataatttttttatgaacaggaaatgataaaacaattcaggattcagagttactaaaatggtaggatgggatagcagtacatttgagcatattggtaatgttcttattttaagttgggtgtcatgttaatagctattcatttgcttactattctttattgcctatatatatgtgacgtgtatattgctattttaaaatgtaatacagggaagaaatgcttcaaagtaaatttcattaaaatcaatggatctataatttagtacttaatatagctgagttatgtttagcttcttatatcaaaaagtttgtccaaattgctggtcttctaagcttcatttctgacagttttataatattaagtaactaaagcattaacttttaattattttcttattttgctacatttagattgtctttacttttattatttaaaaagtccaatgtgtatctttggacaagtgctaactagttttatggatttttaatctttggtatcaattgggtaataatttcttataggctaaaatagctgtggaagctcagaataagtatgagagagaattgatgctgcatgctgctgatgttgaagctctacaagctgcgaaggagcaggtttcaaaaatggcatcagtccgtcagcatttggaagaaacaacacagaaagcagaatcacagttgttggagtgtaaagcatcttgggaggaaagagagagaatgttaaaggtattattgtaaatctgaatagaatgttctgttgaattgaaagagttgtttttttctttattttataatgttttgagatggagcctcgctctgtcacccatgctggagtgcaatggcgtgatattggggtcactgcaatctccacctgctgggttcaagcaattctcctgcctcagcctcccaagtagtcgggattacaggcgttagccaccgcgcctggccaagttgttttttttaaatatgcattggaaaatctgttattctgatagactcttggcttgcaggatgaagtttccaaatgtgtatgtcgctgtgaagatctggagaaacaaaacagattacttcatgatcagatcgaaaaattaagtgacaaggtcgttgcctctgtgaaggaaggtgtacaaggtccactgaatgtatctctcagtgaagaaggaaaatctcaagaacaaattttggaaattctcaggtaaatcatgttct

SEQ ID NO: 3505 - DNA, 2300 bp, Homo sapien
aggcagctggtgtttatctttttcctttgggccctggggttaaaagctttataaataagggcagtccttatcataaacctgactgcatttgctcagtacggtagagttagcctatcccttcctgccctaatcctggtgctcccttctctttcttactaataaatatcttttgtggcattgttttttccagaatagtacacttctatctgcattaaaaacctggtgcaggcatataacctttctcaatgattttcttagcagcatctgctgtttcttggttgacagaacctgcttcttcagttttgttgacatttttataagtcaaacctttctaaaattatcaaaccatcctttactggcattaaattctccagctttagatctgtcaccttccttttgcttttagttgtcatataataactttgctttacctcgtatcatattagagtctataggtatgtgatagcaatcctgcaccccataaaagctgcattttcaatgcgagataggaaggtattttgcagaaatgcacttttttatgcttgctggcgtagctgcagtgatggctttacgaattttctttttatttctttttttttttttaaacaacggtccatatactggattcatttgtcttgaaatggtgggtaaccatcgctgcagtcctcaatctgtggtacatatcaagcaattcaactctttaaaatattgtcgtgatatttccctgcttcttagaagaagtacttccaacatcactagtggcagttcttatggatcccatgttgttattcaaggtttatggtattgtactaaacacaatgacaaatatgcaaaaacttcaaaagatttcaagttttatggtattgcactaaacacaatgacaaatatgcaaaaacttcaaaagattactattttctgcattatgcaatttactgaagagagaaactgctcacaatagagtcacacagcattctatacagacactcaaaacacttgagcttactgcagtagtatcaggaggtggctatgaaagtattccagtaatacagtatgtattacagttaattttatgcagttatggtttaataaagcatatttatatttgcttatatttctcttgattgcagatagggttgtgtagtgtttgtgtgcataagttttgataaattttttaagtttgtatcatggatttgtgcatattttaatggtagtaaatgataaaatacactaatatctacatattagtacatattatgcacttacagtagctttttcttagtttgttcccatttctgggctgcctggattggtctgtggtctctgagtttttcaaattgtaagtttttgggaaaaaattccaatatatttattgaagaaaatatgagtggaagtgaatctgcatggttccaatctgtgttattcaagggccagctgtgcatactttgtattaaaggtttatattcctagaaatatatttttgatatttggttcccctgagtgttaattagttattattttttaattctcttcaccattctagaggatgttaaacgtctgaatgaaaaacttaaagaaagcaatacaacaaagggtgaacttcagttaaaattggatgaacttcaagcttctgatgtttctgttaaggcaagtaccagatgattcctaatgcataaactatagctttttattaaaactcacctaaattaaatttcaaatataggcaataaagtaattaaaagctgcattttgttttgtttttaatgtcagaaaattaagcattaggacaattctagttcatctgttttgcttgtttgaaatttaagtttgttacagttcttaatgttttctagttaagaatctatgcaaatacttaatttctgttttgaaataaaattctgcttgtgtcccttagctacagacaaaatcttttgaataatcatatatcatctttaactgtacgtgttattttcttggatttctttagtatcgagaaaaacgcttggagcaagaaaaggaattgctacatagtcagaatacatggctgaatacagagttgaaaaccaaaactgatgaacttctggctcttggaagagaaaaagggaatgagattctagagcttaaatgtaatcttgaaaataaaaaagaagaggtaagttagtaaaattgtgtttttcttcatgttgagtataacttacatttgtatgtcagtttattaaatatgtattcagtagtgtgtacctgattagttgtaagatgagtggttaaatgtgaataatgcattacatttggcgtaaaaaatc

SEQ ID NO: 3506 - DNA, 2300 bp, Homo sapien
ttatcttagtattttctccagacatcagtaaactgcttaataaataaagtatttattacacgagaaaaaattgtttagacaaaaaaaaactcctttgttttaaaagacttcttttatagtagtcaagatattacctgaaagcataaaactactaaatatatgtaaaagtaaatgtgtaaactttccaagggaagggattgaatatcatgttcagcatagtatcaggaacatgtaagacattcaatatttatggtgcaaattaataaatagaatgcaatgtactatactcagctctgggatcagagaactaattttcaaggtcaattctgcttgacagttacactttttttgaagtaaaaacttgttcagaatttccagtcaacttagcaagaacagtatgaacctccccaaacaaatggtaaaccaaaacacattaacgggaagtttgtattttactaatggtaatgactatattcttcatatttttttcaaggatgttcaagccattattgtcagtaactttcttacttaaaggcctactttaggtaattacaagaaaattttaatgttttctatcaaactccaactttttaagagaaatcaagatatattaaatttatgtactgcacattcactgtgtttccagcgctcttatgcacctaatattcatttttgtaaacatctgattcgttctggagccacgggacgacgcacacactaagaacaagtgcacagagtggtcaatttggcaaaggcctagaatgcaggtgcctagaaaatagggcggagccactatcagttgaagtgcaacaaaacatataaggtactctaggcttagagagatgggttcgcagactctatcaagtctgtttcccgtctgccggacgaaggaaaataagcgtccctgtatgagcctaccctaactacaaagaaaatgctactgaacttagattcagatttttttttcaaaggcttcttatcaaactgtaaggagcaggaaagcgaaggctcaggatatccacagagcccaggaagtgaggttaacagagcggtacccagtgccaacttgatgggggaagaccagacccaaagggcgggagtcgagcccaaaaccaaggacggaaagagcatctcacttaccgctctccaccttaaatttctcatgccgccccttcaggccatcgatctcggattgctgatcagcaaggaacttttcaagtttgttctggacagacttgggcagcttgttcagctccgtgcgctccaggacttgctgcaacaccgccgccatgtcggtggggccagggaccccagtggcagcggccgacggggtagaagcggagaagaaaggcgaagaccagcaggacccagacgcctgggccgccgcctctatcacctcgctcggtggctcgcgcgcgcccgcccgccggagactcccgcggcgggaccctgggaaatcgagtccaccctcagcggcagcgtttcagcaacagcacctcaccgcccgcgaccgaagtgcgcgcgcagccgttggaagctacgaaccctgggaacccgagctcagaggctatccctgatcctcttgcgcacccaattttccggcttccagctccacccacttcaggccttgtagggctctgggaaatgtagtgtttttctcattcttttccgggagcccaatgctgcaccgccctctcagcttccgtttttctccccgctcccctggctctcctatctcggccccgtaaccgctgtccgcacggtggcgccacatacgtactcgtcaccccttggccctccctgaagagctggtgaccttaccgtcaaagccccgggatgccatggatcgtcctcgttggcggcttctggacactgagccactagagggcatcggtcccggtagggccggacggcaggctccgggataccgccacgctctctatggcgcccagaagggggcggggtggcgaccgcagtcgctttggctgaggctctgcggggaagggagggggggcttttacgtcatcaatctgcgccacctgactcccaagtccctggctttggagtgggaagtgaggtgtgggaagtaggtcgctttctgatgaattcagtggcagtgaattgagaccggagggaatctggcccctagaggctggtacttgggcccgaaacccccatctccggcggagagaccgtccgaggtaattgtctgccacgagtgcacattctgaaaacaggtaagtcagcctaagtgtagtgtgtgtgtgtgtgtgtgtgtgtgtgtgctctcttttcaagag

SEQ ID NO: 3507 - DNA, 2300 bp, Homo sapien
ctattcaattatgaaatctgattgaatgtcagataaatttttctttagtgctctttcaaaatttttaaatgtagtcaaccatactttataaaaggcagtactaaaaatgtatatagtcagctttccacatctgtggtttccacttccatgtattcaaccaaccacagattgaaaaattatttttttaaagcatgattacatctgtatcattaaagatgttttttcttgtcactattccctaaacaatataatataacaactatagcatttacattgtattaggtattataagtaacttagagatgatttaagatatgcaaatgctacaccatttaatataaggaactggagcatccatggatttcatatccatggggtgggcaggtgagagggtcctggaaccaatgccccacggataccaagggacaactgtattttgccttatagggtcataattttccagaaatgttgtatatcagccaaagcctttgtggtccaagcactgtgactgacacaactcaacctttctgggctctggtttcctaatctataaaataaagcatttgaatcctagcagatctgaaaacctatctaattttaggattctgtgaatctaagtacagaaaaatctacatttcccaaatgacagatcaacagtatgataatactgtgggcttaggacatagcataatacttcatataccagcaactttaattacaatgcttatctaaaaaatatttttggggaaaaatcaaccttaagctccgctgttgatttatttttccttagttattacaaaatatcataaaatgcttccatttatatttcttagacggcttcacaacatgattcaaaagtaagaactagagaaaaagaataaatttcatataagaactaaatcaccaattcacagaaggcccacgactgtgggaactgcagagagacgacactgggaatgcattatttacaatgaataatttaacaaattctttcataagagtaaacacgaaacaatctacggattgagctttaaaactacagaattatgatctggaaccatacaagttctgttactgtagaaattaacaatgtgtttaaaaacttcagttacaacagttttcaattttaaaaacaatataatgttaggtaaccgtttctgcaacgaaaaatttaaaacataggctacactcaaagtgctaccggtttcttttaattctcctcctgaagaattaacccgggtccttaaattcccgggtactgaatcactcagtgccacctccccaccaccaaaaaccatttaggtacgccgtttcacacaaggtaagttcgtcagaagtgtgtgccggagtgactgtccatatggttccaacactgtcccttcctttttctcttgaaaagagagcacacacacacacacacacacacacacactacacttaggctgacttacctgttttcagaatgtgcactcgtggcagacaattacctcggacggtctctccgccggagatgggggtttcgggcccaagtaccagcctctaggggccagattccctccggtctcaattcactgccactgaattcatcagaaagcgacctacttcccacacctcacttcccactccaaagccagggacttgggagtcaggtggcgcagattgatgacgtaaaagccccccctcccttccccgcagagcctcagccaaagcgactgcggtcgccaccccgcccccttctgggcgccatagagagcgtggcggtatcccggagcctgccgtccggccctaccgggaccgatgccctctagtggctcagtgtccagaagccgccaacgaggacgatccatggcatcccggggctttgacggtaaggtcaccagctcttcagggagggccaaggggtgacgagtacgtatgtggcgccaccgtgcggacagcggttacggggccgagataggagagccaggggagcggggagaaaaacggaagctgagagggcggtgcagcattgggctcccggaaaagaatgagaaaaacactacatttcccagagccctacaaggcctgaagtgggtggagctggaagccggaaaattgggtgcgcaagaggatcagggatagcctctgagctcgggttcccagggttcgtagcttccaacggctgcgcgcgcacttcggtcgcgggcggtgaggtgctgttgctgaaacgctgccgctgagggtggactcgatttcccagggtcccgccgcgggagtctccggcgggcgggcgcgcgcgagccaccgagcgaggtgataga

SEQ ID NO: 3508 - DNA, 2300 bp, Homo sapien
caggtagcaccactctgtgaggcctctcattagacagccagactgcctctcttgagaacagtgtgaatttctttttaattcagttgtaatgtggggctctttttgttaggagttttctatttaagtttttttctttctctttgtttaaaacatttaagagaagaagagtcttagagaaagatgtgatcagtagagataaaaagtcagggagaaagaccctcttctaaatttgtcttaactggataaaggttgtttctaaagctcaggcaaactgccatcttacaaatgagtgtctcataatttaaggccttccttcttttttttttttttgagacggagtctcgctgtcgcccaggctggagtgcagtggcgcaatctcggctcactgcaggctccgccccctggggttcacgccattctcctgcctcagcctcccgagtagctgggactacaggcgcccgccacctcgcccggctaattttttgtatttttagtagagacggggtttcaccgtgttagccaggatggtctcgatctcctgatctcgtgatccgcctgcctcggcctcccaaagtgctgggattacaggcgtgagccaccgcgcccggcctaaggccttccttctatctctttttatgctgtagtatgtattgctcacggacagagcaattcattcctttcagtattctacgtgctttttcttccagagttcattactttttcctctccttcctcttaagcttgcctgtttcctggtctctgtcagtttctttttcttttcaaagttatacattttatgaagaaaagaggagccttcttaactgagacctactttcttttcctgtgtttatttgaatgtaacttcctgaaaataacctgtaggaatagttactcttattttctatcccaagatgatactaatgatcagagtttcaggtcatgtgtggggaagatacaatgctaacttgcattagcagtgttattttcactctttttttataggaaactttcactgtagtgaaactgagctattgaatgttcccctacatttatttttagatctcccaactttggttactacttaactgatattacagctgaagaacagattgggtgtggtggctcatgcctgtaatcccaatgctttgggaggccgaggtgggaggattgcttgaaggtcagagtttgacctagcctgggcaacatagcaagactctgtctctacaaaaaagtaaaaaaaaaaaaaaaaaaaagccaggcattatggctgattgtttgagcctgtagtcctagctacttgggagactacttggggggaggattgcttgagcccaggagtgcaaggttgcagtgagctatgatcacaccactgcactccagcctgggcattagagcaagaccctgtctctaaataaataaataaatacacacacacacaaagaacaaaaaacaaaacaaaacaaaaaacttgaggaacatagaatctgtatcactttaaattgtgtcccaaatcccctttgttattctgtggaaatgtatgtggaagttccctactgtcatcatttcaattaaaataagatacaaaaggtcacttgttgtttcattttactaatattttccgatctgttcatttataacttataaaacaaatataactagaaaactgaataagcatattactttttagttaatgtaattcattcactcatccagtaaaccatttttagggaccactccatgatttacatttgagttgtccaaataaataagaagctgatattaaatacattaaaagataaacaacatgtgagggaaagattgtaaggccatccttgaaaattagcttccctttagcttccattataatgtgggtattaatgatttaacctgttacaaatattactcagtttttgcatgtcataaaagctaaggaatttaggtatcactctaattagattgaggaatcagatatcactctaacaagctttttaatttgttgttgaagtgttcgtcacaaaaggattatgtgattcttgccactagaacgccacccaaagaggagcaaagtgagaacctcaaacatcccaaagctaagttggataacttggatgaagaatgggccacagaacatgcctgccaggttatcttatttttttgtttatatgtttaagttttatttcaaaaaagagctagaatcaagaagatttagtgaatgagtagagagaagagacatagggagaaagtagctaaagatgactgagatttttagtctgggtgtctaggaggatactgttggcatt

SEQ ID NO: 3509 - DNA, 2300 bp, Homo sapien
tactcctcctccaaccccaccttattgatgtatcaatgaactctacatgtgtcatatggaagcttattccagacattgtatcagcatcgtcacactgctgcttggtttgatgatagccatttttgaatggacccaggacctttggagctgtgtggtctgtggcaaattttttgtcaacaagtccttgaccatcttaaagtttaaattgtttaacaacacctagaagatttacattgccttagacattgcttgaattacactagacatcaataatgctctttcaatagctatgcatgtcagtattctcctcttcattatttttccgcatttattcctgattgcataagcacataggcacaaagcacttttcacaagttgtatgatttgacttttgttcttcagaattgatttggttgttgaatgacttatactccaagtgttcttagaacataaattacttccttaccatttccattttttggttattttttgtaaatcattattttttgtttccactgttattataggcctctattacaggttgagtgtgccttatttgaaatgcttaggaccagaagtgttttgggtttgggattttttttagattttgtaatatttgcagaatacataccagttgagcatctctaagccaaaaatctaaaatcttatatgctccaattaccttttcctttgaacatcacattggtgctcaataagttttggattttggagcattcaggatttttagattagggatgctcaacctgtagtactttaactattttgatactgtccttgtttttggcacttattaagatgatggggttgaaaatatatgtgaaacacctgaaaaccgaacaagagcactggcattccttagactaaagaggatgggactagtctatgaaagtttttggttgaaagtgtgtaaatatatgtgtctgtgcattgcttgtagttttaccatagttatcacatcccactttgtatttgttattgtgaacttattttgcattgcacaacttatatctagtacatcatatcttctttgtatatcttttaatcatcacagtactgatgtgaataatttgcaaataatatatttttaggagcatatcgagtgaatattgaaccattttagatggttatgttagaaaaatttagatgtagttgtgtttaatttcattatatcttcaaaatgactggaaaataatatataacttataaaaacaaatatgaaggcctttaaataatttgcagagaataatttcaaatgcttggctcagtcaaaactttgttctctcttcataaaatcgctaatataatgtttaaatatttcctgtagttaatcattgttggttattagaacttaaacagattttgtctttcagctcctgaattcagaccacagatccacagccacagtccagatatgtagcggttctgtaaaccttaagggtgctgtgaaatgcagagcttatatccacagcagtaaacccaaagttaaagatgctgtgcaggtacaaaaaggaataacgagcatatggaaccatgttaactattaacaaaaacctaaaattttaccattttttaatcttatattttgtaattattaattcgattttaactgataatggcctattgtgcagtccaaatgtaccatataattggtgtgaagattttcatatgtagagtatctattttgtgcctttttaaaaatgatggctatacaagtttagtaagtgttccactgttatacatattagtatctaatttggaacactgcaattatttttttagatgtgaaattttattcatttatctgtttttaactatttagataaatttatcattaaactataaatttgttaataagtgtgctaaataagtggaaataaaacattgaatgatgtatcagttatttagtgggcatgattgtactggaaagcaaattattttttttgttagttaaatattgtaaatctaaagtattttatttcttactgtgttttttgtgtgtttttccctgtaggcagtaaagagggatatattgaacacagttgctgatcgttgtgaaatgctatttgaggatctgcttttgaatgaaattccagaaaaaaaagttatgagtataaaataagtacttttttgcgtatcttcaactgatatagtaataagatatcaagatatagcagatacgtcatcttttatagctacctatctatattttcaagcagtatatcatcttttattattggatgaaaatttttcagttgctactcagattttttttttttttt

SEQ ID NO: 3510 - DNA, 2300 bp, Homo sapien
catgttaactattaacaaaaacctaaaattttaccattttttaatcttatattttgtaattattaattcgattttaactgataatggcctattgtgcagtccaaatgtaccatataattggtgtgaagattttcatatgtagagtatctattttgtgcctttttaaaaatgatggctatacaagtttagtaagtgttccactgttatacatattagtatctaatttggaacactgcaattatttttttagatgtgaaattttattcatttatctgtttttaactatttagataaatttatcattaaactataaatttgttaataagtgtgctaaataagtggaaataaaacattgaatgatgtatcagttatttagtgggcatgattgtactggaaagcaaattattttttttgttagttaaatattgtaaatctaaagtattttatttcttactgtgttttttgtgtgtttttccctgtaggcagtaaagagggatatattgaacacagttgctgatcgttgtgaaatgctatttgaggatctgcttttgaatgaaattccagaaaaaaaagttatgagtataaaataagtacttttttgcgtatcttcaactgatatagtaataagatatcaagatatagcagatacgtcatcttttatagctacctatctatattttcaagcagtatatcatcttttattattggatgaaaatttttcagttgctactcagatttttttttttttttttagacagagtctcactgtgttgcccaggctggggtgcagtggcacagtcatggctcacctgcagcctcagcctcttgggctcaagcagtcctcctacctcagcctccctagtaggtgggcctgcaggcacatgccatgatgccttgctaatttttggtattgtttttttagagacagggttttgccatgttgcccaggctagtttcaaactcctgaactcaagtgatccactgtctttggcttcccgaagtgctgggattacaggtgtgagccaccatgcttggctctagaaaaacgttttagaacactatcaaatttagcaaatttgtcaacaattaagaatttcagggaggatttttaaaaaaattaattccaagtgaacttctcctgccagaatgagtaaactttgttaacattttaaagttagtattttttgttgatatctatgagtattttaaataatttagccataatcaaaatattattagtgttaaatactatataatagctcctttagtaggtactatttatataaactacactagtttatatgcttctcagctattactctaacagacttcattacgtttaaaaaaggctgagttacagtatcttacccattaataacgattgcagcttttgggaaacataacaatttataccatcgcagtaatctgtattaaaaaatttttttaatcaaaagcaagttaaaatattgagtacactttttaaagctacatcatcatctccccattctttttttttttctttttttttttttttttttgagacggagtttcgctctgtcgcccaggctggagtgcagtggcgcgatctcgactcactgcaagctccgcctcccgggttcacgccattctcctgcctcagcctcctgtgtagctgggactacaggcacgcgccaccatgcccggctaatttttgtatttttagtagagacggggtttcaccgtgttagccaggatggtctcgatctcctgacctcgtgatccgcccgtctcggcctcccaaagtgctgggattacaggcatgagccaccgcgcccggcctccccattcttattattctgatgttagtggatttgcaattcacatttagatatgtacataattgaaacattcatattagcttcgggttccagcaattctcctgcctcagcctcccgagtagctgagattacaggtgcccaccaccacgcctggctaatttttgtatttttagtagagacagggtttcaccatgttggccaggctgggctcgaactcctgacctcagatgatccacccacctcggcctcccaaagtgctgggattataggcatgagccaccatgcccagcccacattagcttttgaagggaatatttttatgttcataggaaaaaaagcatagctcctctatataaccaacttcttttagtactactgatagctagtatgttaagtttgatggactaattataatcttttttttatattcctagtatgctggattctatgattggcagatttaacatttatccttctcgtaat

SEQ ID NO: 3511 - DNA, 2300 bp, Homo sapien
aggaaggaaggatggatggatgaagggatggagggaaagtaggagacagggaaaaaaaggaaggaaatatctgctgtctggtaaaggtcaccaggaacaaaagtcaaaaagcatttaacaaattggggaaaaacatttgcaactcagttgacagtgtcagtttcctaatatatattaagagcttctacaaatcgataagaaaagaaactaattaccaaatagaacaatgagcaaaagataggacagactattcatggggaaaaaaagaaacagaaaaaagtaacacagaaaactatagtgaaagcaagtaagtttaataacacatttttggcaccctcatacattgctgatagcagtgtaaattggtacaatctctgtacaggcaacctagcaatatcaaaattagtaatgtatatgccctttgaccagggaattttacttatataaccataactatacctgcacagagtgttaaaaatgtatgcacaagattcttcactcagcatcatatgtcatagaaaaaactggaaacaacaatgtagatcacgattaaacagtttaagtcaattatgtatatctacacaatggaacaccatgcctcaattttctaaataaggaagaaccttttcatgtgtgtatactgaaaaaatctccaagatatagtatgaaacagaaaaaacaaggtaaggaaaaatgcagataatacaccaccatctgtagaaaacacgaacaaaatggattctcttttttaaacaaacatacacacatgtatattttgcatatgcataaaacatatctaaaatattgatatgaacactgtatgtgaaaacaaaaagctttgattgcctgcatataatataaacacattcataacaaatttatattaaatatatatcatatataaaacaaaaattattaggcaatatagaggagaaagaaggaatacatccacatatagaatatgatatagaatatggacattaaaggtgtagatatagctaagctttagtgaaggatagtcagtttaatattccttgttttaaagaatttaagactttcttaaatgaataacgttgttagtcatcaggtcaactgaatatcagaattccagttgaatcatccttcatttaattagttttacttaaatctgccaatctggccgggcacagtggctcacacttgtaatcccagcactctgggaggctgaggtgggcagattacttgaggtcagcagttcaagaccagcctggccaacatagtgaaatcccatctctactaaaaatacaaaaatcagccaggcgtggtggtatgcgcctgtagtcccagctactcgggagactgaggcaggagaatcacttgaacccaggaagtggaggttgcggtgagccaaaatcacgcccctacacttcagcctgggcaacagagcaaggctccatctcaaaaaaaaaaataatctgccaatcctattctttctatgtttgcaaaatatgcctagaatcttagaagaatgggatgttctcgtaataattttcctaaagccattttagttttgttgaggtcaggccccctgctcaccagttgttttttatatactattgttattttgtttccccaacattcccagtttcctttattaatactgtaatgccaattttagtttgttgctgaagtttttttcttaggtaataaaagtgctattttttccaaaattctagtatcctatcaggactctaatttttaaatatattaaccccaaccttttgccagtagttcaaagtgcataatttatattttcattagtacaaatgtttccgaaatatcctttaccaaaacccatttaacaagattaatgtgggagcatatttttatgagcagggcagtcagaaatttctagtccaaacaagatgtttgtttctgatgcaggagacaataagtttattccatgacaatacttacacaaatttcaattatgccaacagtccttttgaaaataaaaaggaaaacaatttatttttaatttcattccaggacccaaaggagtaataaatgattggagaaagtttaaattagagagtcaagacagtgattcaattccacctagcaagaaggagattctcaggcaaatgtcttctcctcagagtaggaatggcaaagattcaaaggaacgagtcagcagaaaggtaagataatacaaaaagcagtaataaataatttacaatgtgttttctaatctaaatcaatctagagaatcactttagactattacaaaatatattcattacaatattgcttacgctggc

SEQ ID NO: 3512 - DNA, 2300 bp, Homo sapien
atgttagtatgtataataattgagttttctggatagtccaaagctaaaaaaggaaatagatttgatatgagtgtgaaccagatagaatgaaagaatagattctacatgcgggcaccaaggagtttcgtatgaataaaaatccaagtgcttttagtgattttctattttagcctgtcaaaaatactataaaccggcagggtgtggtggctgaatcctataatcccagcattttgagaggccaagatgggaggatcacttgaggccagaagttcaacactagcctgggcaacataccaaaaaataaaaaaaaacattagcagggcgtggtggcgcaaacacacacctgtagtccccgccgctcaggagactgacgtggtaaggtcacttgagcccagaagtttgaggctgcagtgagctaaataaaacagcaccatcgcacttaatgaagcctgggagacagagttagaccctctctcaaaaaacttaaaaaaaaaaatactataggcttacctactggctatttccatttgcttggtggctactgttgtcatgaaaacttgtcccatggtatggagagatgctattgaatagtgttccttagaccatcattttttaatgccaattcaaagatttgatttgccaaatcatactgagaaaaatgactctattatagaatgttaatttccataatagtgtaatgattaagagttggctccaaagtcagaaaatgtaggttcaaatctttgctccaccacttattgtatgatcttgggcaagtaacttaaactctctgcccttcagcttcctcggttacaacatgtcattaacaattgttcctaccacatatagctatgtgagaattaaatgagttttgacacataaaataatttaaacaatgcctgacacatagtgttcatagcaagtatataattattaatttaatttttattatatgaaataagtaacatatattacgtcatatattcaaatttcacataatattaggaaattaggaaaatcagtaataaataatgttcactaaccacatagacttaactggaaggcttgagttaagaaaagacaaatgatgaattatataaaatccttaagtccagacatctttaataacacatgttaaattaatgtccttttacattgcggacagaaacattctaaatactttaccacttactttaccactgagtgattatccttagcctacttatggaatctggcagcaggagactataaatatgcatgtacctatatatttatctctatatatatgtatgtacatcctggaattcttgtgtcattattatttctttgttcctcctatagattatatcaaatccagtccctaaaatggaagaagccaaaagccaaagtttggaggaagactttgaaggacaggccacacatacaggcaagcaaagctagaagaaaaaataattattaaattaaaattaaatatggcaatatctaatgttcttattgacactattcagtatgtactttaagtaatatctttatataaattgttatgctaatctaaaaaatatttgagcgggcaaattaatttttgaaatcaaataattcctaacagttttatttagatgtcaaagagtaaaaaaacaaaaacaccaattactggtaatttcttgctgcccagctatcacaagacctcttatctacactataattaagccactttcctctctcctgattgtaccccaccctcagtatgaactttcattgtaaacaagattagaccaaaaggttaataaatggcctttaatttcatttttttcatctaataaagggaatgataagatattccctttatttttttgaataaataaatttcagtattcctccagaaaacttaacacttcatttcatccagagtctgttttcttaatctgttaaattatgtttggctatctatatgccactcctaagagcttaaaacttaaatttaaaaattcacatttaactctactaaatcttatttgaatggtaatttcctctctcttttaatttggattgagccattaaatttagccagaagtttgaaagaattcacaagagtaccagccaaaatgtgtggagatttattttataatagcaatgtgaggaataccttcctaattatgacaaaaacaaaaacaacaacaaaaagaccattgaagaaaaggttggtaaattcatttataaaaaggaaggaaggatggatggatgaagggatggagggaaagtaggagacagggaaaaaaaggaaggaaatatctgctgtctgg

SEQ ID NO: 3513 - DNA, 2300 bp, Homo sapien
ttccactaatattggggaataaatgcatcagttagataagttataaaacttatccaagcctgtctcctcatctataaaattatacttgacctacctcaggggattgttgtaaagattatgcgaagtaaacaattagtacctgacctggcatgatgagcactcagaaagtgtcctaattattaatatttttatttctgttttctaagattattttcagctggtttataatgtttgtgccttgtaaagtatttagtattcttaaaattggatgtaaaatcatatataaaaatctaaacactatatcaacatataattctaatacttttaaatgtttttacatcaatcaagaatcatatgtgtgaaataatgaccttttgggctttgactcttgacaagttttcatgatctacaaaaattactcaattcataattgaagcaattagatcagatatgcttgtccaaattgtaggcaagtgtgtgatgtccgtaatgaccccaaatccctccagtgaacaggtgccagagatagcacaaaataaaaagcaaattatggaaatatctgtgttgggaaggtgggggtaggataggaattgctatagtaattttttttttaccgttaagtctctatgcttgtgcctatattacatatttgaacatatgagtaccaagctatatttgacagtaacttaaaacatattttttgaatgttaaaaccactatgacattttttatcatcaaactgaaatattaaatttcttcacatttgccatcagaaggcatcttttaagttacatttgtattgcacctgactacattctagattctttagctagagagaaaacactcagttcataaaaactgaaagtgaattgccctgagaaactctgttgaaaagcatatgtatagcacacaaactggaacatgaaacctgctaaatgggaggtaaaaatttgatttaaggatgaaaatgaaagttaatttagaaaatactttgatttctggaagaatctctttgaaaatatttatggttgtgactctcttaaatattgtaaattttatgtactcttctctattcttgaaatcaaattctacaataaaaaatatataagcaaacaaagttctgaaatgtgacaggtttccctcttactaacaaagagtaaataaatgacaaattaatttagtataataaaacataactattaaaatttatttagacactatcactgtttaaattgcattaagatccacttaaagtttctgggtgaagctacatatgactaaaccttataatttaaaaatctaaatgtgttcattttaattgccattaatattaaaaattttgtcctcttgctaattaaaaatttccagttttaagcttagagtaaattaaatctcctactttggcaaagttagatgagaatttggctgtgaggatgaaagatgttaggaaaagatggaagattaaacacatgcatctacttcccctacatctcaaaactccattaaaaaacagcaggaaaggaatttttaatggtaaaaaccagaaacaataaggagaagtgaaaaggagaaaatgccaataaaactagaatccagaaagcaagtagatctgtaaagacagcccatctgaaaaaattgtattaaaagcctgtagtaagagaagatgaaaatcatagtatctctcttattcctcccaatgttgtagtaatcatagcacttcattgtgattatctttttacttacctgtctcccccactagactgcaagcctcacgatataggaaatagggtttatttgtctttgtaccctagtgcctagctactgcttgtttcacacaaagtaggtgctcagtagatgattatgggactaatgaatacaactcatgttattgcgataaatagtactaataatgacctctgtctctcatctattcaatgtgttctgtaaaatataaactgactactctttgtttggttttgccttattattaatgaactggccttgctaattctgtcaatcctattacttgttcagagctatttctgcaagggtcatcaatatctggagattttaaatctgagcttaaacctattgaagttcaagacgagttcagtagacagggattctcacccactcaacaaggacaccaggcacagagatccaaactgtgagtccacaagtagtccttttgataatataattttaaaaattttaccttaggggaaagaatggtgattcactgtttatgtattattgtgttaatgtaaaatagttcaaagtacataaggttttgaattatc

SEQ ID NO: 3514 - DNA, 2300 bp, Homo sapien
cttaaagtcccagattctccttgaacttttttttttgactttccaagtacatggaactcttcactctatcctgctatataagtgacagaatttccactatgggatagatggagttcaattcctttgagtttaaaataatctaaatataattattccttatgccctgtttttccctcacttttgtatccaaatctcttttcagacaacagaacaattaatgtctgataaggaagacaatgatgatgatcacttcaaaatgaattcaggattgtaatgtaaaattttagtactctctcacagtatggattctaacatggcttctaacccaaactaacattagtagctctaactataaacttcaaatttcagtagatgcaacctactcctttaaaatgaaacagaagattgaaattattaaattatcaaaaagaaaatgatccacgctcttagttgaaatttcatgtaagattccatgcaataaataggagtgccataaatggaatgatgaaatatgactagaggaggagaaaggcttcctagatgagatggaattttagtcatccgtgtctcatgaagaatcagatgtgtacactaagcaaaacagttaaaaaaaaaacctccaagtgagtctcttatttatttttttcttataagacttctacaaattgaggtacctggtgtagttttatttcaggttttatgctgtcattttcctgtaatgctaaggacttaggacataactgaattttctattttccacttcttttctggtgtgtgtgtatatatatatgtatatatacacacacacatatacatatatatattttttagtatctcaccctcacatgctcctccctgagcactacccatgatagatgttaaacaaaagcaaagatgaaattccaactgtcaaaatctcccttccatctaattaattcctcatccaactatgttccaaaacgagaatagaaaattagccccaataagcccaggcaactgaaaagtaaatgctatgttgtactttgatccatggtcacaactcataatcttggaaaagtggacagaaaagacaaaagagtgaactttaaaactcgaatttattttaccagtatctcctatgaagggctagtaaccaaaataatccacgcatcagggagagaaatgccttaaggcatacgttttggacatttagcgtccctgcaaattctggccatcgccgcttcctttgtccatcagaaggcaggaaactttatattggtgacccgtggagctcacattaactatttacagggtaactgcttaggaccagtattatgaggagaatttacctttcccgcctctctttccaagaaacaaggagggggtgaaggtacggagaacagtatttcttctgttgaaagcaacttagctacaaagataaattacagctatgtacactgaaggtagctatttcattccacaaaataagagttttttaaaaagctatgtatgtatgtgctgcatatagagcagatatacagcctattaagcgtcgtcactaaaacataaaacatgtcagcctttcttaaccttactcgccccagtctgtcccgacgtgacttcctcgaccctctaaagacgtacagaccagacacggcggcggcggcgggagaggggattccctgcgcccccggacctcagggccgctcagattcctggagaggaagccaagtgtccttctgccctcccccggtatcccatccaaggcgatcagtccagaactggctctcggaagcgctcgggcaaagactgcgaagaagaaaagacatctggcggaaacctgtgcgcctggggcggtggaactcggggaggagagggagggatcagacaggagagtggggactaccccctctgctcccaaattggggcagcttcctgggtttccgattttctcatttccgtgggtaaaaaaccctgcccccaccgggcttacgcaatttttttaaggggagaggagggaaaaatttgtggggggtacgaaaaggcggaaagaaacagtcatttcgtcacatgggcttggttttcagtcttataaaaaggaaggttctctcggttagcgaccaattgtcatacgacttgcagtgagcgtcaggagcacgtccaggaactcctcagcagcgcctccttcagctccacagccagacgccctcagacagcaaagcctacccccgcgccgcgccctgcccgccgctgcgatgctcgcccgcgccctgctgctgtgcgcggtcctggcgctcagccatacaggtgagtacctggcg

SEQ ID NO: 3515 - DNA, 2300 bp, Homo sapien
gacaaaccaagtggagaggggtcttcagacataattgatcctatagactgaagcacgctatggaagtcagggcctatcttacctaaggtggaagcagaggtttttgaagtcagtaggtcaatgctgaaaatatttttggaggaaattgggcaaagtgaagacggcaaatctgaacttgtactatccacctaggggtctatgtgaacagtgagatcacaagtagtgagccaaaatagatgagataaggaggccatagaaccacaaaatgggtaaatgggatttggtctgcactgattccagagaggaaaagacatacctgcagcagcctttattcattataaaggtggagataaatcagcttcatttagtaaggcgggaaagagacaaacttctccccgtatatattaaccctaaccatgacatataatgacattttctttaaaagcgtttaaataaattttttatctttaatgcatgacacactattggatatcatctggaaatattgagagctataactttttgttatcaaaaaagcactagagcactttttttgtgctctataagcaagcactgtgaagctgcttttccagggagtcttttttatcagagtcttagaacgaacatgccctgcagtatagattctttctttcaccagttgtgtctgggggaaagagatgaaaactaccagtgtgctctctgctcctctaattaacatacacctcctttctagaaattcagggatttctttggaaagagaaatttttttttttttttttttttttttttttttttttttttttttttttttttgagacggagtctcgctctgtggcccaggcgggagtgcaatggcgcaatcttggctcactgcaagctctgcctcccgggttcacgccattctcctgcctcagcctcccaagtagctgggactacaggcgcccgccaccacacccggctaattttttgtatttttagtagagacgggggtttcaccgtgttagccaggatagtctcgatctcctgacctcgtgatccgcccgccttggcctcccaaagtgctgggattacaggcgtgagccaccgtgcccagcccgaaaaatgtttattataaatctatccttcctaaaaaagacattactggcttttttttttttcaaagagagatttataatatgccaggttgaatttaggggaaaaaaataaaaacaaataagagttgaatgttgggctacagaaagcagatattccagaagatttagtgaaattatattctttgaaaatattgtaagagagttaggagagtgagttcagtatttaattaaaggcaaaaacaagatcctgtgtttgaaaaacaagatatactaaatgaacatgtcaatctttaaagacatgaattgattctcatggaatttgggtacatttaaacaatgcaccttcttcattacagtgctataaggtatttggatttacactgcaaatttggaattcaacctgatttcattttcttccctaaatctcaacatatatattacattatttggtatgcctttaatcttaaatttacaaagaaattattatcaacacaggtgttctgagtctggagtggaaatatttaaacagatttgatttttaaagtggtctgatactcattttttaaaaatgtacatttttatatttggggtttgttataaactttgcctttttaaataatgcaaaaatgctctaggttattcactgtcttttcaattttgttctcctttggaaaaaaggaggaagtagttactacttaaggacaagtagcaatttcagacgcgcgcacgcacacacacacacacacacacacacatcacacacacagaaatccacaacagcactcatggaatttaggactgattaatttacatattatttaagcatattttctgacttcaaactcctggttctaataactaagcatttacatttacaatattagcttctatgagaagagagcgttctccctcttcccctttaattccaccttaaaacatctgcaaaagcgcaaggagaccagcccacattttagcccctcctactcaggataagactttctctaagtccggagctgaaaaaggatcctgactgaaagctagaggcattgaggagcctgaagattctcaggtaactctgggaactgtaagcaatatatttattcttcctctgctccacttctctctcccaccctccttagcttttacttggtagtttacttggaaggaagaaaggacggaggggaaacctcgctgctttaaaaagtc

SEQ ID NO: 3516 - DNA, 2300 bp, Homo sapien
atacagaagcagaagatgtgttagagataataaaaacccctgctttctttgttctgtatgctctcaccattgctccatatgcaagacacacccttctgcagaggtaaatttgccttgctgatatgttctctgtctaagtacttgttttctttgtgactccaaactcttatttccaacaatgagcctggagtctgtgactgtagtcccaattgctctggaggctggggccagaggatcacttcagcccaggagctggaagctgcagtgagctgtgattgctccactgtactccagcctgggtgacatcccaagaccttgtatccaaaaatgaatgaatgaatgaatgaatcaatcaatcaatcaatctttttttttaaattagaaataaaagggatatctctcatgtccttgagaaagacatttctgggttgtaacattggcaggagactttctaaatgattcacatctcgaagggaaagaatttataagtgttgtaaagttaatgctttaggaaatagggagtccagtggcctagagtcggaaagaggcctctttaaacattagttgatctgattagaatattaaggctatcttagttcctggttaagtagctattcacttcctctgccctacttcccaacttggctcacattttagggtctgtttcttataaaaatacaatagatcaaatttggttttagaattttttttttttttttacagttaagacaactcaatctaaattggtttagtaatgaattaattggtggatttaaagacttggacaatgaaaacttccaaagataggctaattttcaggcttagtggatctgctgtctttgtatttgctccattctctgcctgacttctcccacggtaggaagagtgttctaaaagcaacaagcttatgtgatcattctgacagagaagagggtgtggtgggcgggaggtttttaaaatttcaaagaaacgttttgagctttacattgattggaccacccttgaattagaatatggcaacggtgctctccaaacactggttcatttctgacccagtaactgcagtaatgaagacagaattttcatgaagctaagggactctctggagtgaagggtaaacttaatccatgtaaacctcttggttgctacaaaatggggaagaggagaatgaattcttgaggtgcacatggggtaggagaagaggatgaggatatggtatcttctactactactaggatatgattgtcaagtaatcttgttaagccttgaccagtgctacagtactacaatccactaataaacaggattttgccacatgataacatatggccaccttaaatgcagctttactcaaactgaaattattctctcttacttattcctctttaaaactgctccactttgctatagggtcactctggggtatattttaaatctaaaatctatcagttactaattgtgtgattgagagtaagttgctaaactctctcacattctattgttccttttataaaatagaaattaaaatatctctttggcagagtatcatgagaatgaaaagaatcaacattttaatgtgcctaattctctgcctggcttatagaataaatttatttaaagtcacttactttcctttccttccccttgtctaccataacaggttaagcccatgtgtctggattttcagttacttcagcatctcaattaatatattcacttagtgaattcaacagaatttcttgcctggtcctcagtgtatgccatgtgctttcttaagcctttgctcagtctgccttcagtacatgggaagtcctctgtccatttccatcccacatttctgagccttggtttaatcttgtaaaaagaaaaaaataatacctatttcatgggttgttgtcaaaattaaaggagactctctagaacttagacagctaccaatatatggaaagtgctgtaattatcattactgtaccagatattttataccctgggccctggtgagacaagccagatgggaggggagtccctggaaaaactccaaccggccagtgcactggggtggagcctcaggaaatgtgtgccctttgcagcaaagagcgtggttcctcctcttcctgggtgtaaactgcgattcaaaaagccaggtgggaagccctgtagtagggactctggctttgtccctgtttcccccttttcttcctcttcacccactaaaaccctgttttactcacggttcaaattgtttggcagcctgaattttcatggccatgggacaaagaaccccgtctttagctgaatta

SEQ ID NO: 3517 - DNA, 2300 bp, Homo sapien
atatttcaaatcacacataagcacgttattttaggcattgtattttaattcaggcatagtatttgtcagtacatttctgattttgtgaattagctggtgaacagttaattggacacagagtactcatttcagagaggagcaatcagaagaaacccctgattatcttggttctgataaattgaaattcaagaatagactttacatgaaaaatttaattgcctcactcttcatacttgtctgcccccaacccttgtgtttaataggcatgttaatatggtcagtgccttttgcttttatgaacatttctatggacttaactgacaagattatcacctcctcttccgtatagttgtgttgagaaacattttaatctttacttttacttcacaattgacacataatgaggaaagcacgatattcattaaatgccaaacctgcatgtatcggtaatttttaacacccactgagggttttctctgaacatccgccccccgccctcaaattaaggacaagttcctggtctctacaacatttccttttcttgggatacatggaggtaagaacctattgttcacgcttttcttttccttttttttttttttaatttctgggaaataactattcttgtcgtcattgatggctgacgcgacaacccaagcaatgtttttttaaattcaaaagcccttttagctcccagacataaaagtactccagctgcagcgtcgccccatccccccgtctcgggattcaagggcttttcccccttgactcccaccgagagggaacgggggttgagactgtggtccgcaccacttggcgcccctcacccgtcactaggtcactagtttctacctggtctctttcccagtccggtcgtcctgcctgacaagccagtgccatcagagtccgtgacttcatttgaagaaaggagggcttcatataattcaattcaaacattctctttggaggactgctgttgttgcgcaagggtggagggaggaaaaaaaaaagaaaaagaaaaaaaaaactttcagtacagtcagatccagtaaggaacagacagtcagtatttaggtaagtgcgttttgctgtattatacctgaagctcaagcgtgtgaaagggaaatttacatctgaggggctcccgctgccaagaacgttttaactggagggttatcaacaggcgactctgcgtggagatttctccgcagctcacggcaacgcctatgccacctgagctcagggaacggaggagagcaaggtgcctggttgaccagctggccccaggcttggtgttgatgtgggaataacccatgcgtgtaggaaaggtgtcccctactctgacctgctagctcaggctctgcactcagcccctgcagcgaacgtgtgcttggtgtgggcatttgcagccccatagagtggggtgcgccagggggtttccatccttccagaatgctccatttccaaccttcctaagccaaacttgagcaaacctcttctgtatgagagaatagacttaagatctctggagtctcttagtacctttttgcgttaatatttatttattttaatgagctatatttaacgttagtaaacgacgattcctcagaatgcctgctttataaaaccctaatcactgtccttgtctgactgcgaagtagggtttagaactgttgaatgacttcttaggctctgtgttaaagtattattgctgacggtcactccttcctttccttcaccaactcccaagaatctggagggcggtggggagagcggaagagagttagatttcaacttgaagctagagcttggaatataaggttgaagttaaaagcaaagagtgagggtttggaatctgtctagcttatattatacccactttaaagttggccttttatttttattttcctctttctggaggtgggggtgggaagtaggaagatctgggactgggagcgctctcttccagagtccaccggagagggggtggtgcttcttggccgctggttactgctggttccacagccaaacagtgacagagagtttaagtctctgatggctgttctcctagtccccaagagttgaaccggagaggcttttactttgcaccaggtcgagaacgtgatcagccctttagagaaggaacctccttgtaacaggaattctgctgggaaacgccgtgtaggcactacctccgaagataagatgcatgtttggagctgtgtaaaatgcccactggctgtttgaaagaaggaaaaggtgactagggttgcaaattaaccttagtatcacttaaaaat

SEQ ID NO: 3518 - DNA, 2300 bp, Homo sapien
ggagctaaaagggcttttgaatttaaaaaaacattgcttgggttgtcgcgtcagccatcaatgacgacaagaatagttatttcccagaaattaaaaaaaaaaaaaaggaaaagaaaagcgtgaacaataggttcttacctccatgtatcccaagaaaaggaaatgttgtagagaccaggaacttgtccttaatttgagggcggggggcggatgttcagagaaaaccctcagtgggtgttaaaaattaccgatacatgcaggtttggcatttaatgaatatcgtgctttcctcattatgtgtcaattgtgaagtaaaagtaaagattaaaatgtttctcaacacaactatacggaagaggaggtgataatcttgtcagttaagtccatagaaatgttcataaaagcaaaaggcactgaccatattaacatgcctattaaacacaagggttgggggcagacaagtatgaagagtgaggcaattaaatttttcatgtaaagtctattcttgaatttcaatttatcagaaccaagataatcaggggtttcttctgattgctcctctctgaaatgagtactctgtgtccaattaactgttcaccagctaattcacaaaatcagaaatgtactgacaaatactatgcctgaattaaaatacaatgcctaaaataacgtgcttatgtgtgatttgaaatattttaagaaaaaaaaatggtgccctcaaaactcacagtcctcttcctaccattcagtggcattttagtgcttaaggtcttgctaaattcataaaaatacactttgcaacaaagtcttccttcagtcatgtaattgcttatcatgaacaaatgctgacctgaacaaccttctgaatatccgactagcgaactttccagaccttgcaattgtcagaaggtctcttttaagctctctcttagataaacctataaaatgtgacatttcaaatggcacaggaatgtgtgccaagaagggttaatgggggtgggggcgattaatgtccgtgtaacccataatataaatgaggacaaatattttaaaaataaagaaggtaaaagatattggggtaatacatgggatattggggtaatacattacatgggttatgtcttagcagtgcagttgccactaacatactaattaataaatatggccatatggatctttcagttctgaaagtaacaaaaatgtgaaaaatgaaatacttcaacaaaacagagcttattaaaaatagcaatagttaagtttctagtaacagataaagagaataacttaccagaggaaatttcaggaagcaagaagactgtgagaaaaatacatccaggattcaaatagatattccatgatcttccaaatcaaggtaaagtagtgagctgcagggtagtaggactttaaaataatcagcagttcctggtggcatgtaaccaagtaaaaaccagttacacagagagccacgaacccccaaggcaagaaagcagaatgtgaaaatgctttatatgggggggtggggaatggtggggggtgattcgtggtgatccttaagcaaagtgaaaatttacaggctgcacatccccatacagtggggaaaggcagaagctgtgtaaccccagagaacaggaggtggaatacagataaatctgcaaagagaagtaaaaggatgtgttgaagacaacgagataaagagagaactagtgagcaaggctgtagtcatcctgatagatatagcagcaagaatgatttaggctgctggggaggatccaatgagaattcaagagggcaccacttcggaaatcctgctctgatcttcccactctcagttctttaagagttacctgcgttgggaccattatcattaggattaatagtattccatcagtgcatttcactagtatttcccttgaacattttcacttgcagcaactgagggaggcgtagtaaggaagcccaacacaaccaattcccccactccccaaataaaccactacgaccggtcacattacgatgaccaaatcatcagcgatttgcacgaggcggtggggggtggggggtgcgggcggtgatcgaagggctgaagatgcggaggaggccgagtcgctaggcgctttcgggggcgctgtgccggtgaggcttaggcaaggggacggggaaccgtggttagatgcagcagcggcggcagcagccctcccaggtcccacttctttggcgttcctgctgcctgtgactcaagacaattgacttccacctgaaccctcagctccgaacgccttgcattagaagctagagctttg

SEQ ID NO: 3519 - DNA, 2300 bp, Homo sapien
agagactcatggaaaaccagagggctttatgaatttgtagtaccaccacaatatgccattgtggatactactaatttgtatctggtgcaataattggaaccgagatgcacatttaataagtggtttctatagctttaatatacctgcgaaatgtgaaaaataaccattcttaattttggaactgaaattgtatttcagaacatggccaagacatactaaaagcatagacatgagcccactacctaaaactcttttctttattttcagaaaggaaagacagttagtaggaaataagggaaatacttaaataccacttttggaaacaaacagggatttaactgctttatctgtctttgagtttttaatgcaggatataaaggaccttaaagcgttcatattgtctccttaaaaccctctacttcaatttcacccttacaagctactactctcctagggaagaggaaaaaaaaatttccactgacccagctcgtgatttacatacagagagcaaataaatgaatggagtgggggatggggcagtgagaagcaatctgtttctttttcaaccgcagaaaataagattacttaccaagaacatttttatccagggcaaatgtttattccctctatcattcagcgcctcagtctctgcaagaaatcaatttccactctacctttccctcctatttctaaaaaagagagtgaggcggataattcttaagcttcggggtccggaggaagatagagctagagcggagggcaaaagactcccacagcgctctttatacagatcccagctctgagagcgaacccatggggagggggcgggggatcatctctaaggagagtactccgagtagggagggggattcattctgcagccaaaatataaatcatctacaaacagattactagcctctcagtcacacaggcagttcccttgggaaaccggtttcaaagaggaagaagttcctggagagagagagagagagagagagagggagggagagagagagagagagagagactggggtttggacttgcagagggaatggggccaaggagaggaatagggagaaggaataaagctaatcttaccgatcgatcaggcgatcgtttgttcagtattgggacacgaaaatggcaagataatgcattcggcagcaaagccatttctggcacactctctctcagttactgcaggaatcagaggggaagcgggcgcctcgaaacctaccacttgctccccagggaccgtcctcagaacctccaaagctctagcttctaatgcaaggcgttcggagctgagggttcaggtggaagtcaattgtcttgagtcacaggcagcaggaacgccaaagaagtgggacctgggagggctgctgccgccgctgctgcatctaaccacggttccccgtccccttgcctaagcctcaccggcacagcgcccccgaaagcgcctagcgactcggcctcctccgcatcttcagcccttcgatcaccgcccgcaccccccaccccccaccgcctcgtgcaaatcgctgatgatttggtcatcgtaatgtgaccggtcgtagtggtttatttggggagtgggggaattggttgtgttgggcttccttactacgcctccctcagttgctgcaagtgaaaatgttcaagggaaatactagtgaaatgcactgatggaatactattaatcctaatgataatggtcccaacgcaggtaactcttaaagaactgagagtgggaagatcagagcaggatttccgaagtggtgccctcttgaattctcattggatcctccccagcagcctaaatcattcttgctgctatatctatcaggatgactacagccttgctcactagttctctctttatctcgttgtcttcaacacatccttttacttctctttgcagatttatctgtattccacctcctgttctctggggttacacagcttctgcctttccccactgtatggggatgtgcagcctgtaaattttcactttgcttaaggatcaccacgaatcaccccccaccattccccacccccccatataaagcattttcacattctgctttcttgccttgggggttcgtggctctctgtgtaactggtttttacttggttacatgccaccaggaactgctgattattttaaagtcctactaccctgcagctcactactttaccttgatttggaagatcatggaatatctatttgaatcctggatgtatttttctcacagtcttcttgcttcctgaaatttcctctggtaagttattctctttat

SEQ ID NO: 3520 - DNA, 2300 bp, Homo sapien
gtggacagatcacatgaggccatgagttcgagaccagcctggacaacatggtgaaaactcgtctctactaaaaatacatgaaaatagcccggtgtggtggcaggcgcctgtaatcccagctacttgggaggctgaggcaggagaatcacttgagcccattaggcggaggtgtcagtgagctgagatcgtgccactgcactccagcctgggttacaagagtgaaactctgtctcaacaggccccagtgtgtgatgttccccttcctgtgtccatgtgttctccttgttgtggggggtgagggaggtgggagggatagcatttggagatatacctaatgttaaatgacaagttgctgggtgcagcccaccaacatggcacatgtatacatatgtaactaacctgcacgttgtgcacatgtaccctaaaacttaaggcataataaaaaataaaaaaaaaactctgtctcaaaataaaataaaataaaataaaataatagagtctatgacacatcctatgttagacaagtgacatcctttaccatttgtaaaaaatctaaaaaaggaatttcagctttttaaagatataattgaacagaaagtaaattcttaatataacatcattagaggcacacaatcgtcacatatacagaattattgaatgaatgagagaaaaagagaatcctggttttattttctcttagaaagacttgaggtgtaattaaaacacagcaaaattcagataaggtatctgaattaattaacaacatagagaatcaagtaggaaattgattgaatataaggtcaggagggatccaaaatccttatttttaaaattcttgaatagtataaatgaattaaaatgtggctctggatctattttctcttttaggatcacagagaagagcgtatttcctcataatcctatgtgtctaagaaagcttttttgctctttttttttttatttttttttttagaccgaatctcactctgtctcccaggctgaagttcaacggtgcaatctcagctcactgcaacctctgcctcccaggtgcaagtgattctcttgcctcagcctccttaatagctgggatttcaggcacctgccaccatgcttggttaattttgtacttttagtagagatgggttttcaccatgttggccaggctggtctcaaacttctggcctcaagtgatccgcctgcctcggcctcccaaagtgccgggattacagacgtgagccaccacgcctgacctaaagcatattttaaaaggttatttgaaaataatgtttaatatacaaaaaaatagcaaaaataaataatgcaaagagcccctgtgtcctcttaactcagatttacccaatgttaacatttggaccagttgctaagttaacatttatgctctctcactcttcttttctatcctagtatgtgtctcttatttctctttatccaaaatgaacctttgagaatgagtcacaggtaacatgtttctctaaatattttcatatgtatttcctaagaataaacacattcagctgcataattacagaatagttatcaacttcagtatgtttactctcagtatagtactgtaatctgccattacattctaattttgttagcttgtccattaatagctttttctctcctccagtgcaatgtccagtctagattacatatgacattaagttgtcatgtatctctagtgtattttaacctgaagtatttccaaggccattttatcgacaatgacattttcaattatagttctcccaatccaccccccccttatttaataataaaaacaaatcttcaatttgattttgtttgatacaatctcatgatttaaacaagtttatatattttcagccagaatactataaaagatatgttgtgtgattttcagaacatcacttcatgaggcatgtgatgtctgtctgttgctcatcagtgatattaatttcagttgcttgtttttcttttgtagttactgttcttttccttgtagtctgtggaaacacactttaagttcatgcaaatatctccctctctctctttttttttttgctcagaacttccctcctcaagttttcaaccgttggtgactatacttctctctttcaccagtctttaatttgcaaaaaggattattaatatcaaaacctgcaattacgtttgtaccaacctaatatttaaacgacatcacttaatctgcatttatcaagaagtactcagcatttcaaggtaagaaatagtattcctgtctcatttatgcatgtatgtatttaggattgctgaag

SEQ ID NO: 3521 - DNA, 2300 bp, Homo sapien
aaactaaaatataaattctccccaaaattggtctatagattcagcttaacttaaaaaatattcccaaaagtactttttaagaaattgacaagctgattttaaatttaggcaaatattttaagcatatagaatagccaaaacagtctttaaaatgaacagttaaggaacatatttgtctccatttcaaagcttaacatgaagttgcagtcattaagagagtggtattcaagaaaaaaaataacaggtctatgggacaggatatagagtgcagaaatagatccaggtgattttttgaaaagccatcaagtctatttattggtggatgtaaattttttctctttctttttcaataaatggtggtaataaaataggacaaacacataggggcaacaattcttgacctcacaccatgaacagatattagaataaattatagatataaatagaaaaatgtaaaacttatgaagtgtttttttttttgctttgaaatatgcaaattttcttagggagaatagaaaaatagtaaacaaatggaagaaaacacttaagtttcacttcaccaacttaaacccttatgtttgtcaaaacataaaagaaattttaaaaaccatcagagacttagagaaaacgcttttctgtctattatctgacaacaacttgtatctagaatacataaataattcccacacataaataacaacttagtaaaaagttggacaatagacttgaaaatatttttaataatatcaccaaaaaagatatacaaattgccaataagcacatgaaaatgtgctaacaaactatagtatacgcaacaacatggatgaatctcaaaaacattattctgagtgaaagaagccagatataaacagcacgttttataattccatttagctgaagttcaagggtagataaaactgatctgtagtcatagacagtcacaaagtggttgcctatgatcaatgtatattttctggaaaatgattatagatatttattgaggagatgaaactgctgtatcttttattggggtgttgattacatggataatgcatgtgttgaaattaattgaattgtaccttgagttctgaatattttattgcaagaaattttatttcaattacaaagataatttctgcccagattaattacatttggtaattaattacattggctatgttaccagtctgtgagtattggtattttgaatagagaatgtatttcccatacccgcaatggcacaatttgcaagcattcatttataatattactccagttattttacaaccttgagggaaatttaaactgtatcttttctggataggtgcaatggctcacacctgtaatctcagcactttgggaggctgaggagggtgcatcacttgaggtcagggttttgagaccagcctggccaaaatggtgaaaccctgtctctattaaaactacaaaaattagccaagcatggtggtgagtacctgtaatcccagctacttgggaggctgaggcatgagaattgcttgaacccaggaggcgggggttgcagtgagccaagattgtgctgctgcactccagcctgggtaacagagcgagattccatctcaaaaataaaaaaaaaaaaatacaaataaaatgtatcttttctgaaagataattgccaaatatacatatatatatataatgtgtatatacatatatgtataaatacatccaatgattatttttcagcctaatacataaggtgatttagaagaaataagtaattttcttgatgtactataaataggttgttaagctggcatttcaactgaggcaatgaaagtctagagcttgttccatattctttatacattctgcctccaataaatggtaactgtcaaatgaaaactatttttatattaatcaatttgtgctataacaaaattccacagactgaaacttacaaataacagaaatttagttctcacagttctggagactgaaaacccaagataaattgctggcaggattagtgtttggtgagggtccagtctgagcttccaagttgttgccttgttgctgcatcttccacaggggaagcctacgtcttcaccataagaaagtctataaagagcaagagagtgtcctttcaacctcaagcccttctcatgaatgagtgttaatctcattcatgagagaagggtggagacttcataattaaatcacctcccaaaggtcacaccttttaatgctgttgaattggggattaagtttcaacaaaaatgttgaagggaacatcatcattcaaaccattgaaatcctcc

SEQ ID NO: 3522 - DNA, 2300 bp, Homo sapien
gtcgcccaggctggagtgcagtggcatgatctcggctcactgcaacctctgactcccgggttgaagcaattctctgcctcagcctccccagtagctgggattacaggcacctgcctccacgcctggataatttttgtatttttagtagagatggggtttcaccatcttggccaggctggtcttgaacttctgacctcatgatccacctgcctcagcctcccaaagtgctgggattacaggtatgagccaccgtgcccggcaacttgtgcccgtattttcacaatttctttttccacggttctatcagcattgtgtatagcacacttcacacataaatttaacatatcttatgaaaaataatatattgattttatgtctttaacttctctgagttaacagttaagttatagtcctagtgactggatgatgtccatgctcctatgattttctcttgtgctcattcaccttcataggattaaactgatataaacacagtggatactaatcattactaggggacagcagggtggaagcataatctgcattatcagtatccatttccagcagaagctcaatgcaaaatgccatcatacataatatttttcaattctcagccaaggtgagagatttaaaatatgttcaaagtacaagtcatggaatcagggggtatatgtataaatatatactagaaagtctttaatttcatatagataaatgttttgagcttttagctggtatccctgataaattgtcttggtaaaaaaataattcaaaaagactgaaaataaaattttcttttaggtttgtataactcagctttcaatatataccattttagattaaagcattcactactggagatcaaagattcttggaaggactaaagcacatagtaggtgatcaaaggctctgataattccagattttccactggcctgtctctgaaactttgtaggattaaattacctaatgcctgtgaactttggtttatttttcaataaaatttgaattatggactagaactgcatttgtaagacttttgtattctataaaacagtgaaagaagtggaggctaaaccaattggagttgtcaacattttttttaataaaggcattaaaatataaaaactaccatctctacttaatccatgtcattataaagaacatttttacattataaagaacattttaacaacaaaagagtcaggagagcaaattcaaaatagcaagtcctttatatcaaaggaattaaaataaagctttaagaaaaaaaacttttcatatttttttccatttcatcacagactgataaaaatttcaaaaatgtctaaaatcattctatagatatgtgcttaaaactttatttatttatttgagacagagtcttgctccgttgcccaggctgaagtgaagtagccggcatgatctcagctcactgcaacctccgactcccaggttcaagggattctcctggctctgcctcctgagtagctgggactgtaggtgcacaccaccgtgcctgggtaattttttgtatttttagtagagatggggtctcaccatgttgcccaggctggtcttgaactcctgagctcaggtaatctgcccaccttagcctccagattacaggcatgagttactgtgcccagcccaaaactgttaaattaaatgctttctacaatctttttttaaccataaaattctgatctattgtcttattttgttacaatatgttaagccaatgtaattaacattacataatcttatgtcagttaaatgtgatttacttaactcatgtaataacaataagaaaaatacttttttaagaactggagaaaatatctcctaatgtttgatataatactttgccataacacattttaacacacagtccacacatttaaaaactttttgaaaagttcctgtgggaaatgacagtgttatttgagtctattaaagcatcattctggttgcgcaaacttgaacgagaagttgcactgtggtaagactagtctttatcttagagaccaagagtcattttgcaaatttgtggtatcatttccctaaacaacttaggaccaaattgtacttcatttcctcagttctgcatttctgcagagacagaaagaaacgcagctcttgacttcttttttgtaaacattactgtaagagttgtgataactttttattctactatgtatatgtatggaatagtattaataaatgaactagggaaggatgtaataaattagacatctcttcattttagagagaagatggaaacaacattgcttttcttt

SEQ ID NO: 3523 - DNA, 2300 bp, Homo sapien
accaaatttgccttgttctggaacacacagactttgggtggatgagcaaacagcctctgagagagcagctgctttattgcatgactaaggtgacctcatcagccaattgtgatacaggaattttgaaaggactccctctttcaagagtttatatttctattcaagtgtggaagcatgcagttgtaaatgcttgcgcttcaaaatgtatattgggataggggtagcaaaatgttgggagcatcagagcagttcctaaatacactacaggcaaaaacttattttgatctcagaccagagtttcttaacatagtgtcaaaaaaacacattatttcaaaaaactattttccctatctaaagagggtttagttctttaacaagttaggagtccaacatttcccaaacttacttggccccataatttttgctgctgctcttgttctttggaaactgtcagtatatttggatgataatactagtgggctgttaaaaataatttttaaatcattttactctaacataacttactcacaattatttagaggagtgagaggatactagatcaacaaacatgagcaatgttgaagattttaacaggaaattaagtatggactgaaccacaggaagtatacaaccaaatgcctttatgtcatctgtctttgagtttcatcggtctcattagggtcacttccaaagtggccagctcatctcaccagttatctttcttaatgccttatgttatcttcccaacataaaatgatgcttgttacatacaatataatgagctcattataatgaaattaatgactgtgtataagtgaattttataatattgtaaatgtgttttcttcaaatattctttatcctgacgatagaaccagaacagaaaaattaatactcccctcccttttatcagctttacctaataccatcagaagcttcactaagtaaatgcttttttgtccttttaaaggaaagtattgtccttccaggggtaaaatccaaggaggcttaagttaaactgggtactctataaataagccacacttgttatataaacttttgaaagcttatattttactaacttctctatccttataaatgattagtcatctagttccttgagttttgtttgtgttttaaactttaatctcaattaaagctaaaactgttatctctccagagatactgccaaaatgtgaaagatcattacctaagaagtacacattattggtctatccaaatagacttttattttaccttgagcagtttttcctctgatactgtgaccttggtatcagtatgtttacaaattatgtcatatttgtatacaattaaacatttatttatttatgattggttttaattaaactttattttttcctaatatgcaaaatatgcaaaaatcaaagtttgatatactagttatattcttaataaatatgaaaataatattaaaaaccatgcaccccttaaaatcatcctatgtattgccagtcgatgtctagcacacaccttggaaaatattaacatggaaatttcctgccatggaaataagggatgagaattggagtgggaaaatgtgaagatagcctcttataactttccctcctatcagatatgtgcaaaataattaaacaaaaattatttgtttactttgccctgcttcctgcagaaaagaagagaactcttaaaatattttgatcagatgaattttatagtcaaggactatccaaagcatggagtaagatacaactctatgtgatgaatttctatgtgagtttctatatgataaattaatacgccaaatgaaacagtttattgaaacatgcaacttttttaaaataaacaaacatcctccagaaccaaagactgatgctgttaatgctttagacatgtgacatatgtgtgtgtacctctgtatgtttaattttctttctttctaatcaagtgacctgttctcgtttggttaagtttcaaccacaagacaccactgtatgctttttttttttcaagatacacgtcacagcacaccaagaaaaggggaacttccagtgtctgtggtaacatcacttgataaacagactcctttaaacagcaagtgcctgtctgcattctactatataaagcagcagagacgttgactagcgcatatttgctaagagcaccatgcgcgcagcagccatctccactccaaagttagacaaaatgccaggaatgttcttctctgctaacccaaaggaattgaaaggaaccactcattcacttctagacgacaaaatgcaaaaaaggaggccaaagac

SEQ ID NO: 3524 - DNA, 2300 bp, Homo sapien
gaggggacgggagactggtcaagtctctgagtcgtccactccaagatgcggacaatgagtgtatgaagacagactgagaatgcgctgcaaagaagcttggaagaaaatgaaggcagagaggacagacctgaaaggctaagagggacagatcagcgtccatggaaagcaggagcagaagccagtcttcttccaaacactggcacaaaccactgcctactggatacatttcaccagacaattcaccccagtgtccaagagtttatcttgcttctagaatatattgaaaagagccaccctctgaacaaatggcaaacactatatagtataaataggatgcactgaaaatagtaggcttatttcttaagctgtcatcacgaacattaaccagtaattatatttctccactttttgtagaagacataaatggcaaattctgaatttataatttctaatacttcatttttctgctcttgtaaagttcattttgaactttcaacataaaaatattaaagatttttaattgtgcacatttgaacttgtgttactttggacttacattggctgaaattgaaatatagtaaaagtgctctagagtaagcagatcagttcatcagaaggacagcctttcaatggaaagggcattcccaagctgcaccaacgaaagcataatcctgttacctgccctaacctgacagctctgaattagtctgatccacctatgtgccgtacaaagcattatattgctatgatttcataaactgaacttgaactacactttttcagagaaacaaaaccatgtttagaaatctgccacaaatatctacacattgctcttgaattcctccaggaatttccacctactcgtgctgttactcttcactctatgatttatttgtttttcagtccctgtcgatacttaagttttactctgtagggagattctcatgtttgactccattaaacaagctttgaaactgacactcgcacagggtgttacttccagaatcttcctgccagctccttgcatccacaccatgagaaagagcaaacattccaaatcccaaaaaaatgaattatttggggtgaggaaaagtcttgactatgacactgaagatttcctgaagagatccagcatccaaaatgtcctgagtggggaggaaatcgcacacctagcacccagagaaaatgagtgctatccacaaacaacccagatcctcccaagctgaggctaacctgcccttcacttcctacattattgctacatctacgcagcttctgactttccaaagtttcctttccttttctagtcccaaacttatctctcaggtttgagaaattcaattttcttgggtttgaatctcaaaattataaaagacaagtaaggttaatcttctatctcattgggcccctaaatattttaagaaacactccatcaaccacattttgatcttctttactgctgttttattctagcatttctttactcctacctctctgtttctctctctctctctccccccaaaccccccaactcccccacccctccccacacacacacacaattggagtaaatccaggacaagggcattcacaatcttaccatattctgtattcattagaccttatcttaagcactgtgttcaattcagattttgaaggcatgttaacaaactgtagaacaacggagtccagaactgctgtagaggaccagttgaaggaactagagaggtataactagaaaagatacttttttagatccttcagttgttaaaagtccctagtaatctattacaaacagattgattttaatagttctcaaccatttgctaacatgtgtttgcagtgatgtcctatgtgtttgtactcagttctctgtcttttttaaaagggaattttactttagactatacattttctaaaactagaaaaattattttggagaaaaagatttgagtattactttgaagatttcatgaagctgctgcttccaatcatctgatcacttcagatggtctgataatgttagataaaacctctttatcagtaatgcactggagtcctacagcactactttccatattcaacaaaacctctctttgcatagatacgtgtgtgtaaaaacagaacattcatactgaggccagagtgccatcgaaggtaattatagagacagtaaaatccttttactctgggaaaaataaaatgctgggtgtctcacaaaatttcagaacctgatttcaaacggatcataacaaagaggagatcaaatttagcatggtggactgctcgacaggatatat

SEQ ID NO: 3525 - DNA, 2300 bp, Homo sapien
cccacctcagcctcctgagtatctgggactacaagtgcacaccactatgcccagctaattttttttttctttttgttggagagacagggtctctctatgctgcccaggttggtctcaaactcctgggctcaagagagcctcctgcctcagtcttgcaaagtgttgggattataggcctgagccacagtgctgagcctaaattccttttatttcctcaatgggacataactcattgcctcttaatctttgctcaagttgcccctccttcactcagcacactcgtggatatcctgctggttccagctcagatgttacttaactgggctgccttcactaacccctcaagtctagttaggttctcctcctaggtgtattcacaacccctgtacttcctgtatccaagtccccatcacatttcgggattttttgtttttgttttttgtttttgagatagggtctcactctgttgccccagctacagcacagtggtgcaattacagcttgctacagcctccatctcctgggctcaagtgattgtcccactacagcatcccaagtagttgggactacaggcatgagtcaacatgaccagctaattttttttattttttgtagagacagaatcttaccgtgttgcccaggctagtctagaactcctgggctcaagcaatcctccccgcttcagcctcccaaattgctgagattacaggtatcagccactgtgcccagcccatcacatgtattttaattgcttgtcagtgaggacagaagaggacagacaagatgtatattgatcacaggcagccagaacttggcacataacaagtattcaaaagacttttgaatgaatcgtaaagactgatataaaaattcactgtttatccttaataattcattatatatgtatgtatatatgtttaacaaaccatttccagctttaaaatgtggatttaatgactcttaacaaatttgttagttgtttttttaaagtcctgagttaaaaaccttctatgatatgtattgttatgtaaaggtgcctgagatgaataaactctaactgaattttaaagtcaaagttactgtgcccagagtagataaaaccagataagcagcacccttaaaattcactcagaaggtgctttattttttatttggctatttacactattttacttgtccagttaaaataaggctcttttttaatacattgagagagctttctaaacacaagaattgtggctgggcacagtggctcatgcctacagtcccagcagttcggaaagctgaggttggcaggttgtttgggcccaggagtttgagaccaacctgggcaatgtggtgaaaccccttctctaccaaaaatacacaaaaattagccagtcatggtggcgcatgcctgtagtcccagctactccagaggttgaggtgggagggtcacctaagactggggatgtcaaggctgcagtgagccatgatcatgccactgcactccaggctgggtgacagggtgagaccctgtctcaaaaaaataaaaataaaaataagaattgtcccaaaagggaagccttgggagttggtaaattcgttatcggtaagttctaaatgaaaagatctttttcagagatttggtattttttgaacctcattgtttaataaataggccagttgagtaaagtcatttacaaatctaagcacgtatatttttataaaatatttatgagagatgagtcattttattctcctctctcctcccaactcccccagtgactgtattccattaacttcaagagcccatctttttttttatgatttataatattgtatgttccttagaaactgactgtaacatacaattattttaaatgattaaattatacaaatatatactgtatttccttagaaaaatgagcaggcggaattgttggatttgtaagatgtgcagagatgaatctaagaggcccccttcaaagtaagtagcatttaagtttctatggtaattgtaaagcatatttatcagatgataaataggtacatatttattaaactgctattgtaacatattttgttcagaaagtaaaatttgcatttacacgtgagtcatttcatcagaagagcagtcatatgttactaagattcttgttttcattattcatggtttacacttgagaattcagcaagttaaatgctttagaatctattatgaatagtctctgttctttttaaaaaacaaagaatattgtttgtgttaaaatgagattcttcaatccaaaatattttcttggttccaaccctccacatac

SEQ ID NO: 3526 - DNA, 2300 bp, Homo sapien
ctacaaatttgtgtatcttgtgtatttgtgtacctacaaattgaaacatcttgatatttaatagtacctacatatttataacctaattacgtctgagttaatcctcgtacgattttttccatcttgaacagctatgatttgaacatttccttttgccacacatatgcaaatcagtaataaacttccgtacagtactttagagcttagaaaagacctttcatgtaagagtcacataatatcctatgaggctggcaagaaaatacatgttactcttattacagatgagaaactgggactcaaagaggtgtgaagctagtgtcccaacagttacttagcatttactggataagcccaggctctaactgggtctcctgacagaagtccagctctctctctctgctgcctctttgtcagaactcctggcctgccagcgaatttaactgtctatgagtaaattctaacatctaaggttctaagtataaaatatattgaggtttacagtggtgagaaaaagcaagtgtctgcgtattacagacagctgataaatacgtattgagtcatcagaaagtgaaaatagatgtaggactattatgcaaagcataggagaggaagagcatatgcttaagaaaaaatggcattcctagagttaacaagcatgtttcaaagtatctattactgaaatctacacgattttcctttccacaataaagtccacaactgttgtcttaaataataactgcaggttttgccctccaagtcaaacttggagctccaactactggcagctcaccgtaagaatatattaattatttccaatttccttttaagaagtcgaatacaaagtagagagaatatctgcagcttggttgcaaagccgcttaaacatttcactggctagttctggtaatattatccgaaatcaactcattttgtggttgaggtaatctatttgtctttaccaatcaagtcgttttaaaaccttcaggagtagagatgatacttgaagaattaacaaataaaacttaatcaaggaaactgttaactcattctcccccctactttttgccagttattaaatgttctggtaaatcctaactcaacaagaatgactcatgaggaaatcctgactccttgaactcactgattctggtgcattacagctatgaaatctctatgtctgcagctttctctcccaccataaggaaatctgtgatttctattttggcaggagatgtgaccaaggactcctgaggaatgaccctatagacagacccagccacgtgcctagtagtgatcaaaaatgcaaacccaattaaagcactgtcttctgataaagtcactttctcttgttcaatccctaatgttcattctcaaagtgttccaagacgccccagcaagctgcagagcagatcccaccctgcccctgggcaatcaacgtttcaggttactccttccttaagttaagtggcagagagaaacgggcgagggtctccccattgcctcagttcacagaccagggggtgtcgaatgagtcctacagcaggacagcaaacaagaaatgaggcgcggggtcagggaacgcgctcaaaaaaggaagaaaaatcccactcttcattcgaaatcaggccactgcactccggcctcgtggcgggcgacctcctcctgccagggaatcgccgctctggcctcgggctggggagcccgtcagggtgggtgagggagcgccggcgcccccgccgggccgccgccaacttcggctccctccctccgtcgcaaagccctcgagcccgcccggccgccacgcttcagcaaaaggtcgtgcgcagcggcccacactgaagactctccatctgctcccacacctgccccagctggccgctgctatgtggcccgagtgcgcaagaagccggggccgcagacgtcagcagcgccccggcttcgagacccttcggcagcagccgtgactgccgccggcgggcgctgacccatccccgtgccagtctgcagccgaccaatccgcgtcctcttgaggcggggccggagccgcgaggccccgcccccaagccgaggcctcataaatgctgcgacgcacgcccagccgcaaacagccggggctccagcgggagaacgataatgcaaagtgctatgttcttggctgttcaacacgactgcagacccatggacaagagcgcaggcagtggccacaagagcgaggagaagcgagaaaagatgaaacggaccctgtgagtatggctttcttccctctcccgccaccccctgccccacactgcaagctgcaa

SEQ ID NO: 3527 - DNA, 2300 bp, Homo sapien
gtcacttaaactgttatgttaaactcatttattcacatttgcagaaactaatgtaagatttttcttatgctcatgtgaataggaaatgggcaaatatgtgtatatatattgttttggaatactcatgaatgagtttgactttatggaatttttaaattattacaattataataattcatttcaccttcagataggaaagaactgcaaaccaaacatgatcctttcttagggcaaagaataactatgtaattgtccaggaaaagtttgttataagtctcaagttataaaacataatgctttagaagtcttataaacaatgtatttcaagcctttcagcttgagaataccctcttaggcacattttattctaatatagtctaaaactgacttttaaaattttgtaacatactatttttaatttttaggcaaaagaaaaacagaacgcaaagaaagctcaggaaaccaaatgaagatgttttcagatatgtacacatttctgcttctgcacatattttcatggaaaccattatgtataaagaacttagagcaacatcctaattggctcagtgcacgtttggcaatagtgccagcctgtcttgtctttaatgcatggattcataaacttcttccctacctgcatcatgtgcatgtagtgcatattaaatgaaagtgatattaagaatgctttcccaaattccattatttgacattgagtctgacaactgttagttttctggttgtctaactaccatatgaagctagaaaatgcacaaacgatattccttatctgtaatttaaatacttaaaatttgcaattgtcagatcttgattaaactggttgtcttatttcttctcatcattaacggaaaaaaaatcagtatttctatctttgatatctaagtgttttgaggattttaaaactgaattttatctgctataccagttatttgagaaagtatgattttaatgtaaatcatttaaaaaggacaaaagtataatttccagtgattttcactgctgtcagtagaaaagtaataaacatctcaattttattttagtaaattttcttcaagtgtttggggttatttgtttatgtattagagaattgtttcaggaaggtctgagtattatgcttcaaagcaaaatttcaggttaagaagaaattgtaaatcttaaagaatgttggtgttactctcaatggaatattgtttcaagcttgtaagctgtgtataaaaaaactggaggtctgacagttcatgttatctgcttttttaaaaagatggtagtggtgatgggggtctttctatgccaatttgaataaatttcgtacagcctgcagttttcaagagccatatgtaatttgctcacaattgatttttaaaaattgatttgggagttgctttgtaataatcttctgcttctaatcttcctttgcaagtcagactttaaagaagactttataaagctttcttttttaaaggaagtaacctacttttttctttatcaagaatatttctgaggttgatacatgactttaacattttattatttattgtaaaatcaatttagcataatttattttattagggagaatgtgtacccatcttccagcttcagcacatttttaaggattgtttttaagcttagtaattgtggtattaaatgacttagaactaatggagaaaaacctgataggaaattgatagaaaaacgaatgaaatatttttcatacataatttcagttggaggtaatggaaaatatgtagtctctcagttatttgtgggtaaatatgttttgctgttgatacagtaataattatggagtgttttcaaagccatgatataatttttaaaaatagatttttaaggaaggctcatcttgatctcattcgtttatttcagcttaatttatatattctttcctattgaggcttaaattttgttaagcaatgtgaggattattgtggtaagttgtatttagtaatcaatacagtgtgatactggcactaggattgacaaataaagcaatggaacagaagagagagcctgaaaacagatcaacgtttatatgatcacttgatttcgacaaaggtggcaaaacaattcaacagagaaggaaagtcttttcaacaaatggagccagaatagaatagctgaatatccatatagaaaaaagtgaacaatgaccccctacctcacaaaaatgactttgagatgaatcatagacctaaatgtaatattttaaaagtatgaagctttttaactgaaaacagatgatatttttgtgacttggggggtta

SEQ ID NO: 3528 - DNA, 2300 bp, Homo sapien
tagcgtgttatggatgtatttctgctcccaaaggaatgaagagcagacattaccacatgcaactgttgatttaaatatagcaaacttattgaatctaactcctccttcctaacccactagtttagccaatcatctcggactccaaccattttaagagatgtctagcttctctcactttattccaacctgccctgcacacttaaaagcacaataaaccttaattatgaaaataatgtcatttcagcattaaaatatatttgataggtaaatccccagtcactacagggcaattcaaactatacaacatggcatacaatctgtcctcagtttatcttttcagtttcagatccaaataaatattcctccagtctgctatattatgttctagtcactttgctagctgttggctaacccatatactttaacatcactactgtttatgcttttccttctggctgtgctcctccatgacctgtgtacttttaacattttgtatatactctaacatagcaattaacacaccatattatagtttgactgtcaattattcgaaacagcagttatggtttattcacatgaaaatttcccaatccttgggtgggcgcgtggctcacgcctgtaatcccaacactttgggaggccgaggcgggtggatcacgaggtcaggagctgagaccagcctggccagcatggtgaaaccctgtctctactaaaaaaaaaaaaattagccgggcatggtggcgcgtgcctgtaatcccagctactcgggaggctgaagtaggagattcgcttgaccccgagagatggaggttgcagtgggccaagatcgcgccactgcactccagcctgggcgacagagcgagactctgtctcaaacaaaaaaaagaaaatttcccaatccttaccactgtgcctgagatatagaagatgaacaacatatgcttgataaatgacattccaaatattaagctgtgtacaacaggcaatatctacatcaacgtttaattgttaatcccgcgtaaaagttttaacatcgtagagtcaataacacttgggaaatagataaaaacgtactgtccaaagaagagactaagaacaagataaatagggaaggataaaaagtaaaatgtgttgattatttaggacgaaaggcactaaatacagccagagagaaactgtgaggaaagcatgtggcctctagtctagaacactagctcaagaaaactcacttcaccggaagccagaaatgagcagagagcggaaccagtgaagtggcctttcaggcccacgcagtcagcgtgtgtggacgtcccgaagagctattcacacattcaaggcgttctgctttgaataaccagaatctcgagttcctgggcggcttgagccgcagacacctcacccttgagaaggcgcaccctagggtggcttctgcaggactaatggcctgagcaatgcacttgacctcaccagcccgggataaggtgcgcgccgcagagaaggggcagtgcaaagggcaatacgtgcttaagagcttggggagcgagggccctcaagtcaattacaggatttgggtgccaggtcctgaggatgcagcaggcacaagactgacacgatccttgccctcgtggtgtggctctacaaattactgtggaaacgcgactgtctcgagctgaggagagggcagaacatctacatttcccccacccggactccaggttcctgaagtcacctctccagacgcggggcggcggtggccgcagggaaccactccatgcccagcttgggcctcctcccgtgaccccaggcccaggacggtccccttggttctcaccgaatcctttaatgagctcggtgaagaccccggggtcgctttccatgaggcaccactccccggcattgcccgtcatggccctggccacacaccgccccgatccacctctcgctctcagctgccccccgcaccagctgccgccggccacagatctcagcaaacccgccgccgagctcgtcaaccacacgtcaccccgcctacttcccgacagcctccgggcgccgtcacctgcagcgcgactgagcgcgggaggacgctctagccaccctagagacatcgaaactcttcccaggccttgcagcacccgtagcggattcggaagggctggggcctgagaagaaagggcggtgattcacagcgccgaggaggcaacatccgggatcctcgcccctctggggcggaggcggggcaaaagaagaggggcaggactcgttcccgggaaccgaacctggaatccccggcggcagtg

SEQ ID NO: 3529 - DNA, 2300 bp, Homo sapien
aatttcccaatccttgggtgggcgcgtggctcacgcctgtaatcccaacactttgggaggccgaggcgggtggatcacgaggtcaggagctgagaccagcctggccagcatggtgaaaccctgtctctactaaaaaaaaaaaaattagccgggcatggtggcgcgtgcctgtaatcccagctactcgggaggctgaagtaggagattcgcttgaccccgagagatggaggttgcagtgggccaagatcgcgccactgcactccagcctgggcgacagagcgagactctgtctcaaacaaaaaaaagaaaatttcccaatccttaccactgtgcctgagatatagaagatgaacaacatatgcttgataaatgacattccaaatattaagctgtgtacaacaggcaatatctacatcaacgtttaattgttaatcccgcgtaaaagttttaacatcgtagagtcaataacacttgggaaatagataaaaacgtactgtccaaagaagagactaagaacaagataaatagggaaggataaaaagtaaaatgtgttgattatttaggacgaaaggcactaaatacagccagagagaaactgtgaggaaagcatgtggcctctagtctagaacactagctcaagaaaactcacttcaccggaagccagaaatgagcagagagcggaaccagtgaagtggcctttcaggcccacgcagtcagcgtgtgtggacgtcccgaagagctattcacacattcaaggcgttctgctttgaataaccagaatctcgagttcctgggcggcttgagccgcagacacctcacccttgagaaggcgcaccctagggtggcttctgcaggactaatggcctgagcaatgcacttgacctcaccagcccgggataaggtgcgcgccgcagagaaggggcagtgcaaagggcaatacgtgcttaagagcttggggagcgagggccctcaagtcaattacaggatttgggtgccaggtcctgaggatgcagcaggcacaagactgacacgatccttgccctcgtggtgtggctctacaaattactgtggaaacgcgactgtctcgagctgaggagagggcagaacatctacatttcccccacccggactccaggttcctgaagtcacctctccagacgcggggcggcggtggccgcagggaaccactccatgcccagcttgggcctcctcccgtgaccccaggcccaggacggtccccttggttctcaccgaatcctttaatgagctcggtgaagaccccggggtcgctttccatgaggcaccactccccggcattgcccgtcatggccctggccacacaccgccccgatccacctctcgctctcagctgccccccgcaccagctgccgccggccacagatctcagcaaacccgccgccgagctcgtcaaccacacgtcaccccgcctacttcccgacagcctccgggcgccgtcacctgcagcgcgactgagcgcgggaggacgctctagccaccctagagacatcgaaactcttcccaggccttgcagcacccgtagcggattcggaagggctggggcctgagaagaaagggcggtgattcacagcgccgaggaggcaacatccgggatcctcgcccctctggggcggaggcggggcaaaagaagaggggcaggactcgttcccgggaaccgaacctggaatccccggcggcagtggggctgttgctgttgctgtggctgtcgctgcccgtcaggctgccttcttttgtcgtttcccagcgctgcgcaggacttctcctggcggcgctgcggatccagggggtcggctgccaggtacaggtgaggacattgcgggaggccggctgggagccttttgtgcggccccagggacgcgcaaattctgaccagtcctccatgtctctcacccgcatcccaggggttgaggctgggcaaacgccgcgaaactatcgctcttccccgtcccgcttccgcgcctgtccaccctgggtaacggaaccagcatcgcggtagggacatcctcgctaggcccggccggaccattcctcagggtgggccctttccgaagccgggaccgctcctgcttgtcggcatcgctccccacaggccgacgtcgagagggcctgctttactcctcctctttctcctccttctcccgcggcttctgcgcggagaggcgtcgcccgggatctgggttttggaagaaggatctttgtgggaagacagggtgaatttatcacagaggaataacgagggagaggagaaaggtttgtccatg

SEQ ID NO: 3530 - DNA, 2300 bp, Homo sapien
tttacacatctcaatatcttccaaagtctctttataatttatttgaaaatgctgcctttcatctcaagaagtcaaacacatttgcagattattcctttttaaatgaagtcaaagctgacatatctatgagagtgcatgacaaatgtaaagaaacaacaatagaaaattgggcccatgatagaggtttgtttacccatgatacaggtatctgaatccactgatcaatgtgatgctataaaaactgatgaggaaggaactgtggcaaaaatgacagcatgctagtctgaggggagctgccaactggttgccacgtggtatggaactagtagttgccagatctcatttttctcaaagacccagaaatctggctttttatgtaaactctcaggattaaacgttaacataatgaaaggcatcttaacccccttctctgcttacttctagattgtgccaaaggctaaattttcagtttggtctttctacaataggtaccatgttaattaagttgggtatcaagtacattttagttttgatgtattttgcacagaaaacattttcaagttcatagcaatattacagattaaaaaaaataccacaaactactttgggctctgatgccaatcattctggactctgtgcctcttaaacttttccaataaagtatctcaaggaaatatactgtacagaatcctcctagtctccaagttgagggcagagtttccggagataaacttcaagaaagttacaaaaaaaattttttttaaaccaacacttcatacaaattttggcttctaccccatagcgtactcaggctccttttaatacaaaagctgctctgttgcttccctcaataaaatttaccacgtttatttcatggcttcacataatctgtagcacaaggctccctaactccagggcacaagtcacctatttgagaaggaaggagtcagagttttacccactaaaacattttttttttctggaagccaaaggtctttcttggaatatgtagcttttaaggagtaaatatacacttaacgacttcaatatactcttaaaaactttaatcttaacactatagtattctataagagcctgctgaatgagggcaatttagtaaatatttagtaaatatttggtttaactcatcatccagttttagaaccattccaaatgtttttagattaatacacgacatttgttttcaacctaattttcccttgacgcaccgcatccccttccactagtctagcagccccatggacaaacctttctcctctccctcgttattcctctgtgataaattcaccctgtcttcccacaaagatccttcttccaaaacccagatcccgggcgacgcctctccgcgcagaagccgcgggagaaggaggagaaagaggaggagtaaagcaggccctctcgacgtcggcctgtggggagcgatgccgacaagcaggagcggtcccggcttcggaaagggcccaccctgaggaatggtccggccgggcctagcgaggatgtccctaccgcgatgctggttccgttacccagggtggacaggcgcggaagcgggacggggaagagcgatagtttcgcggcgtttgcccagcctcaacccctgggatgcgggtgagagacatggaggactggtcagaatttgcgcgtccctggggccgcacaaaaggctcccagccggcctcccgcaatgtcctcacctgtacctggcagccgaccccctggatccgcagcgccgccaggagaagtcctgcgcagcgctgggaaacgacaaaagaaggcagcctgacgggcagcgacagccacagcaacagcaacagccccactgccgccggggattccaggttcggttcccgggaacgagtcctgcccctcttcttttgccccgcctccgccccagaggggcgaggatcccggatgttgcctcctcggcgctgtgaatcaccgccctttcttctcaggccccagcccttccgaatccgctacgggtgctgcaaggcctgggaagagtttcgatgtctctagggtggctagagcgtcctcccgcgctcagtcgcgctgcaggtgacggcgcccggaggctgtcgggaagtaggcggggtgacgtgtggttgacgagctcggcggcgggtttgctgagatctgtggccggcggcagctggtgcggggggcagctgagagcgagaggtggatcggggcggtgtgtggccagggccatgacgggcaatgccggggagtggtgcctcatggaaagcgaccccggggtcttcaccgagctcattaaa

SEQ ID NO: 3531 - DNA, 2300 bp, Homo sapien
attaacaacaaaaagatatagttaattctttggatgggcctgacctatctatctagtgctcttaaaacacaccatacaactaatgttgtattaaatctctataaattaagttcttgagaagttaaatattacaatactataatattaaaagcatggacacttttttttttttttttgagacagactctcactctgtcacccaggctggagtgtagtggcgcgatctccactcactgtaacctccgccctccgagttcaagcgattctcctgcctcagcctcctgagtagctgggattacaggcgcctgccaccgcacccggctaattttttgtatgtttagtagagacggggtttcaccatgttggccaggctggtcttgaactcctgacctcgtgatccacccgcctgggcctcccaaagtgctgggattacaggcgtgagccacggtgcccggccaagcatggccgcatattaaattggttgtggatattttatacaatgtccatttctctacttttaaatttaatttagaatgcaaaatcaggaaatgctagtaacacacattatataatagcacttgtttcacaatcatcagaactacagcatatacagtatcttttatcagtactaatgtgttatttccaaggaatcctacatttttcttgaatttacacatctcaatatcttccaaagtctctttataatttatttgaaaatgctgcctttcatctcaagaagtcaaacacatttgcagattattcctttttaaatgaagtcaaagctgacatatctatgagagtgcatgacaaatgtaaagaaacaacaatagaaaattgggcccatgatagaggtttgtttacccatgatacaggtatctgaatccactgatcaatgtgatgctataaaaactgatgaggaaggaactgtggcaaaaatgacagcatgctagtctgaggggagctgccaactggttgccacgtggtatggaactagtagttgccagatctcatttttctcaaagacccagaaatctggctttttatgtaaactctcaggattaaacgttaacataatgaaaggcatcttaacccccttctctgcttacttctagattgtgccaaaggctaaattttcagtttggtctttctacaataggtaccatgttaattaagttgggtatcaagtacattttagttttgatgtattttgcacagaaaacattttcaagttcatagcaatattacagattaaaaaaaataccacaaactactttgggctctgatgccaatcattctggactctgtgcctcttaaacttttccaataaagtatctcaaggaaatatactgtacagaatcctcctagtctccaagttgagggcagagtttccggagataaacttcaagaaagttacaaaaaaaattttttttaaaccaacacttcatacaaattttggcttctaccccatagcgtactcaggctccttttaatacaaaagctgctctgttgcttccctcaataaaatttaccacgtttatttcatggcttcacataatctgtagcacaaggctccctaactccagggcacaagtcacctatttgagaaggaaggagtcagagttttacccactaaaacattttttttttctggaagccaaaggtctttcttggaatatgtagcttttaaggagtaaatatacacttaacgacttcaatatactcttaaaaactttaatcttaacactatagtattctataagagcctgctgaatgagggcaatttagtaaatatttagtaaatatttggtttaactcatcatccagttttagaaccattccaaatgtttttagattaatacacgacatttgttttcaacctaattttcccttgacgcaccgcatccccttccactagtctagcagccccatggacaaacctttctcctctccctcgttattcctctgtgataaattcaccctgtcttcccacaaagatccttcttccaaaacccagatcccgggcgacgcctctccgcgcagaagccgcgggagaaggaggagaaagaggaggagtaaagcaggccctctcgacgtcggcctgtggggagcgatgccgacaagcaggagcggtcccggcttcggaaagggcccaccctgaggaatggtccggccgggcctagcgaggatgtccctaccgcgatgctggttccgttacccagggtggacaggcgcggaagcgggacggggaagagcgatagtttcgcggcgtttgcccagcctcaacccctgggatgcgggtg

SEQ ID NO: 3532 - DNA, 2300 bp, Homo sapien
ccatctcagcttcccaaagtgctgggattacaggcgtgagccaccgcacctggccccattttctttcttgtgtgcaagtgtgagaacacaagatctaccctcttagcaaatttcaagcatacattgcgattttcctaactatagtcacattgctgtactttagctctctagaacttacctatctcgcataattgaaactctgtaccctttgaccaacatctccccatttccaccttctcccaggccctggcaaccaccgttctactgtctgctgacatatttcttaacttgctattgcagtcatcacaactatgaccaaaaataataatcacttctgtagctaccccacgaagcacaaagaagttgaaaattatcaatatatttattaatatattatgctgaattcaggcataacactttcttctgaagtactttacattctgaaatccttaaaaaaatctgtccagtgaattctgtgcttgataatagtccatctatgctgtattaaaattaaattgtaacatgatcggttcacctcataatgatctttatttcataaaacaatttgagatgaggtaaaatttgacttcaaaactaacataacaccataaatttccaaaatagttttataaaaaaattaaaaagcccacaacactatagatagataacataccttaatttttattttattttatttatttatttttttatgagacggagttttgctcttgttgcccaggctggagtgcaatcgtgtgatcttggctcactgcaaactctgcctcatggattcaagcgattctcctgcctcagcctcccgagtagctgggattacgggcatgcgccaccacgcccggctaattttgtatttttagtagagacggcgtttcaccaatattggaggggctggtcttgaacccccaacctcaggtgacccgcccgcctcggcttcctaaagtgctgggattacaggactggccactgcgggagctgcggcagctgcggcctctgggtacggggtcagcgggcagtcctgtaatggccacattacaggacaggccatcgcgcctggccacatgccttaattttcaaagtcaaatttgtctttaaaaagaatgaattcctaccctttgggggtatttatttttgcaactaacttccatccttttattaagtaatcaaacatagcccatttgaatgttggaaaagaactgtcagaaatacaagttcttattttgtactttggtaacatgaattttacacttagttgaacatgaagaatcaaaaaagctctggattgttgtaataattgtttagaattttagatgtaccatttgacctttgactttaagatgaatttcagtgtcctcagtaaataaaggcttacccccaaccttaaatagtgacgcacaaaggctattattaccaccactgagtggcttaaataatcctgtcaacagcaatcgcccatttccaaagccatggtgaaacatctctgtgctaatttcttttgttttgtttcctaattttttttttttggcaggtggtgggaaataatctttgtcttctttggagtaaaccttcaacaccggattttttcttttaattatggatgtaaaccccaatatccccataatttacattgggtctcgaccaattgcctaattataagaggatatatttaggctcttatttcatccacacaaaaacttgtgtaacaggtagttggaaacatctgaggcaccactttgattctgttttggatggtcatgttttttctcctccgtttccccagcatgtctgccaccatcctcatgcactgcttccaagtgcctgggagcctttatgagcgtccctaaacctaaaagaatccagaggcggggctcggatgaaccctcgagataagcaagtgagccgcttctcccctctaaaggatgtttacacgtgggtggcactcgctggaatccagcgctcgggcagccctgggaggacgcgctcagctgcgaggaggtgaccggcggcggcgcgggcagtccggaggggcgggacggggcggggcaaggcgggggccgggccggaggaggcgggctcccgggatccgcggtgtccggcagtagagctcgctgcagatccgggctctgaccatgatttggcgccgcgcggcgctggcggggacgcggctggtttggagcaggagcggctcggcaggctggcttgacagggcggcgggagctgcgggagctgcggcagctgcggcctctgggtacggggtcagcgggcaggagtgccgcggcgtggtg

SEQ ID NO: 3533 - DNA, 2300 bp, Homo sapien
cttataacagaatatctgaagctgagtaatttgtatataaattgttcttacagtattgaatgctgagaagtgcaaggtcaagaggtcacatctggtaatgaccttcttgctggtgggaactctgcagattccccaagccatgtaggacatcatgggacaaggcagcagagaactctgttttataaagctgccagttctactcccatgatcacccattaatccattcattcatgttccagctctcatgcccaatcatctctcaaaggccccacctgtcagcactgccacattggacagtttcaacataagtgtcagaggggacaaacattcattccaaagcctgatacactgtataataactatcacaatcaagctaattaacatagccaccacctttcatatttaccatttttttctattccctttattttcttctctctttttctttctttctttttttttccagacagtcttactctgtcgctcaagttggagtgcagtgacgcaatctcaactcactgcaacctctgcctcccaggttcaagcgattctcctgcctcagcctcccgagtagctgggattacaggcgcgtgctaccatgctcggctaatttttgtattttcagttgagatggggtttcatcatattggccaggctggtcttgaactcctgacctcagttgatccacccatctcagcttcccaaagtgctgggattacaggcgtgagccaccgcacctggccccattttctttcttgtgtgcaagtgtgagaacacaagatctaccctcttagcaaatttcaagcatacattgcgattttcctaactatagtcacattgctgtactttagctctctagaacttacctatctcgcataattgaaactctgtaccctttgaccaacatctccccatttccaccttctcccaggccctggcaaccaccgttctactgtctgctgacatatttcttaacttgctattgcagtcatcacaactatgaccaaaaataataatcacttctgtagctaccccacgaagcacaaagaagttgaaaattatcaatatatttattaatatattatgctgaattcaggcataacactttcttctgaagtactttacattctgaaatccttaaaaaaatctgtccagtgaattctgtgcttgataatagtccatctatgctgtattaaaattaaattgtaacatgatcggttcacctcataatgatctttatttcataaaacaatttgagatgaggtaaaatttgacttcaaaactaacataacaccataaatttccaaaatagttttataaaaaaattaaaaagcccacaacactatagatagataacataccttaatttttattttattttatttatttatttttttatgagacggagttttgctcttgttgcccaggctggagtgcaatcgtgtgatcttggctcactgcaaactctgcctcatggattcaagcgattctcctgcctcagcctcccgagtagctgggattacgggcatgcgccaccacgcccggctaattttgtatttttagtagagacggcgtttcaccaatattggaggggctggtcttgaacccccaacctcaggtgacccgcccgcctcggcttcctaaagtgctgggattacaggactggccactgcgggagctgcggcagctgcggcctctgggtacggggtcagcgggcagtcctgtaatggccacattacaggacaggccatcgcgcctggccacatgccttaattttcaaagtcaaatttgtctttaaaaagaatgaattcctaccctttgggggtatttatttttgcaactaacttccatccttttattaagtaatcaaacatagcccatttgaatgttggaaaagaactgtcagaaatacaagttcttattttgtactttggtaacatgaattttacacttagttgaacatgaagaatcaaaaaagctctggattgttgtaataattgtttagaattttagatgtaccatttgacctttgactttaagatgaatttcagtgtcctcagtaaataaaggcttacccccaaccttaaatagtgacgcacaaaggctattattaccaccactgagtggcttaaataatcctgtcaacagcaatcgcccatttccaaagccatggtgaaacatctctgtgctaatttcttttgttttgtttcctaattttttttttttggcaggtggtgggaaataatctttgtcttctttggagtaaaccttcaacaccggattttttcttttaattatgg

SEQ ID NO: 3534 - DNA, 2300 bp, Homo sapien
tgattgctgggcatttactctaacagaagacataaaactaaagattttttaggaattcttcaggagctaatatctggagatgtggactgcttttgcccaagacaaagaaaccagactatttttctgtttttttctaattaattttctaatttttcagctctaccactaatcttgccttttattgtattttgacatcctccaatgaaccagtattggtagggcaattataagggtacttagataaaaacaaaaatgatctacaattgcttctgtagacacagggtctaggtatgttgcccaggctggtcaggaaaaaaatgatctacaaatttcaatgctttaactgttaaaagcaacaacttactaatgacttatcttaccactttttaaaattcattaacctaaaaaacataatttctctgaaaagagagactttaatcattatttgagtatgaaataaaattaagtatcgtttgaagggactatagtcgagcctcctaatcatgaaatcttggcttccttgagcttatctttccattcattacttcaacatttattagaagcctctatccatgtattaactcgatatttactaggagcttccatcaatttattgaattcatccatttattactaatatgtaccaaataatgttagacagtaggatatgaggacacagatctatggtgtttcagttttgtggatgcaggcaaataaactataaagggaagtaatatggtactgagtgctctgacacaggtatgaatagagaatgtggggataggtaattgtagccatttctttataatgtgtgtgcttggggtgagattcaggagaatactacggggtgaaaacattggtggaacagaaaaaaatttcacaaactaacagttgcagaatggctacagatcatatcggaaatgaaccacacacttctgtatctgtagtcctctgcgttgtgaaaagattgacttttttcaaaacaggtcaaggaatttggttatgtcaaacacaaagttgcctcttttttccttctgacatggtaaaagaaaaaaaacaatcccataggatgtgtttggttggccatagtatattgaacttatcttaaccgtctcaaaacgcatgtcaaggacaccactgagacttctgagtaccatttaaaaaattgggtagtctggaagtgttctaaattggaccgtttggggtttctgttagggcaactttcccatttacatcttggaacacagccttttgaatatagcccttcgggattggcggggagaagggaccgcgatggaaaaagtcatcatccaaagaatgaagagggaggatccaacatttaggatattttattgacttgctaggcgcgtttaccttatcttcgtattaaccccattttcttcattaaccaattgatgctgtgagaagctatgtaacttgacgagcagtgcccagaactgtttttttttttttctggactcggtcttttccactcaaaaccaacaaaaaaccaaaactcgttcttttccacatcaaaagcaaacaaaaaaccccaaccccaaccccaagagccccactctttcaaaagggcttctccggatcactaagtcctagaggtctttggctaggcctgggtccgatctaaataggaaggtaattctagtgttccgcaaatccttgccgaattccatcccggccaaagcagggacccgggggagcctctggtcgcacccgagacagttcgttaaatactcagtgcacgtgctggggatggaagtgctgacccactgctcaggtacgcgcgcacctgacgccgcttggtgcgcgccgcggggtactgggtacgtgctccgcgcgcgcgcgcccggcaaagttccccgtacgtgcgccgtacgtgggcgcggtgccccagcgctcagcgtttcagcgagtgagtgggctccgtgcccagctgaagtctgggaggggcacttttccaggcggtcgcggctccccctggcggcggatgtgcctcgctggaggggcgcagtcaggcgttctccgcgggcagccggcggcggggccttgccttacagcgcggggtcctcggcggcctgggtggctactgcccctgctgctgtcgtaggcgaggacggctgttagtgctgctgctgttggttcgtcgcggcggcgaaggaggaggaggaagagggcgaggcgacaagagaagaaggaggcaggcgcggcggcagcggcggcgccccgagccggcggaggcgaggggggggaagatggcggacgtgcttagcgtcctgcgacag

SEQ ID NO: 3535 - DNA, 2300 bp, Homo sapien
tcattggtgcatcgcttctagaattagaaccttgagctacaacttccctactcattttgtttctttgaatggaagctttatgaagagtcgatgaaaaactagggaaatttagtttgttggttggtatttatttatttatttttgagagggagtcttgctctgtcgcccaggctggagtgcagtggcgcgatcttggctcactgcaatctttgcctcctgggttcaagtgattctcttgcctcagcctcctgagtagctgaggttgcaggcccccgccaccatggccggctaatttatgtagtttagtagagatgtggtttcaccgtgttggtcaggctggtctcgaactcctgacctcaaataatctgcccgcctccacttcccaaagtgcttggattacaggcgtgagccacggcgccctgcctattggttggttttaaaatttttttgtcttatgatttaattagctttataaaatgttgatcaaatgacattctgagtttctggtattttaccctttcgaataatttgcataggtagaattacatgtggttggatttttagtgaatttttttttttttagacaatggctaaggagtacctagggtgtgaagtggttcaatctgaggattaaaaaaattcctaagactctggtttctacctcaaaggaggttaacttagtctgaatagaggagattaaacagataagttgatgtgaaatgctttctataagttgatgtgaaatgctttctacaatagcttttgaagacagcagtcacttctagttggggttatttaggagaaggttccatagaattgtctttggcaagttcacatccaacaaagttttcttgaatgaatgaatgaatgaacaaacaagctttaaagaataggtaggaattctctgggctaaatgatgggttaagtcttccaagatgagtgaactgtatacttaaaggctgtatgcttaaaggcataaagaactggaaagtaaatgtgttgacagcaatccagtgaagccagtgaaaaaggagtgcttatcacagtagattttaaactttttcagcagtttatcacaccaagaaattgtttttattttctatatgtgcacatgcacatggaaatatatacacatataaaacactaaacaatacttactcttcttattgtatgcagtgcattttatttttctgttcttttctattctgaaaatagaaaaaatatggttgttaactatttattgggtttcatagtacaataattgatggtgtgtggtttgaaatacattggtttagaggaaaaatgggactagaaggtagaaaagtaggtttagggctgattatagtggaccatattcagatggattcaaagatatagaaggggaaagtgtagaaggaagggtaggattggaatgaggtaatattagtacctgcattagagatcttgcaccgttagtagactacattgttttatcacaggtagaatagcattttggttttacattattggtctaatttgagggatgccataacagtcatacccctgaaattcagtgttgtgtttactgtaagaatgtgaaggatgttgttcagcagtatcttatttatcaagagccataggataaatttcttttacatttagcaccagtgataattgtgcttcttctaagcagtgtaattgttttctcttatggatcctcttcgatatggatctggttagatttctctattggtaaagcccagagcctaatttgggcctaattctaaaaagtttgtagtaccttagagtatgaattttttgtattttccctacttcttgctttttgtcattgccttcctttgtgtttcttttgtgatcatgacagtctattcattattagattttatactttttttttgttagctatgttaaactcattgttgttagcaaagttgtttatataaatgaatccagcctgaagagttgaattagaattgtcagtaaaaaaaatcttgccttaattatttcaggactggaaaggaaggccaacccagagagtactacacattggattccattttatttctacttaataacgtgcacctttctcatcctgtttatgtccgacgtgcagctgtaagtagaattcattttacttatctatctatttatcagttttatttttatttatttaagagacagggtctggccttgttgcccgggctagggtgcagtggtgtgatcatagctcattgcagcctcgaactcctaggctcaagtgatcttcccacctctgccttcaagtagccaggactgcaggc

SEQ ID NO: 3536 - DNA, 2300 bp, Homo sapien
aaaagtaagcatcctaaaaatttgtagaagagcattgagaaaaggctagtcattctggagaacttaaaaccctgataatttgaaacaactaaatgactagatacactaataaaaaaactttatctgttaggttagaaatctatatgtgaatttaacatatgattaaagagacatgtcaagtcaatgggaggaaggtgggattattcagttacaagctgataaaagtagtaaagttctgtattataaaaaacaaaagacatgacaaactgggaaaatatgttaatatttcaactcatcacagataaagggctaatctcactaatatacgaagggtcctggaactttatgcataaaagaccaaacactctatggattatgtcataaaattcacagaaaaggtgataaaatcatgaaaaatgcttaatatcatttataataagagaattgcaaatttaaactatacggagataggatttttttttttttaacctgatagaaaaaaatctgtaagtttgataatatgctctggtgaagcaatgagaaaacagatattctactatattgttggttataatgttaatcagtgcacccctacacccccattgaagaattggcagcagtctaacattacaaatttaacatagaaatcctgtgtctggaactttatcctagaggtatatttcgtttagcttttttaccagttgtgaataactaaaaattacatgtgtagggtgaatgctaactttaaaaaaacttgccattatatataatatctatatgtacatttatatatttatgaaaacttgtgactttatattaatatattattgtgccattgttcgtaacaacagaagactaaaattgaacagctcatcaacagggacctagttaaataaattgtagttaggccatacagtagagtactcagtagctataaaaaaatggttaaagagggccgggcacagtggctcacacctgtaatcccagcactttgggaggccgaggcgggcggatcacgaggtcaggagatcgagaccattctggctaacatggtgaaaccccgtctctactaaaaatacaaaaaaattagccgggcgtggtggcatgtgcctgtagtcccagctactcgggaggctgaggcaggaaaatggcgtgaacccaggaggtggagcttgcagtaagccaggatcgccactgcactccagcctgggtgacagagcgagactccgtctcaaaaaaaaagtaaaggaaatgctctacttactgatatggagggttatgggagataagttgttaggtaaaaaagaaaacagggttcagaacagtatgtttagtatgtcaccttttgtattaaaaagggtaaaaataattttgtatttctcatatctacagaaagaaactctagaaggatatataagagactagttggctgcatagggtggtgggaactaggtgaatggggacaggtatacccctttttgttgagccattcaaaaattaagtaatttaattttaaaaataatttagttttttaccagttgtgaataactaaaaattgcatgtttagggtgaatgctaacttaaaaaaaatcttgtccatatatatgtgtgtgtatgtgtgtgtgtatatatatatttatgtgtttacttacacctttttaggtgtctgtgttatgacattggagcatatactttgaagcaactaatttcagtcagatcatctcagtaatttgtaagctaaattgttaaaaatagtttgtcctcttagagactttctagtatagattaatcttttaaataacatgtttttgcagagctgctttaaaactgaattttttacctagagaaaatcaccatatagaagtatataaaaaacctaaagcatttcacttgtaataatatccaatatatatgttgaaatagtaatccttacgtgaatctttttatgtcttcagcaacatcggcaagtatagacagaagcgctcccttagaaataggtcttcagcgatctactcaaggtatgtcttgttgcatatttatattgaactttcagaagcccattccaaaactacacatttatttacttctctttcttttatagtcaaacgagctgcagatgaagttttagcagaagcaaagaaaccacgaattgaggtaaagaaactgtattttaaacaattttatttatattgttattgaaattgggattctttagtaacaaggattctttgattgcagtaacctgaggagctttttttctggaaaaatttttgtggtagaaagaacaattgattaataag

SEQ ID NO: 3537 - DNA, 2300 bp, Homo sapien
aatccagggagacattaaaaaaatccaatcaaaagaactggcaaaagaataataattatttagtcctttcctggagaaaggggtagggaatgtctctaaatcaactttgtatcccctatacttaataagctatgcctaaatgcacatgttggtacacagtagttaatcaatatgtacctgttgaaaaagtgaaaatataaacattcatttattattctattaatgattcctgggtatgctgcgccagtgttcagaaaaaaaaaaaatcccacaatttctctagcagtgccatgtaataaaaagtttaagaacagagaataatgatagtactagatagatttaaaaagaaaacaaaaacacagaggataagaatttagataatcttgcttcaattcccagcttggcctctattcttatcagtatttatctgacatttggactattttacaactccaggcactggttctgcatcttttaagtgggtattacaataataaaattattagaaaagagccatttgcataacagctcaagtaagcttagcacgcaatctgattttcagtaaatactccataaatggtcattgtggctagcttcatagtcaaatcctatgtaaagaatcactgataaataaatactgatctacaaaaacacatctgtacttctggaaaataagttattttaagtaagttcttaagcattactctgttaactagtaaactaattttaaaaacaaaacggtagtgagtgagaattgcagtatgggtggatatagactacaaggaagttgggttttagtcctctccttcaaacttaactaggaaaagtcaaagctcagtctaggctttaggtttcctatttataaaattcttttttttctttaacgatccttctaacatttctaatacagtggggttcttaaaactacaaagcacatttcatcagcaaagctcaaaaatatgtggacaaaattttttttaatatcagagaaaacaaattcatattcatttgaaatagcatatattaatggtggaggcagtgagatgaagaatatgtatataactgttaacctttagcttaagctccaaaactataactttctaggactgaattactgtccctagagtcacagaggaaaaactgataataaaggctttttactacaacaaaaaatttaaaaaaaccttccctactgctctgcagtaagaaaagaaggtgccagccccagaaactaaccatattagaaaaatctcagtgagtgtgtagtgttaataaaatctgcctcatggcaagttattaaatctttctgaaacattagaataagtaaacataattagtaaaatctcattacccccagatcctgtacaagtgtgctatatctattacatcattttactgaattctacgatacatgtaattttaaagggaaggaaaaataaataaaaaataaatgacaacattaaaaagtgatttaaaataaagttttctgccatcaagaacaccaaaaaccacataagagcaaaaaagaagtgggctgtatcacatcatgcattagtaaagtaatccaagacagcttatttatacaaaccccagaaaacggggggggggatctaaattacaaagatacatggtttcaatagaaaccataggtcttaactacatattagtaaaaaatcaagagcaatttgaaagcagagaaaaaaaacttcaagaagagaatgcactgaaggggttaaattacaccaacttacacacaaaagcttatactgcttacaccctacaaaagcatgtaagaaacatgaaaaccaacatctaacacagaaaacacttagaaagcctgtacttaagaataaagttaaaaaaggaagtaagctggaaaaaataaaatcataaccatttcataatcatcacattttcaaattattcactcatcactacacttgcattcaacatatataatttatcacataaaagcaaaatctctaagcttctccctaccttaggtttttagtcaaaatgaatgcaaacaatcacgtgggattcagccaagcagtgacgttaaattctgctctgtcagagagagcatctgtcaagcccacatttaaactgctgcctgcctgtgcagcagctgaggaaccgtggatttcatattatagactaaaaccccattaaaactgctcaaaatccttcctgcagctgccaggcaacaacgaaagaagagaggtaaatcctattcttttccaatacaactgaagcactacattttagctctggctgctttacattgcagctcagtgtta

SEQ ID NO: 3538 - DNA, 2300 bp, Homo sapien
caggataccaaatcagtgtgcaaaaatgacaagcatttctatacactaatagtagacaaacagagacccaaatcatgagtgaagtcccattcacaattgctacaaaaagaataacatacctaggaatacaagttacaaaggatgtgaagaacttcttcaaggagaagtacaaataactgctcaaggaaataagaaaggatgcaaacaaatggaaaagcattccatgctcatggatagaaagaatcaatatcgtgaaaataatcatactgcccaaagtaatttacagattcaatactattcccatcaagctaccattgactttcttcacagaattagaaaaaactactttaaagtttaaaaggaaccaaaaaaggcccatatagccaagacaatcctaagcaaaaagaacaaagctggaggcatcatgctacctgacatcaaactatactacaaagctacagtaatcaaaacagcatgcactgttaccaaaacagatatatagaccaatggaacagaacagaggcctcagaaataaaaccatttacaaccatctgatctttgataaacctgacaagaacaagcaatggggaaaggattccctatttaataaatggtgttaggaaaacgtgccagcaatacgcagaaaactgaaactggaccccttctttacacttcatacaaaaattaactcaagatggattagatatttaaatgtaagacctaaaaaacataaaaaccctagaagaaaacctaggcaatgccattcaggacataggcatgggcgaagacttcatgactaaaacaccaaaagcaattgcaacgaaagccagaattgacatatgggatctaattaaactaaagagcttctgcacagcaaagaaactatcatcagagtgaacaggcaacctacagagtgggagaaaaattttgcaatctacctatctgacaaaggtctattatccagaatctaaaaggaacttaaacaaatttacaagaaaaaaacaaacaaccccattaaaaagtgggtgaggaatattaatagacacttttcaaaagaagacatttatgtggccaacaaacatgaaaaaaaaaagctcatcatcattggtcatcagagaaatgcacatcaaaaccacaatgagattttgtctcatgccagttagaatggcaatcattaggaagtcaggaaacaacagatgctggagaggatgtgaagaaataggaatgcttttacagtgttgctgggagtgtaagttagttcaaccattgtggaagacagtgtggcgattcctcaaggatctagaactagaaataccatttgaccctgcaattccattactgggtatatacccaaaggattataaatcattctactataaagacacatgaacacacgtttattgcagcactattcataatagcaaaaacttgtatccagccaaaatgccaatcaatgatagactggataaagaaaatgtggcacatatacaccatggaatactatgcagccataaaaaaaagaatgagctcatgtcctttgcagggacatggatgaagctggaaaccatcattctcagcaagctgacacaggaacagaaaaccaaacactgcatgttcttactcgtaagtgggagttgaacaatgagaacatatggacacagggagggggaacatcacacaccagggcctgctggggggtgaggagcaaggggagagatagcattaggagaaatacctaatgtagatgatgggttggtgggtgcagtaaaccaccatgacacatgtatacctatgtaacaaagctgcacgttctgcacaaatatcccagaacttcaagtataataaaaaaaatgaaaaatgaaaaataaatgaaaggcatcaaaatcagaaaggaagaagtaaagttgtctctgcagataacatgattttatagagagaaaattctgaagactccaccaataaaaacatcaggacttacaaataacttcagtaaagttacaggatacaatatcaatcaacatacaaaagccagtattgtttctatacattaacaaaaaacactctgaaaattaagaaaacaatcctatttatagcagtatccaaaataacagcatacttagaaataaatttaaccaaagaggtaaaaaatctgtgcactgaaaactaaaagacaaaaaaagaaattgaggaagacacaaataaatggaaagatatcctctgttcataaatgggaaaaaataatattgttaaaatacccatactacccaaagcgatttacagatttgatataactcctatca

SEQ ID NO: 3539 - DNA, 2300 bp, Homo sapien
tatacacagtcaggtacagaagatcaagaagggacaaatggcaatcaaacagaacagtgtacagaactaaaacatgaaaactcactggtttaaaaagcacaggattttgtgtaatacaaccctacattcttcagtaaattccaataattatgatatcataagttttgcattcaacaaccatcatcattcactgttttctccttatacgtaggatgctatagtagatgatgggaaaacagtgacaagtggcccctatgtccataacatttaccacattataaggatgacaaatgaccagtcaagtgcaatactcatcataaacagtgtgatggcagtcatccatgttctgtgggagcctgcaggatgagagaagagaaggaggaaggaagagaactttgtctgttatatcttttatatttgaaaggaagtccaaaaagttttgctatttagtaagatgcctctggatgtcttatggaaaatggaattgccatatgtttaagactgtagacagggtaagactaagaatccagactcactagaaaagaattaagtaataatttattgtcagaaaggaacgtaacaaattcaaaattgctatagtaatttttaaagcttcgatgctttaatcagccacctagagcctttggctacttagaggtaataaaacccaagtttcctaattttctttttgaatagttttagatttacagaatatttgcaaatatagttcagagtcctcatatactcttcacccagctttccctcttaagtgtctcatgaaaagaaatcaaatgtagcttcctctgtagttctctggtggctctgtttaagatgcagctgttttcacaactgcagaaattaaagtgcccagaggaaactcaggtcaacaaaagagcaagaggagaatggaaatctctaatgaaggagataactttttaaatggatcttcaggttgggtgcagtggctcatgcctgtaatcccagcactttgggaggccaaggcaggtggatcatttgaggtcaggagtcggagtacagcctggccaacatggtaaaacccctgtctctactgaaaaaaaaaaaaaatacaaaaattagccgggcttggtggcaggtgcctgtaatcgcagccacttgggaaactgaggcaggagactcactcctacctgggaggcagaggttgcagggagccaagatcgcgccactgcactccagcctgggcatgagagcaagactttgtctcaaaaaaataaaaataaaaataaagggatcgtcaatgtaacatcaattgtttagatattactataatttagatgaatcaactgattcaggttatgtgtgatctatatttctgtatatttccatcctataccctttgaacacattttatagtccccttgtttttatgcaataaagtagaaattcatgagttgactctgatttttcactgtgaatctctaaaagtattcccagaggcctacagagataaaatctgaagttagaccagttacataaatcagagcggtcaaataatgatgcttgtggatccagaaatgtcaccagcaagtagtagttagagtttgattatataagatcttaggtgtctgggttttttaaaaatatcaatttggtttatattctaaatggttaattaaaaaactgaacaattataaaaattaatataactgctttggatttgctctaatcagtaaagaaacacttaagcattatgaaagttcctgtcacagttctgatttgtatttttctgcattaattaaaaattggttttaatccaagtatcaaagataatgaagaaaaacaaacactttagaaatttaataaggtcatttaacgaatcctgtggaaaactttcttgagatgttactttggaaggtttttctaatttttttccaataaaaagtaaatatgatgtgcacaagttttcaaaatttaaaatacatacattatggaagtatttttcaatatatctgtatcattcattcaaatttttaaaaaacaaaataggtctacatgacaatttttatgttagaaaattgtattctagggaggagccaagatggccgaataggaacagctccggtctacagctcccagcgtgagcgacgcagaagacgggtgatttctgcatttccatctgaggtactgggttcatctcactagggagtgccagacagtgggcgcaggccagtgtgtgtgcgcaccgtgcgcgagcggaagcagggcgaggcattgcctcacctgggaagcgcaaggggtcagggagttccctttccgagtca

SEQ ID NO: 3540 - DNA, 2300 bp, Homo sapien
tccaaagttttgtttctatttaaaaatattaaatttaatttatcagaacctgataaaaagatctgagagagacagacagagagagacagagagagataaagtaagcattttcaggcctacaaaagtgtaataaaaattctagataatattctagataattgtatcatactatttattaaaatagtaagatgatattgctgactatggtttattatggaaaataaacataactcaatatgagattacactatgcatgtattacatttcaaaggttctcaagtaaacattttttcttaatatattagtatcattaaattcaacacgcaagcaataacatcacaaaattactgctggcttaacagtaacagtgatgtcaatcttggtgttatgactgtagatcagaaatcttctttccacctaagaaacatctgagaaagaaatatattttctcattgttcaaaacccatctttaacattttctgttaaaattccgtatttattgatttggaagaaaacactagaaacaagagtgaagtgatcttttaagaaagcctgcaatatcatctctcttgttgccatagaaaatataattatttggaaaaagaagacaatgacagatgatttaaaagtgttttagaaaggtaagccaactgtgaagacattttagaaacatttaaccaattaattaacctgtattgtcttcctaacatatgcataagggtcatgtaagttagaacaatctatgactatgtgtctaaaagtgtccttcaaattttcaagtaaattttctaagtgttaagaaagaattattacatacccaaaaaagtctatgcatgaccgtccagtaaatataaactgaaaattctaagcataaccatttaatggtactggtacataagagagtgtgttacaaatataatgtttttaatacaaggacacatgttgattaattgtatcaaaattcaaagaaaaaatagtgattctatggctagatgcctcaaatctaatgcaataaatttgtatactatccatgaacatatatttatagataactaattaatgttattttcatggtgaacttaccataaatatggaaaaatatactaaaatggagaagttaaatagaggaaaggagctcagaaatcagtgcagtaagacaaagaaatgagagcacattttaaagtttggaaatgggttccttcaacaggggaaagaaaactctcacgtgttacatccctcttgattctaagaatagacagaaataatactgctctgaattatactccagatgactaagccaagtgctgattctacccagaaatatctctgtgctttgaaacaacatcctcaacactgaatacaaagaagagataggagttatgacaaccacgaaagacagaaaatgtgataggaaagactggagatcctagtgctgacaccctaatgggctgtcagggactggagctggtctaggggccctcaggcaacaccaaggtgtggcctcagccagatgccttcatttcctccaggaccttattccacgccgaggcaatggctagacctctgagaagggaaactggattggaaaaaagccaacatttcccaacacctgaaggcgacagggggattgacagtgtccttgcctgcaaacctgtcctccatgtcttaagtctgacagcccttaactggctgacagaggcccggtgtttttctttcattttagctattgtggagtttagggactcaaaaaaaaaaaaaggacagaaaagcagcaagtccgcttttactcacacatctacagatcccggatgagccacttaaaatgatgcaggactttttggggtgttgcttcaccagccccagtagccggtggtacctctgcttgagttttgctcatgcctgctgggctggttccacccactcgacctggcaagctgcactcggctcacgctaccaccctggatcccacggctgccaaaggcaagccaggcacagagccaggtacagagtggcaaggggtttgtgagcaagtgatcgtggggtctggccactgcacacagccaggcacgccagctgctgcggcagggcatgcagctccaggaaccggcaccggcaccagctccttgcgaggctgcagctggaccaggtgtaccacaggcggcttccgctgcaagtaccagggtctggatgaggggaacacagtggcacccaaaaacctgagtgagacgccagcaaccacagaggccaaagaggtagggggcgtgctccagctctctcgttcctactttccgcggccacca

SEQ ID NO: 3541 - DNA, 2300 bp, Homo sapien
tctcctaaacgaatgcctagcatagagaaaatacttaatacacatttgttgacttaaatttaattcaaggattgaaaaattaactggatatcttgaaatatacagtaatgattgtccttagactcttgaactttaccatctttcctattcatatatctatatagtaaatttcactagaaaaattcttttaaaattgacagaagataatttataccttttatggactctgaagacacttcaaaacattaaaagtccttatgtctttggtaatgaaacaataacactcaatgaaggatgtattaaaatttttgacttaattttgaaatcgtatatatgagctatactttaacattatgagagaaaagcataaaacaaaaataggtagttcttggcttttaacattaatgcaaatcatgcagaatttgagttataaatttaaatataaattgaccattgatgatatccagtttttcattttttacctgtattgcattttccccctagagaaatagatcaaaagagcacaagagtatgcgtacatagtttaccaggtagtagaagtgtgttaaaatgttcctgtaaaagaaacattggtaaatttaaatacatactgttctaattttgtattttttaatttttgaatttgacattgagtttaattcagcaacaacaaaaaatacatataaaactagaaagggactttttttcctttcttttcataatgaagcagatcaacttaaaggataataaaatttttaaagaaaagatattctaatgtactctcaataattctacagaaataaaactgtaaagtgcaatgtgaaatcaaagattatagtcattgtataatttggcttggaggctatgaaatgtctttttttctttttggtattttacattattcacattttagaataacaagaacaccaagaattacccctaaaacagagaccctgtatttaatctactttgatcagagaagtagaatttataacaggttagctaaaattgggagcatgccttaaaacttaaagattgtatgcatatatgtgtatatgttataaacgtgaaatatatttgacacacacattcacatataaattgttaaaaactgaaggcagaatggaactaatatatgtaacagagaaaaacaataaattttatgaacttgttttatatttgcatatcaagagtcaagtatgatgtttctttaagttgactttttttacttcattatttttaggaataaatgtaagattttacaaatcttttatttccccacaagatctgaagtttggtatttttgcattatgacagttgttgagactaggattttaagctaggatatgattatatttcctatataactaaaaattttgtttcataaattttaaaataattatttttgactatgaacattagtccaaatttaatatttgacacagttcataccagcttgctacaataatgataatttattagtctttctgttatttaaagaataaaaacatgcttataaaagacttttaatgaaatgttgcctttttaaaataattatacttgcacatgaaaataaaatataaagtcaataatagtccttgtagcccaatgggaattgattctgtttattgtctgtaccattttgctaccagttacattgaactgctttaaaataaataataaaattatttctaatgatgaaaactcttgatttttttttgccaaaacttcagttgcttagataaattgtgtgttggaactataaaaatcatttttcatttttatattttaaacccaaaatagctatggaggttatctcattggaaaatttagtgataaacaaacttctgttgaattatgtcttaacataatagattctgaatagttgcaccatgtcagaaaaggagaagtgaggagggaaggagagttgaaatgggaggaaatgaacaataggaagaaagggagcaagaagaaaacagaaggtaagaaaaaaaataaaccttagtgaagatgtcagaagagaaaagtattttatgacacagaatcatgtcacaataccctaatttaagagtcagaaaagggaggaggagccaagatggccgaataggaacagctccggtctacagctcccagcgtgagcgacgcagaagacgggtgatttctgcatttccatctgaggtaccgggttcatctcactagggagtgccagacagtgggtgcaggccagtgtgtgtgcgcaccgtgcgcgagccgaagcagggcgaggcattgcctcacctgggaagcgcaaggggtcaggg

SEQ ID NO: 3542 - DNA, 2300 bp, Homo sapien
gtcagacaccaatcaagaaagtttcagtggtgacctcttaatgttagggtcagcttcatggacacgtattctgtgcataatatcagggtcagcacaaggttccacaaccagaaggtcctcgtgattagttgaatgttctaatgttaccttcttgaaattgttaatgtcttattaggaggcctcatatttttcattttgcactgggtcctgcaaattatgtactcagtcctgtttaatatgtttgtattatgagggtagggagattagagtctagatgattgaaaaagtcctttctttaaattgtattaaagtgaaaacaattttaataccaatgattgttaacaagggtacgtttcacaaactaatatacttgatggttagtgaatatcattattatagtaagtaaaacttcaaattgtcactttttaattgactgtaggttttgttaatgtgttttatttttactagtacttttcttccatgacatattacttgataaaaaatgttatgtgcaatattcctggtttctacaaacatttgttttacttcttaaacttacaaaattgagagagcacaattaccctaagaaaaataatctctaaaagtcattgctacatctctatataatattcagtattctgttaatggaagcatccttattgctagagaaattctaagtgctgtctttttccccctttaataggaggcagtataattgactttcgtttttattcattctttcttggaagggaaacatctgggaacagattttacgaatacccttcatcttggaaataattaatgcagttcccttcattatctcagtaagtcctaaaagaaccttaaaaaaacacttttgtaattagacttaagtaaaatatttaaacctagatactgttaaataatatggtagctaagataaatggatttagactttggttagaatcatgatactaagcaacaagataaaattggttggatcgtgttgtgtaactaaatggaaactaatgatttcatacaatagcagagtaaaatattttaaagagatatatgttctggggatgccatttgacaaatgtcattgttgtttaaaattactagaaattacttatccacttattgtttatattgtggattttttttaaaaaaataagccaattggaaacatatttacaaaagtttttcatacgttgaaaatatctatctgtggtttaaccacaagatttattaagtctagttctgtttttagtaaggagattgtcaaaagtcaggcacccaacattttgcttcttttcaaactgctctgtgttatcagttccatgatgatcctattcaactacagtcccataaatatgttactcagcactttccttttgcaaaactatattttaatcgcaatttaataaagttataataatgtctgttgggattatcctttgtattacttcatttgaattttatttggaggattttgaaaataagtagatattacttggagctgtcgctctgttctgataattattttaatttgagtgatttatctagagaagcaactggaactagattaaatgacaggttaactaaatataattctaattgaacatagctccgcaatgtcgcttaaagtggtttaacataaagagagtaagaggcaatattatgaaaaaagagagtacctttcctctttgttcctacttaatacctcaagttacagagaaaaggaagtcaatgtctattacaaaccatcacactaaaagattcaatgatataattagcatagatatctgccatctggtgaaagattattattttctttttgcttctgcaataatttccctaagaaagatttagacaatgaatgaaagaacatatcaattccttacattttattaagagtgagtttacattatttgtcatattttaaattattatactttctttaacagctttttttccatttctttttagtatactgggtatggtttattgctttgagataaaagtctagttttgttttgttttgttttccagatattctggccttccttaaggaatctatttgtcccagtctttctgaactgttggcttgccaaacatgccttggaaaatatgattgtaagtatagaattaaagtgcaaatatgaaaatatttttaaaccatttcttattttcaatgtttagattaaacagagagagagaatttgggatctagtcttgaactttctaattctgcattctcccataacgtttaactcatactattggaattaattaagctgtaattaaatttccaaatgttt

SEQ ID NO: 3543 - DNA, 2300 bp, Homo sapien
gtaaatatttcagattttctgtcatccaaataatacagttagactgtaactataaatattaacttggaacattacaaataaaattaatagaatcattttaataggagatgataaggtctaaaatataaaccagatctctctctctatctctatctgtataaactaataatgtagcaatattactttcttatttagcaaagtaattacaaaagttcgtgctaaattatgatttcataaacaaacacataccacaggagtgcaagcatggatggaaaaaaacatgcttaatttcctagatttaatagcttttaatgcaactccacacctatttgttgaaatgtggctattttgaaggtcccgtgctagaggcagctaagccacagggagaggggaagagttgaaagaaaaacgcacagataatcgtatagcgggtcaggttatagtaagcattccaggcaaaatactcacatgggttatgaagggttcaaacaaaggggttcaaaggaagaagacatcataagaagctggaaaaaccaagaaatctaatggaggatatgtaatttgagatgggtctggaaggatgagtaggattttgaagacagagacaaacagtatgacttttatttcaactgctattcttcaggtttcagtagtcattgtatttcatttgatgttacaagttttggtaatttcttccttcatttctagcttcttaaataaaccctctgctacatgacctctactgagcattaatcatgccaaattaatcactattttctggataagccaaatattctaaaaaatccctatgcctctactcatactattctctctgcttgcttcacctttgctcttttccctaaagtaggctgcgaacgaatatagaaggcttggttcattttcaatgtcttccttgacccccacctcgaagaagtatgtgtacctcacaggtatttccaaatccctctgtatgttctttgattattgtctctcacatcgtatccatttatcaaggaacaagcttgttcctccacacagagcggttcttaagtaagggcaggagaagccatatggttatcctccggcccaggctgtcaggtggttggtattcggtctgtatatactctgatgcaatcagtttttgaaggaaagaacggtaagcgcaaatagaaccatagcttgtgtagcagggttcatgtaagcagtggttcttactgaaaaacagaccctgttctctcgggctcacttcttcctccgtgtgaaccactaataggaggggaccgaaggctgaggccaggccacctggaagcccacaacgctgctagtagcagcgacagcagtaacagcaactcaccactgtaaaatcctcagtgcgtttccatgtgctttccctgtcatctaaatgcttctcttcagcggcctaaggtggcccttctttttccccgagttcagggaaacacctcccttctttcagaatgtgagaaaaaaatgggattttcctggggctgagagtggggattccctttccagaaacgtgcaattttttcatcccgcccacctggactgaaggcaatcaaagcgagggagctcgtggcatagtggaacactccaagcaccctggcccccctcctcccagagaagggtctggagccccgcaatccgctaattagctcgcccccattggttgtccccaaggcacccccgtgccgtcactgtgctatgctaatgagggggagtctcattggctgggcctccagctccatctccacagggagattgcggggagagccgggttggccgcgtctggggccgaaacccaccgcccccgattcccgccagctcagggctgtgccggatgcaagcccgcccgagggaacagtagccgggaggctgccctctgggaggatctggcaactgcctttaaggaaagtgcttcaccatcaagcggcgctcactcccacccctctcccctctttctaggcaccgcgcgtctttttcggcgaagtaactttttatacccgcctccccctagtcctggggaccagaggcggtgccgagcctgggggcggttccttggcagcgttgattcttgtcagagccagacttttgctcctgggttgggtttgcatcatccccattacaccctcgggaaagaggagccagccccctttcaagccttagcttccggctccaagcggaccccctccccctccctgtccccttccccttctcccatccctctctcggccacagcgtcttgttagtcctctccctgtactccgcaatattttctttctttc

SEQ ID NO: 3544 - DNA, 2300 bp, Homo sapien
ggaaatactgggtagaagagggtggtccccaagcaaaggccccaccctcaagcctgaagacctgtggccctaaatgaggacaggcatttcaggtttcacacccaaaaagttgccttttggcccgccatgccccgctgtcgtacccccatataaatcccaaactccaagctccagaagagacctacaagtgaggagacggagaggcaagccgacaaacaggcctgcgatggcagaatgacacagcagagaaagagaggagggacatctggactccgaggggagtttggccagggacgggtggagaagagtctggccactgggaggcctgacactgggcgaaggtcaccttcccactccatcttgctgacagccacctccaccactcaataaaaagttgccctcatccctcgagcccccgtgtgatccgattcttttgggacactgggcaacagctggggatatagagggctatttcactgtcccactacccatgagataaggaagagggtttgttgagctgattaacacataaaccatttgcagatggcaaagctaaaggagcacactgtaacatacgcccacttgggcttcggaaatcgcagacacccacccctagatgctgctgtgaggccagagcccgaaagcgctcactccggttcccgcaccggtgcatctgtgtgctccccctccccgtaaggggtttgagctgcagggcgacctaactggcaagccgcacacctgttgcatgtccttcaaggggaatcagggatctctcacatttcaattagtcatcaggaaaattcatattataaccacggagaattattgctttgtgttaccagaaaagctaaaattacaaggattaaaattaccaagtatctctgagggtatggagcaacttggacactgctgatagaaatgtcaagtgatgtcaagtgttataatccatttggaaaattgtctaattttatccattacacctaaacataaattatgtcccagtgtttcactaccaagtatgcacttaccagaaatgtggattgtgtttaccaaaaacctcataatataaggcccatagcagcactattcataccagctccaaactaaaatctgctcaaatgctcactaacaggcacacagataaataaaatgtgaactattcaaaaagtggagtattaaatcgcaataagaatgaactatctgtaactacatctaacaatgtgtttgaatggtccaaacacaatttttggtgaaaaactctaaacataagaataaactgcttctttttcattatacaaagtacaaaagccagacaaatatattccatgttcttgaagatcagaatcgtggtctctgtgtgtggggggtgtgggagagggttgagaggcgtattgactgaaaaggagtactggggttttctgggatgtaataatgttcagtgttttgaccttggtggtggtttcacaggtatctttaccttctcaatatccagcatatgatttatgttttccttatacatattacactacaatacaaagttttaaaaatcagcatttcaatttgttgatttttggattattaaacctatttacgtcaaatgagagtgagccagttgcttcatacacatatacaaaaagtatttagaaaactaatttcataaattgctagaaaagcagacccccaaattcatcaagcactgcattcttggcaaagtttgtacacattgtctgggtgctgattgtgaaaacattgcctaaaccaaagttttgtatgtgatttcttttaaagtttctcttatttcctgttctgaggtttatacacaatagacccgaatagagtttgaataattgaagggtttatgaaatccagaggatatcaccagctgctgatttgcacataccaagaacatgaacattttccaacggagaatttccctagcttaataagaaaaagtccaagagccggtcacagcattaacatttagtgggagtgcagtgagaattgggtttaacttctggcatttctgggcttgtggcttgtggttgattttttatttactttgcaaaagtttctgataggcggagcatctagtttcaacttccttttgcagcaagttctttcctgcactaatcacaattcttggaagaggagaactggacgttgtgaacagagttagctggtaaatgtcctcttaaaagatccaaaaaatgagacttctagcaaagattatttgccttatgttatgggctatttgtgtagcagaaggtaagattaaaagagactcttttctgaaaactgta

SEQ ID NO: 3545 - DNA, 2300 bp, Homo sapien
tgtttacaattcccatgggtatatgctgatttgatgcctttatcattatataatgactttcattgtttctttttctgtttttagttaaagtccattttatctcatttacatatttctgctcctgctcttcttttccaacagcatggaatatctctttctctccttttactttcagactatgagtccttagaggtatcatgtgtctcttgtagcaagcatagagttgagtgttttctttttaatccactaaccgactctatgtcttttaattgaataattcaatccattgacattcaaggtaattattgatagataaagattaactattgccatttggtaattatattctagtcatttggcagattttttttcttcctttcttcttcactcttttgtggttaaatgatttttttctatcagtgttgtttgactcttctctttttacttgtagtgcaattattatggatttgtgctgtggttattctgaggcccacaaaattcttatatttataacagcttattttaccagataacaacttgtgattcactttttaaaagaaaaaaacaactctacatttttactctaccttatcacacattttgaatttttgatgttacaactcacaactttttaaattgcatactctctaaccaattttgtagctattatttttaattgtttgctatattatagcttcatttctaagttctaggatattcagggtggtaatcttggctctcagtggttgcttttaagtttctgtaggagggagagaagctggagaactcctacactgcagttttgctgatgttattctctccatgattctcttattttaatgaacagtatcttaaaccacggcaagtatagtaatgtaaaataaagaataaacagaagaagtcaatgagagaacatgtgtggacttgagttatattcttccaacaaaacagaaaattttatatatatatatatatatatacatatatatatatatatatatatatgaatgtattgtactaaaaataaaagataccccaaaacacaactttaaaaacatttaaatatcaagaatatgctgaaacttttgtactcagtatgatctattgtgagttctgaaaatcagtatgctactctaaacacataaaaatacagagagtggaatgggatccagacacaccggtttgttttcatacaaccttatgtaattaagttgggtactggaaagcaaaggacaacagaaaattttagagacatggaccctgagagttactcattaatgattcatctgtatgtggaagaaactcacctattttccagtgtttaattttaaaattagtgttctcattttaagaagagtatgtgggataagagtattttgaccatttgtggggggggggaaaaaaaccttgccatgccaaacagcaggattttcacgagatgagtgtgccagatgtttattttcaacttgaaatcaacccagttcctatcttcattttcttctgcattgcagaagatcagcctgaaactacagtttctgaagttcctttctccatagcttgcttctcccttagattcccccatgagatgtacttaaagaagacttggaagaagagaaagacaagggattatctggtagcagctgctggtagcagctgagatcaccaacagtagctttctttgattctggacgttttgctgagaaacatccactgcagcaccatagataattagtgagggcatcactaagactcttgaacatcagaattttctggaaatagcatttttgacctttgttccctcagttcttccaatagttgcagaagcctttcgttccctttatggaaactctctttactcaaaaaatgagaaataaagtaaattaatgttttatgttacttttgcattcagtccattactgtgcctaaataaaattgtaccagtacatatcaggcaatcaaatccacagatgattgtgaaaccactaactggaattattgaagcattttgtaaaactctctgaactttgatatttactaaatgaccttaaagcccctagcttcatggtagtgcacttaaattcagaaccacacttggtaactaataatgaaagatttcaaaccccaaacagtgcaactgaaacttttgtattagcatactactgagaatatctaacatgttgttactaatcaatgtcattctgaccttgtgggtttcctgtgctaatggacaaggtaagttaaaagagatctaaacactcagcttccctcttaaatgtaacttcatgtaatatctagctttg

SEQ ID NO: 3546 - DNA, 2300 bp, Homo sapien
ccaggctgttgcctcacaggttgatctcagactgctgcactagcagtcagcaaggctccgtgggtgtgggacccaccgaaccaggagcaggagagtgtctcctggtctgccgtttactaagaccctcggaaaagtgcagtatttgggcaggaatgtcccatttttcccaggtgcagtctgccatggcttcccttggctaggaaagggaaatcccctgaccccttgcacttccagggtgaggcaatgccccgcccagtttcggctccccctccatgtgctgtacccactgtccaaccagtcccaatgagatgaaccaggtacctcaattggaaatacagaaatctcccatcctctgcgctggtcacgctgggagctgcagaccagagctgttcctattcagccatcttggagcggtgaccgcatttgtttttcttgtagacacactctgctgcttcagttcagagacagggcaggcagagaatttatttgcaaaggtttgaggttttctaaaacttggattacagatagaaagaaaggaatgggcaggagagtgtgtgcaagggattgacttacagtgatgaaccattgaatctaatttgggtatggtgggaagagagaaagtgaagggaaaagaatagtgaaaaagcatcagtgtcattgaatggttggaacaaatttagtagagtaagtgagctaaaaagattgttgaaatggtctagagtgtgacactttagataatttaggtagtttaattggaaatgataaggtttagatagactagaatcaatagtggagactagtagctcacagagacttctctggtttcttgattgaacatagctatatgcattcccattgacttctgaaccaccatcagtaagtttcatcttagtggaagtccttaggctgtccctttctccaaattttgccattaaatttttgactgactggccactttgttgcttgccccagctaatatcctctacacatactaatcttctctacttgcttcccactgtaacctctttatattcaataggatccttgggcagggaattttccacgctataaagtcactcccctccagtggagcagcagagtttccagtccacacagactgcttgcctacccagggttcaacttctgagccacagaactgagctgtgagacaaaggtggataaaagcatccactcttttttactgagatttatgtggactttctggaataaatatttcccaacagtatgctctttggccaatttctagagattatttttataattttatccagttttattgctgccttttggtggtgagtgaatataccaagacccagaaatacccattctcaaagtcccatcagaacaaaattattttgaagtaaaatttgttcaacaattttgggaaccattacataccaaaaattattcttgatttgactttttatagtctaaaaatatgaaaactattaagaagttacctcattcttttttttttttttttttttttgagacggagtctcgctctgtcaccctggctggaggggagtggtgcgatctcagctcactgcgaactccgcctcccgagttcacgccattctcctgcctcagcctcccaagtagctgggactacaggcacctaccaccacgcccagctaatttttgtattttcagtagagatggggtttcaccatgttagccaggatggtctgaagttacctcattcttaataccagttttaagtggaatttataactagaacagtgatgctgttatgttaagatgaggactgatcaccttcacttgcttgcctactgatgtagctgaactcttggctagaaaaaagaaggggcttcctctttcctcttcaatggcccatttctgaatattccaaactcagagactcagggaccacaacaaggaaattgaacagcttttattttgctcaagttaatattacatgataaactcagagtattattgtgaaaacactgattagacactatttgcttattttgcacaaccctccatgaactttgatgtttaccacaaaggactttactaaactagcttccagttagtacactgaaattcaaagtcatgctcataactgttaatgaaagcagattcaaagcaacaccaccaccactgaagtatttttagttatataagattggaactaccaagcatgtggctcctggtcagtgtaattctaatctcacggatatcctctgttgggggagaaggtaagttcaaaacagacctgaatatttagttcctttttcagatacatttatcgg

SEQ ID NO: 3547 - DNA, 2300 bp, Homo sapien
tatgaggtctagtttacaaaaatgttactcatcataaaaaaatcttagtaaatttttattaattattcttttaagattttcttattatgaaagagaaaatgtcttgtataacaaaggaattcatctttttaatcctttttttccctttttacatatgtctcaactacaatttagcctggacttttaatgtataaaattctgttatgattttctttaaaatgtaatatacacctgtagtgacctgttttattactagcattgtcataaatgctttagtataaatgaattaagaaaaatgctcttaaaatagattttggggcttatcgggggaaaccagcccctggcaattcaatgtaggttcttttctatttccctaagtgtcagctggtctgagaaataaagggaaagagtacaaaagagagaaattttaaagctgggtgtccaggggagacatcacatgttggcagattccgtgatgccccccaagctgcaaaaccagcaagtttttattagtgattttcaaaggggagggaatgtacgaatagggtgtgggtcacagagatcacatgcttcacaagccaataaaatatcacaaggcaaatgggggcagagcaccaggacaaaattaaaattgctaatgaattttcaggcatgcattgtcattgataacatcttatcaggaggcagggtttgagagcaaacaacccgtctgactaaaatttactgggcgggatttcctcgtcctaataagcctgggagcactacccaaaaccagggcttatttcatcccttatctgcaaccgtataagacagacattcccagagcagccatttcagagatctccccctagtaatgcattctctttctcagggctgttccttgctgagagaaagaattcagtgatatttctcctatttgcttttgtaagaagagaaatgtggctctgttcttcccagctctcaggcagccagacctaatggttatctccattgttccttattgtaccttaaaataatacataccccaaaacacaagtttaaaaagattgagatatcaagaatatgctgaaacttttgtactcagtatgatccattgtgagttatcaaaatcagtatgctactctaaacacatgaaaatacagacagtggaatggggtccagacatactggtttgttttcatacgatccttaaataattaagttgggtattgggaagcaaaggacgatagaatattaaagtaacatggaccctgagagatattcatttatgattcatctgcttgtggaagaacttcaaacaattttccagtctttaattttaaaattagtgttctcgttgtaagaagagtatgtgtgtgataggagatagtattatgaccatttgtggaaaaaaaacaacctaccatgctcaaacagcaggattttcagaagtagaatagtgtgccagatgtttattttcaacgtgatgtcaacacggctcctatcttcattttcttctccattgcagaagataagtctgaaactacagtttctgaagcctgtttctccataacttgcttcttccttagattcccccatgagatgtacttaaagaagacttggaagaagagaaagacaaggcattatctgtcagcagctgctggtagcagctgagatcaccaacagtagctttccttgcttctggaagttttcctgagaaacatccactgcagcaccatggataattagtgagggcatcactaagattcctgaacttcagaattttctggaaatagcatttctgacctttgtccctcaatgcttccaatagttgcagaagcctttcattccctgtattaaaactctctttacttaaaaaataagaaataaaaatgaattaatgttttatgttacttttggagttggtccattactgtcactaaataaagctgtacatgtacataccagggaatcaattccagagatgattgtgaaaccactaacaagaatcattgaagcattttgcaaaactctctgaactttgatatttactaagtgaccttaaagccctagctttgtggtagtgcacttaaattcagaatcacacttggtaactaataatgaaagatttcaaaccccaaacagtgcaactgaaacttttgcattactatactactgagaatatctaacatgttgttactaatcaatgtcattctgaccttgtgggtttcctgtgctaatggacaaggtaagttgaaagagatctaaacactcagcttccctcttaaatgtaacttcgtgtaatatctaacttcatatgt

SEQ ID NO: 3548 - DNA, 2300 bp, Homo sapien
gcccctccccccaccaggctgttgcctcacaggttgatctcagactgctgcactagcagtcagcaaggctccgtgggtgtgggacccgccgagccaggagcaggagagtgtctcctggtctgtcgtttactaagaccctcggaaaagtgcagtatttgggcaggaatgtcccatttttcccaggtgcagtctgccatggcttcccttggctaggaaagggaaatcccctgaccccttgcacttccagggtgaggtgatgccccgcccagtttcggctccccctccatgtgctgcacccactgtccaaccagtcccagtgagatgaaccaggtacctcagttggaaatgcagaaatctcccatcttctgcagctgggagctgcagaccagagctgttcctattcagccatcttggagcggtgaccgcatttgtttttcttgtagacacactctgctgcttcagttcagagacagggcaggcagagaatttatttgcaaaggattgaggttttctaagacttggattacagaaagaaagaaaggaatgggcaggagagtgtgtgcaagggattgacttacagggatgaaccattgaatctaatttgggtatggtgggaagagagaaagtgaagggaaaagaatagtgaaaaagcatcagtgtcattgaatgattggaacaaatttagtagagtaagtgagctaaaaagattgtggaaatggtctagagtgtgacacctaatatttagataatttaggtagtttaattggaaatgataaggtttagatagactagattcaatagtggagactactaatagctcacagagacttctctggtttcttgactgaacatagctatatgcattcccattgatttctgaaccaccatcagtaagtttcatcttagtggaagtccttaggctgtccctttctccaaattttgccattaaatttttggctgactggccactttgttgcttgccccagctaatatcttctacacatattaatcttctctacttgcttcccactgtaacctctttatattcaacaggatccttgggcagggaattttccacgctataaagtcactcccctccagtggggcagcagagcttccagtcctcacagcctgcttgcctacccagggttcaacttctgagccacagaactgggctgtgagacaaaggtggataaaagcagccactcttttttactgagatttatgtggactttctggaataaatatttcccaacagtatgctctttggccaatttctagagattatttttataattttatccagttttattgctgccttttggtggtgagtgaatataccaagacccagaaatacccattctcaaagtcccatcggaacaaaattattctgaagtaaaattggttcaacaattttgggaaccattacataccaaaaattattcttgatttgactttttatagtctacaaaatatgaaaactattaagaagttacctcattctttttttttttttttttttgagatggagtctcgctctgtcaccctggctggaggggagtggtgcgatctcagctcactgtgaactccgcctcccgagttcacgccattctcctgcctcagcctcccaagtagctgggactacaggcacctaccaccacgcccagctaatttttgtattttcagtagagatggggtttcaccaggttagccaggatggtctgaagttacctcattcttaataccagttttaagtggaatttataactagaacagtgatgctgttatgttaagatgaggactgatcaccttcacttgcttgcctactgatgtagctgaactcttggctagaaaaaagaaggggcttcctctttcctcttcaatggcccatttctgaatattccaaactcagagactcagggaccacaacaaggaaattgaacagcttttattttgctcaagttaatattacatgataaactcagagtattattgtgaaaacactgattagacactatttgcttattttgcacaaccctccatgaactttgatgtttaccacaaaggactttactaaactagcttccagttagtacactgaaattcaaagtcatgctcataactgttaatgaaagcagattcaaagcaacaccaccaccactgaagtatttttagttatataagattggaactaccaagcatgtggctcctggtcagtgtaattctaatctcacggatatcctctgttgggggagaaggtaagttcaaaacagacctgaatatttagttcctttttcaga

SEQ ID NO: 3549 - DNA, 2300 bp, Homo sapien
ataattgaaagagcaaaatccttgcacagaaaagatgggatcaaatctggtagagaccataacaagataggagtaaagatcaacatccagtgaagcaagagacaatgcagaaaaggatgcgtgtgaacagcaggtagttttcttctgattgattctatatctagatgaaaaaataaatgaagtcattagcaaagcacaaagtgaggattggtggttaaggagggagataatgaaaacaggagaggggaaaagcagtgtggaaattatttaggaccgtgttcattaatttaaagcaaggcaagtcagcacagttgcctttgtttttcttgtagacacactctgctgcttcaattcaggcacagggcaggtagagaatttatttgcaaaggattgaggttttctaagacttggattacagatagaaaggaacgaatgggcaggagagtgtgtgcaagggactgactgacagtgatgagccatggaatctaatttagatgtggtgggaagagagaaaatgaagggaagagaatagtgaaaaagtgtcagggtcattgaatgtttggaacaaatttagtagagtaagtgagctaaaaagattgttgaaatggtctagagtgtgatgcttaatatttagatactttaggtagtgtagtaattggaaatgacaaggtttagatagactagaatcaatagtggagactactaatagctcacagggacttctctggtttcttgattggacatagctatgtgcattcccattgacttctgaaccaccataagtaagtttcctcttagtgagatcattaggctgtttctgtaaatttccccattaaatgttaaatttctctcaggctgggcactttgttgcttgcttcagctagtatcctctagtcttctctgattgtttcccactgtaatctctttgtattcaataggatcctcgggcatggacctttccaagctataaagtcactcttctccagcaggggagcagagcttccagtccacatagcctgcctgcccatccagggttcaacttctgagccacggaattgggctgcgagacagaggtggatgaaagcatccgctctcttttactgaattttatggagactttctggaaaaaatatttcccaacattatgctgtttggccaatttccagagacaaccaatggttacttttaaatttttatccagttttattgctgccttttggttgggagtgaatataccaagaccctcacatagccattctcgaagtcccacctgaacaaaatgattttgaattataattctgttcttcaaacatttcaggaaacgttacttggcaaaaattattctttttttttttttttttttttttgagacagagtctcgctctgtcgcccaggctggagtgcagtggcgcgatctccactcacggcaagctctgcctcccggttttacgccattctcctgcctcagcctcccgagtagctgggactacaggcgcccgccaccacgcctggctaaattttttttgtatttttcagtagagacgggtttcaccgtgttagccaggatggtctcgatctcctgaccttgtgatccacccgcctcggcctcccaaagtgctgggattacaggcttgagccattgcgcccggccagcaaaaataattcttgattagaccttttatagtttatgaaatattaaaactgttaagaaggtacctaattcttagtgccagttttaaaagggaatttacaactacaaaagtgatattgttgtattaagatgaggactgatgacttgcacttgcttgccttttgaaacagctgaacccttggctagaaaaaaaaaaaaaacccagggggccggcggtggggagcttcctctctcctctaaacagtccatttctgattgttccaaactcagagactcggtgactacaacaaggaaattgaacagcagttattttgcttaaataaatattacataacgagctgagaatattattgtgaagacactgattagatactatttgcttatttcacacaaccctccatgaactttgatgttttccacaaagggctttactaaactagcttccccttagtacattgaaattcaaagtcatgcttgtaactgttaatgaaagcagatttaaagcaacaccaccatcactggagtatttttagttatatacgattgagactaccaagcatgttgctcttattcagtgtaatcctaatctcatgggtatccactgttgggggagaaggtaagttgaaaacagatccgaatattttagttc

SEQ ID NO: 3550 - DNA, 2300 bp, Homo sapien
tgggtctgcactacctttatgagctgtaacactcaccgcgaaggtctgtggcttcactcctgaagtcagcaagacctcgaacccaccaggaggaagaaacaactccggacgcaccatcttttagagctgtaacactcactgtgaaggtctgcggcttcactcctgaagtcagcaagaccaggaacccaccagaaggaagaaactctggacacatctgaacatcagaggaacaaactccggacacaccatctttaaaaactgtaatgctcaccgcaagcgtccgcagcttcattcttgaagtcagcaagaccaagaacccattggaaggaaccaattccagacacactgccatgaggtagtgctttcatgagagcatcagctgtggtatataggggaggatcaggtggtgggtgggacactagaacttccaagagaatatgacctttgtcttcagctaccagggtgggtagggaaggaccatcaggtgggggcagggttaggcatgtctgagctcagagtcttcttgggtggggcttgttgtggctctgtggggaatgggggtgtgattcccaggttaatggagttaccttcccaggaggattatggctgcctcttctgtgtcatgcaggttgtcagggaagtgggggaaagctggcagttacagacctcacccagctctcacacaacccaacaagcaaatctcacttctactgtgttcccccaaaaagcaccgaatttgtttccaggcagtaggggagcaggattgagaacttgccccaggctactagcctcccagctgagaatgcaagccagacttttgtgcctccctacctgttaagtctgcacaccagattcacgccctttcctgagttctggacaggaaagtttgtgttcggttggaattgttactaagttcagctggaggtttccttctccctgtggtcttttcccagttcctccggcagcccctgtgagacaagtcagaaatggcttctctggggacccacagagacgatggggctttaccctttgcttcctctacccctgtatttcgctcagctctctaaattgtctgagctccaggtaaggtcaaatccttctcctgtgatctagaccttcaggttccccaagggtgtgtgttcaggggtggacaatacccctttcacacttttcacagtttgggcattcacagtatgtgggctattttctgggtcatgcaggagcaatatactttcttcagagggtctgtggattatcttggctttcctgttatatccttgcagcagttcttggagcaaaagttcacaatgcgagtctccacatcctgctctgtccatccaagtgggagctgcaagttagtcctgcctcctatccaccattttttcctattttgtattttaaattaaaactcattagaatgtaaactccatgagggcaataattttaatccagttttttcactgctaaatacctcaaaactgttacatgtgctgccattatcatggacgttctaaacatttctcatgaatgaatgttgatatagcacagtgctgatctcaccacctgccacaaagtaaaaactctctaaatgtcaaacactactattataagtaatactattctatcattgagacaactatggttctgtatctctttaaggagtgcagtctaggcaacaacatatttcaacatcaggtatctgttatctcatgttcctaagttcatctttttacctgatcaatattagtaaagatctatggcctcaagtgaactttactctatgaatttacaattgggaacttaggttgaaaatttacctagtattatttattctgctgctataatttattatttattctgctgctattgttgccctaatcagttatcatgctcttactggactctgacatggtaagtaatgtcaattaatatagttgtgttattttaacattatttcaaaatattttaagtgaaatataagactcgttacaaaaggacttagacagaggttataaattattaactttttcctcaagagaagtattgtgtacttaatgacaagttcctagtgcttagaattgttaaaatctttgtgaagcacaccactgaagatgaggttgaaaaacctgacttttatcatcatattgataatctcaggagaactctatgcagaaggtaaaattaattcttaatattctttattctctaaaacatacaaatggagattctaatatttatacaactcaagttttaatatactcttctattttcattatcaattttataacatattttataaa

SEQ ID NO: 3551 - DNA, 2300 bp, Homo sapien
cagtcagcttatcgtggtatgaaagtgagaaaaagaataaaggattgcaacaaagcagcagtcactatacagtctaaatacagagcttacaaaaccaaaaagaaatatgcaacctatagagcttcagctattataattcagagatggtatcgaggtattaaaattacaaaccatcagcataaggagtatcttaatttgaagaagacagcaattaaaatccaatctgtttatagaggtattagagttagaagacatattcaacacatgcacagggcagccacttttattaaagccatgtttaaaatgcatcagtcaagaataagttaccatacaatgagaaaagcagctattgttattcaagtaagatgtagagcatattatcaaggtaaaatgcagcgtgaaaagtacctgacaattttgaaagctgttaaagtccttcaggcaagttttagaggagtaagagttagacggactcttagaaagatgcagactgcagcaacactcattcagtcaaactacagaagatacagacagcaaacatactttaataagttaaagaaaataacaaaaacagtacagcaaagatactgggcaatgaaagaaagaaacatacaatttcaaaggtataacaaactgaggcattctgtaatatacattcaggctatttttaggggaaagaaagctagaagacatttaaaaatgatgcatatagccgcaactctcattcagaggagatttagaactctaatgatgagaagaagattcctctctctcaagaaaactgctattttgattcagagaaaatatcgggcacatctttgtacaaagcatcacttacagttccttcaggtacaaaatgcagttattaaaatccagtcatcatacagaagatggatgataaggaaaaggatgcgagagatgcacagggctgctactttcatccagtctactttcagaatgcacagattacatatgagatatcaggctttgaaacaggcctccgttgtgatccaacagcaataccaagcaaatagagctgcaaaactgcagaggcagcattatctcagacaaagacactctgctgtgatccttcaggctgcattcaggggtatgaaaactagaagacatttgaagagtatgcattcctctgcaacccttattcagagtaggtttagatcattactggtgaggagaagattcatttccctcaaaaaagctactatttttgttcagaggaaatatcgagccaccatttgtgccaaacataaattgtaccaattcttgcacttaagaaaggcagccattacaatacagtcatcttacagaagactgatggtaaagaagaagttacaagaaatgcaaagggctgcagttctcattcaggctactttcaggatgtacagaacatatattacatttcagacttggaaacatgcttcaattctaattcagcaacattatcgaacatatagagctgcaaaattacaaagagaaaattatatcagacaatggcattctgctgtggttattcaggctgcatataaaggaatgaaagcaagacaacttttaagggaaaaacacaaagcttctatcgtaatacaaagcacctacagaatgtataggcagtattgtttctaccaaaagcttcagtgggctacaaaaatcatacaagaaaaatatagagcaaataaaaagaaacagaaagtatttcaacacaatgaacttaagaaagagacttgtgttcaggcaggttttcaggacatgaacataaaaaaacagattcaggaacagcaccaggctgccattattattcagaagcattgtaaagcctttaaaataaggaagcattatctccaccttagagcaacagtagtttctattcaaagaagatacagaaaactaactgcagtgcgtacccaagcagttatttgtatacagtcttattacagaggctttaaagtacgaaaggatattcaaaatatgcaccgggctgccacactaattcagtcattctatcgaatgcacagggccaaagttgattatgaaacaaagaaaactgcaattgtggttatacagaattattataggttgtatgttagagtaaaaacagaaagaaaaaactttttagcagttcagaaatctgtacgaactattcaggctgcttttagaggcatgaaagttagacaaaaattgaaaaatgtatcagaggaaaagatggcagccattgttaaccaatctgcactctgctgttacagaagtaaaactcagtatgaagctgttcaaagtgaaggtgttatgat

SEQ ID NO: 3552 - DNA, 2300 bp, Homo sapien
gttatataaaagaagaaaagagtccatactaaccatccagaagtactacaaagcatatctgaaaggaaagattgagcgcaccaactatttgcagaaacgagctgcagccattcaattacaagctgcttttaggagactgaaagctcataatttatgtagacaaattagagctgcttgtgttattcagtcatactggagaatgagacaagacagagttcgatttttaaaccttaagaagactattatcaaatttcaggcacatgtaagaaaacatcaacaacgacagaaatataagaagatgaagaaagcagctgttataattcagactcatttccgagcttatatttttgccatgaaagttctagcatcttaccagaaaacacgctctgctgtcattgtgctgcagtctgcatatagagggatgcaagccaggaaaatgtatattcacatcctcacatctgttataaagattcaatcatattatcgtgcttatgtttctaaaaaggaatttttgagcctaaaaaatgctacaataaaattgcagtcaactgttaagatgaaacaaacacgtaaacaatatttgcatttaagagcagctgcactatttatccagcaatgttaccgttccaaaaaaatagctgcacaaaagagagaagagtatatgcagatgcgggaatcttgtatcaaactgcaagcatttgttagaggataccttgtccgaaagcagatgaggttacaaagaaaagctgttatttcactacagtcttatttcagaatgagaaaggctcggcagtattatctgaaaatgtataaagcaattattgtcattcagaattactatcatgcatacaaagcacaggtcaatcagaggaagaacttcttgcaagtcaaaaaagcagctacttgcttgcaagcagcttacagaggttataaagtacgccagctaatcaaacaacaatctatagctgctcttaaaattcagtctgcttttagaggctataataaaagggtaaaatatcaatctgtgcttcaatctataataaagattcagagatggtacagggcgtacaagactcttcatgatacaagaacacattttttgaagacaaaggcagctgtgatttccctccagtctgcttatcgtggctggaaggttcggaaacagattagaagggaacatcaagctgccttgaagattcagtctgcttttagaatggccaaggcccagaaacagtttagattgtttaaaacagcagcattagtcatccagcaaaatttcagagcatggactgcaggaaggaagcaatgtatggagtatattgaactccgtcatgcggtactggtgcttcaatctatgtggaagggaaaaacactgagaagacagcttcaaaggcaacataaatgtgctatcatcatacagtcatactatagaatgcatgtgcaacaaaagaagtggaaaatcatgaaaaaagctgctcttctgattcaaaagtattatagggcttacagtattggaagagaacagaatcatttatatttgaaaacaaaagcagctgtagtaactttacagtcagcttatcgtggtatgaaagtgagaaaaagaataaaggattgcaacaaagcagcagtcactatacagtctaaatacagagcttacaaaaccaaaaagaaatatgcaacctatagagcttcagctattataattcagagatggtatcgaggtattaaaattacaaaccatcagcataaggagtatcttaatttgaagaagacagcaattaaaatccaatctgtttatagaggtattagagttagaagacatattcaacacatgcacagggcagccacttttattaaagccatgtttaaaatgcatcagtcaagaataagttaccatacaatgagaaaagcagctattgttattcaagtaagatgtagagcatattatcaaggtaaaatgcagcgtgaaaagtacctgacaattttgaaagctgttaaagtccttcaggcaagttttagaggagtaagagttagacggactcttagaaagatgcagactgcagcaacactcattcagtcaaactacagaagatacagacagcaaacatactttaataagttaaagaaaataacaaaaacagtacagcaaagatactgggcaatgaaagaaagaaacatacaatttcaaaggtataacaaactgaggcattctgtaatatacattcaggctatttttaggggaaagaaagctagaagacatttaaaaatgatgcatatagccgcaactctcattcagagga

SEQ ID NO: 3553 - DNA, 2300 bp, Homo sapien
attattccttgaataaatggacccagcaatagtacattagctatgctatatgcataaattaaaaatgtagattattgactttcaaaaaataattaatgtgacttcttactgcttctgaacatgtttgtgagttatattgctgagggacctttatcttctcattctttcatcttaatccaatgttattaaaattgaaatcaccaatattattccatatctaaaaataatatctaccttataaaaattatcactctgctgcatttgagaatagactttttaggtaataatagtatgatccatagggtttttttagggcacagaaggattcatgctaacagaacattttattttctattttcccagagctataaaacatgatattatatgataactataaggcatatttttactctgttcatattttttctaaaaaaaattagtgtttgtttcccatataacttttaattttataagtaaatatttgtctctttcagctccagttttatgtgaaatagagtttccagatttatgtagcatggagagttttaataagtcagagttactgatttttgccagtcattttctcagttgttaacttcttttatctttagttgattttttttgtagtgacaagttttgtttctattctcatttccttttgtgtatattctatgtatattttgtttttgtttactatgaaaattacatataacatcctagagttataacattctaatttgaatttatttcaacttaacttcaatcacataccaaaattctactgctatatagctctactctttttaggttattgatgtcacagattatatctttattcattgtacaccacctaacatatttataattacattttatgcatttgccttttaaatcatgtagaaaataaaaagcggagttacaaaccaaaattacaataatactgtttttatgcttgtttatatatttacctttaccagagagctttatatattcatatagcttggttatttacttatatagttactgcctagagttcatttatttcaacctgaaggactttaatgcttcttgtatggcaaatttagagataaatggattttttcagctttaaaaaaaatctagaaatgtcttaatttctcccttatttttgaaggacaggttttccagctatcagtttctcaattgacaggtttcttcattattttaaatacataatccactgcctactggccttcaagttttctgctgagaaatcagctgctaatgttatccagatcccttgtctgtgagagttgctcttctctctgagctttcaagattctcacattgtctttttgttttgttttttgggacagagtcctgttctgttgcccaggctggagtgcagtggtgtgatctcagctcactgagacctccatctcttgggtttgggtgattctcccgtctcggcctcccaggtagctggggctacaggcatgtgccaccatgcccagctagtttatttgtgtttttggtagagacggggttttgccatgttgcccaggctggttacaaacccctggcctcaagcaatctgcccaggactaccatttacccagcaatctcattacttggtaaagacccaaaagaaaataaatcattctaccaaaaaggcaaaaaaaaaaaaaaaaaaaaaaagacagatatttaaggtgatggatatcccaagtaccctgacctgatttgtataaattctatgaatatattatcacatgtaccacaaaattgtgtacatctattatgcatcaattataaaaaagatattctatcagactttaatgtagttgattcatggtggtttagtgttaaataaccaggaaatatcgctttacttttccccattttgctctgattacatttcttacccaaaatgctttcagctctttcctgcaagtagtagaaaagcaaatattgttcagtgttttaaagatggtattgctagtaaaaatgacttttgctgtatattgtacaataagttaaaggaaattttgttatgcagtaacctaattgtattcttagatattcccagacacccgatgccatttgctgcaaaaaacatgttttatgatgaacgctggaaggaaaagcaggaacagggcttcacttggtggttaaattttatattaacccctgatgacttcactgtaaaaacaaatatttctgaaggtaaacgttaaattaatgtttaaatttaataatacttttaacagataaagatttttaacatcgtttgtcattctttaattatacatagttattat

SEQ ID NO: 3554 - DNA, 2300 bp, Homo sapien
aggcatgagctaccgtgcctggccttgacctacctgactgtaaaccactactgagttcagttttcaattagtgaacctattaaactattaaagccattcccaggtacttcggacattgtattaattaaatgggtaaagtgcacccatgacaataaatttggccttattgttccttatgatttgtcctcttggtctaacaccattacattccaccttagactgtcaaaatcttttaactctttgctgtataggctgtttcctccctcccacagcatatcttgcactctcctccgtccaagttttattttttggagcctaactaagctaatggagaggtcgtggggggtagatgctgaggagaactggaaatgacttgtgaggctctgctccagggttttgttttgttgtttttttttttaagcctctatgaaagaattttttttttttttttttttttttttgacagcgtcttgctctcttgcccaagctggagttcagtgccatgatctcggctcactgcaaccttgcccccaccccccaccccaggttcaagcgattcttctgtctcagcctccggggtaggtgggattacaggcatgctccaccacgcctggctaatttttttatttttagtggagacggcatttcgccatgttggccaggctggtctcaaacccctgacctcaagaatccgcctgcctcagcctcccaaagtgctgggttacaggcttgagccaccgtgcccagtggaaaaatttcgtttaaatattgttaaggtccaacttcaggtgaaattggacaccattgaatataatttcatgtctcatcttccttattttgatttcccattgacttctctttttacatgttttgtgtaaccatacatacatccagacattatttttattttttaagttttctactgcctttagaggcaatatagtgtagtgggtaagagcaagactagggccaaactgctgggattacaggcatgtgtacctatctgggttatgccacttcctacttagctgtatgacctgtattcctcatctgtaagatacaaataatggtacctacgccctaagagatacctcgtaggtttaaggcaaaggttgagataaataggtaaaggatttttaaaaaatccctagcctagggtcgggcgccgctcaggcctgtaatcccagcactttgggaggccgaggcggaggcaggcggatcacttgaggccaggagttccagaccagcctggccaacatggcgaactcccctctctaccaaaaatacaaaaattagccagtcgtggtgaggcgcgcctctaattccagctacttgggaggctgaggcaggagaatcgcttgaacccgggaggcggaggttgcagtgaaccaagatcacgtcactgcactccagcctgggagacagagcgagactccatctcaaaataaataaataatttaaaaaatccctaatatgtaagctataattattattagatccctacaattgaaataaaaactaataagatatttgtgaagggcattgccagtcaaaacaatcatttatgaattactggtaatctcaggtttcatttgtttacctggttttgctcccagcgtcccgaggtaattaacagcatgtaaatgtactgagtccctgctatgttgtcactaaaataagcatgttcatacaaactaattatctttacatctctaccattcagccctggaaaccgcgacagtaaagttaatataattctgggcggggtatgcatatgagaggagtggcataaaccaatttttgcctacgtaacagttttatctatgattgttcctggaaaccgcaatgattactacatgtattgtggaaatgctgtgactcccttcccttcagcacaaccaaaaatataaagacgaatttcaattctaagccccgggttttagacggtggccaggattccgctaccgttctcacctcctccgcagatagcgattggcggccggatgcaatcattcaaatgaagcgccgccgtctcattggccaggggatgctgctcaccgattggtcccgtgacgaggagggcggtgcccggaggtcctcattggtggaggcggcaagtttaaacagagtcaaaacgccatacttgtttggctcctctttttaatttgcgagtttattgggcttgttttctgttttctagggagtaggttagtggaaaagaaaaagggccgaattcactcccacgacctctacagccgcccctgaggggaagcggtcagcgtaagtcccggatccccgct

SEQ ID NO: 3555 - DNA, 2300 bp, Homo sapien
aggaggttgataagttgtctctcaatcttgagaatctgtgctaaacatgcacagtcaatccccagttaaaaatggacctgttccaaaaatcacaagtttagttattaaaaaatcagactgtatacttttgattttacagttttttaaatatcagtatgattatttacataatttaaaaggtgagttaaaaatgaaatgtgaaaactttcacaataagggaatacttaaaaacccatatagtgacctctgtcttttcccagtatttggtctgattccttgaacacagcgggggaggtggtggtggtaggatgtgtacatgtatgtgtaaatggttgagtatactctagcagtagcagagagggaactgagatactaagcaattttagcagtggcaaggggaaagagccaagtgtatccaatgttatcagagagctgaaaccctagtttgatttgttataacagatattcataaatcagatgtatccatgtttatatttgaggtatacctacatgtccatattatgactagtaacccgtatgataataatgatgacagttaatatttattagtgcttactatgtgctgggtttttttgtttttttggttttttttttgtttgtttttttgtagagttggggttttgccatgctggccaggctggtctcaaactcatgacctcaagtgttcacccaccttggcctcccaaagtgctgagattacaggcatgagccaccgtgcctggctgtgccaggatgttttaagtgttgttgtgtgtatttgttaacgtatttacttgtcacaaccccatgaagtgttactaacgcaagtaaagagaggttaaattattagcttgattaaaatcgcgcaactaatttaggagatgcctaaatattgactgagttttctgactatatgcatatcagatatgcatataccattactatgttctacacctaaatacctaatttttcattgtacttctgttttctttgcttgtgattaacattcttcccttaccttaaggaaatacattggtttcctttcctcagtttttttattatttttagaaaatatgatattacttgcttaataaaatcagttgtatatatatttactaaattattgaatttattttattttattgggtagacacataattatgattatatctttcctcagtggccttggaatattttggatttttcataattttcatgttatacataggatgtatcctttttaaagtatatgactgaaatgctatactttcacattagttttcacctgaagaaaaatttatttatacatttatttttcaggagagagcaaagctaagtttttaattaagagttacctttcatgttgatttattttcctatttttattgccttttgcttggaaatatatttcaaaatttctaattcaaattactagatgtgcatattcacagtacacagattacccagtaataataatagacaacagtaattgataacttatgtgttcgacactgttgtaagtgcattatgtgtatgaatttgtttattattacaacagttctattaggtaaattctgttattaccgcagtttttcagatgaggaagatttgaggcatatagaggttacttgtccaaggtcacgtaaccctctatttagagagccagtatccatatccaggtgtatggacccacagagataccaaaaatatgaacataataaatcttaaatgatgaattgatcttttgctaaaagttaattttaagtttaaaaatacatttaaaaatttaagtttcagagaattttccaacagttttcagaaaatgtatcaaacctcttaatttttaaaatgtgtgatcatgaatatttttttttaatgactcaagtttttgaggaaaagtacactttgaacaggaagcacaaaatagtaagtcattaggtttatcagaggtagaaatttacgtaaacttttttctagttttgtgtgtggatttggatgtgtatataagtttgctaaatcatgaggttttattccactctcaaattccaatcacagtatagcaaatgtactaaatttaattttaatttttctttttttataggaaaatatgagagccacacccgtgttcacacaggtgagaagccctttgagtgtgatatttgtcaccagcgctattcaacaaagtctaacctaactgttcacagaaagaagcacagtaatgaaacagaatttcataagaaggagcacaagtgcccttattgtaataaacttcatgcaagcaagaagactttagccaagca

SEQ ID NO: 3556 - DNA, 2300 bp, Homo sapien
atttttctatcttggatcagcccttctgttttaataaaaacacatttccatcaacgttctaagtactaagataatgatagctttcacttctaaattattcttttaatctgcttagttatttttgataattttttcatttcccttcatttctttaaatatacttgtttctgataattgcaatatctgcagactaccatcctttttctatcttggttttacatttttctctcttttcagtgtggctagtttttgtgggatgagtctcacaggtgatatgaatctttgtgcaaatccatgtgaatgtgagtttttgctaggaattttcatgaaaggcttaaaaattttattttttcaattcccaagaaaatcggagacaggcaagtttcttcatagcctcctcctgtttgccggtggggagtccaactctgcaggagttcttccatggagtgcggcccttttagttgtcaggttgtatgtgtatgggagggacgagagggtgggggaagaaaattaggccacccatcctattttgtctcagccttcatcttatattccttatgcctgtaaaatcacacgctctaggaccttgcgcttcataatacgagtccgcagataaatgatatcagcacctcctgggactcagaaatccaaaatctcaggcactagctccaaaagttgtccttgtggatttttctttactttttgtttcggcttcctttcctgtcctaccagctttacgcttatataaacatttttctattttttttctgtgtacaatgataggtataaaattttttttcttagtaatcgcgtttagatttaaccgtttaagtcagaaaaataacgaaacgagatcagcatcgctgggttctttcgtgcacgccagtaggttagctgggactggcttctggcagttgctgtttggtagattacaaactattaaatacaccagtgaggatgaaatccattcgtgcgactgcacctcggcaaactacttctaaactctgcgtccatcctcccctctcccattgccctccctcagcaaaagcctcacggtttcgatcggggtaggccaccgagccactgcgaaaacccggagtaacggattcggcgtgtagctagggtctccgagggagtacggggaacttaaggagcatgcgtaaagcggcgtgcgcgcacatgcgcactcgttcgcgcagggtcgcgcgccggtctctctcaggagggcttggaggctgcgcgagcggttgacgtgttcgttggctgcggaggcggcggagctctgggaggggaaggagcggagggaggggagggggtggtgaggtggggggctgaacccggaagtgggtaggcgcaggagcgagcgcgcccagagtggagctcagctgctgggagccagcgggggagccttgggttcccggtaatggatctgtggggcgttttcccagggaaactgggtgggaagggtagcgggatcgccgactacaagcgcattctccgccttgcccgggcctgggaaagctcttctgcttcctttagtcgtccctctggttgaccccacttctgctctgcgcccctcctggggccgtctctcaccgggtggctttggctgagggacgctctctattcctgaagagctgtgccttgcccgcccgaggaaagcatgttaatggagagactcggatctcgcggccgccacggccttattgtcaccatcccagcacccctaaaccacgacttcagcctcctcaacccgcaccgtcaacgatcttggaagatctctcccctttctgcccgggtattttcaccctgttcgtgaatcaggcctggaaggtgtgcctgggttcctttaaaattattcttttgttggctgccttttctaaacccggccctccttgttctccgccccaaaatctttgccacgaatgagtgtaagctgtgattttatcatcattcagttataattagaaagaattcgttgatgattgccgttggctgatttagcattgctttgccatggagttattttacgtggttctcactcttttgcagaccatgaaacccttgggcacgccccttcagaagctgttatccaagacaatctagttttcctttataaatcacttaagacacttatgaagtttcttgttctgaaattgctgtactgcaatgaagaagaggagaaaggttacttcaaatcttgagaagatccatctaggctatcataaagattcttcagaaggaaatgttgcagtggagtgtgaccaagtgacctatactcattctgcaggaagaccaac

SEQ ID NO: 3557 - DNA, 2300 bp, Homo sapien
gttttttcatactgctataacaaaatttagactgggtaatttataacaagagaaattgacttcttataattttggagactgggaagaggaacatcaaggtaccagcaaatttggtagctgccaagggcctgttcctcatagaaggttccttctatgtgtcctcatgtggtgcaaggggcaaataaactccctcaggcctcttttataagggcagtaatcccattcatgagggttaggtctaaccacctttcaaaactccccacctcttaatactatcacattggggattaggtttcaacatgtgaatttgggaaggggggaaaacattcagaccgcagcatacccatacttatgcttgaaaattcaacgtaaatattatatgtttttctaaaggaattcctgactagcccaaatctgacacatggtagccattgactcatttgtataatggctatatccacttacttttttatattcaaaccccatgtatataattcctataaccatcctttgtataacatgttctctcaaccacttattttcttcgacacttttgtcttttgaaaaactaattttctttgtttctttgattgtgacactcataattaaagacaccctaacagaaggctttctaataccataagattctttacctgagtctattcatttttttttccagtctatcaatcggccttccatgttgtaaattccttagtcttggggttcatggtggaggcctttttagaacgaatggagatcaagttggttcagtatgtagatgtcccagaatggtatcgttgcaaaaggcatgacagaaaacataagaataaagatgaaaagagacttcacaagatttagtgaagaactaatgttctagaaatcatgggaagactctggtcctaatgttgacactgacccaccagatgactctgggcacacagaataattgctctgcttctcaattctccaattgacaaaacacagggattagaatagggagttaataatgcttctgtaatctgaaattcttttactctaattgttaaattgcccaagttaaattatttgcatgaggggaggaaaaaatctttaaaaataataattgtcatgaattctataaaaattaaataattttaaatggataaatcctacttcagcaagtaaatctgtgagtatgtgagagaataatattgataaaaaacattaagctgactgtcaaaatattagagacatgggcagaaaatataaagacttcaaaatatatgttatatagttaaatatctggcagatttataaagctttgtaaaaatcagctatagaaattgcattttaaagtgtaacagtgaacagttttaacaatggaaaaaggctctgtactagcactaacaccaattagaaaataaagcattctggttttaattaatggatgttttcatggtgtctaataaaaatacaattttaaggacttgaacaatttaatctgagaaaatattgtgtatttaaagcaagtgtattttttaaataagcaaacatgtttacattcatcaattatagtaaaacaaaagctcaagaaatcccagagcatataatttcatgaaccgagaataaaatgagctctggacttacgacaaaatctgcccctgaatgatcttcagaactctgttcattttatgcagtagtttaagttttcttctgtcttggcccaacttacaaacagcagaaatctgagttgtgggaatataatttatgaacagaaaagattacttgtctgtgaattattttctgaagatgaaagtaaatatacaggaacatacggtattcctttaaaagttgccagatcataattgtgtggcaaggcagttatcagaaattaatccctctattgagagcaattgaagacactattctaatgtaggcccttttgaggaggcagcatgaacagaagaaaactcgcagcaaaggcttgaggggggaatgaatccaatccagcctgaaaaaatctgcaccaggtttgaaaaatcaccccatcctcccgtgtaagtgatgctaagaagcacaaactgcattttgaatctaagtccctgtattttctgtgaaggagctgtaagtagggtgggacagagatggcacctgggggttctgaggcacccgctcctctctgagacagacagggatcaggagccggactgggaccagaccaccagcaacacaccagaggatgttctctaaataagaccatggcacttaagaacattaactaccttctcatcttctacctcagtttctcactgcttatctac

SEQ ID NO: 3558 - DNA, 2300 bp, Homo sapien
taagtatatattgtgttaaagttctcattttctttcttccttttttaacttttagtttaagttcaagggtacaagtacagatttttttacataggcaaacttctgtcatggggggctgttgtacagattatttcatcacccagatgttaagcctagtacccattagttatttttcctgatcctctccctcctccaagccctctaaaggtacatctctttgttgtattggagaagaaaacctttttcagcctccccctagcagagcacccctcaagtcctattgaccaggattgggtcacatgcccatgacccagctgtaaaggagtgtgtgaaagaatatatttgacatgtgtattctatacggtggaacacatttctctctgtaaggaacaggcatgggacatgctggggaatgactactagaggtaaccataatttctgcctaaggatggtcattatttttaacaggttcatgttgcctataaattcaataagtatgccttatatatttttattcaagtaatatttatccaagttcacttatgctgtctacaaaaaagttggtgaaactcctttgaatgactagcatgctccaagcatttatagttatctcatttggttcacacaaaaataattgtttcataggctttattatttctactttataagaaatttcagcttaaataaattagctaatttacccaagttctcatagcctagtatcaaagctccgattaatataaaagtcagtgtcatagtctgactccaagtccatgtttattctacttcattattttgattccctgagggctattagaaatgcctctccaagtaggtccattgatcagaaccctgaatatgttccctctccttcttacaccaccttcaccctgtagcccccaatagatacatttcctcctttggtcctcaaggctgttgtctgcttaggcttccccactactataagcttggataaactgtatgcttcaaaaagcaagattatatctatttttcttcactatcatatctcctgcactcacatagtggcagtcaaactaaggccttgataaataagttttaaatatgaatgaataataaatgaatgaatacatgcactattgcaatgtctcttgcatcacacgttttctgccttattactggtttccatcacaacttatctgacctcagttacctggcgattattttttttaacttggcatacactgcccatgataaggcactaatgactatttcatgatacagttactgcccctctcaggtaacattttcacctttactgaggcttctaagagacaaggtctcaacctaaaggaattgctctgattgtgagaattttagggagtatggtagttctaggggcttcatgacctctcagcttatactgcctatgtgaaacctctctaggtcctcaggttcccctttaagaaaatgttaaaaagaaacaaaaaagaatcactttttttgtttgtactctaagtgtatctcaaacacctcacatattcaaattattctcttgtacaaaattaaatgccattggatgtagaaggagtggagcataactggtctttcatagaggctggaatttctctgagagcaccacacaagtaactcttgccacagtctcaattaataaaagcctttactcttttttcttaatttttctttcctttctatcccttgcatagatacttaatagatttgaagttgccattaatttcttaaccactattcaaaaggaaaacaaacaaaagaaaacaaaaacaaaaacagcatttcctttgttgtaaagcaaaataaaatcaggccctaattttccacaacagaagttgtccaaaatacttatctgtgtttagatttcccaaaattcatttcttcataataatactgtcagcgttcagtgttgtgatcataacattcactagtgtgacttaaaaaggggaggcaccatgtgttaagcagggataggatctaagaataacaaatctgcctggtaagcagcacaaatgagtcttacactaagccacactgatccagcttggagggaaatgagtcaaaaccaagtccccatactctctacctgcgagaaagaggtgacattgaagaacaagcccacacttctggatatggtccaaaatgatcagaaactcactctgtcaacctagtaggtgtttggatggatacctcttttttaacagaaagatgtttggagccaggacacatggttttcacattttaatggcaatgctcataggtaactaactctcttcttatatacgcta

SEQ ID NO: 3559 - DNA, 2300 bp, Homo sapien
tagcatgttaaagggtatggatggcttataggagagggaaggttgaactgagtcccctgaaagagacctgagaaacatatctaccaaatacaatgttaactttgttgggattctggtccaaagaaacgtactaaaaaatatggggagaaatagaggaatatgaatatggcctgagtactataagatattaaagaaaaattattaacttgctaggtatgataatgatattttggttatgttttttaaaaagttgttaaaaatacatagtgaagtacttcaggtgaatcaataggttgcctgggatttgcttcaaaaacttaatgattcaaagtgtgaccccccagattcagcagtattgaccttacctaagagcttgttagaaatgcagaaattcagactcagaaacactatagaaccagaatctacacttttacatttttataagtccctaagcgatttatacgcacattaagatttgagaagcacagctttaaaatacttggggtggaagagagtgtgggctggggataaaagaaacaaaattggcaaatactgttaattgttgaaactgtgtgatgggtgcatgagggtataattgagtataagtcaagtatccctaaatcagggcctgaaagtctatgtgactgtgcatatgtattcaatccagtgatctgttgggttttttttttttttattggtttgagaagttagtaagtgttgagataaatataccttattgcttccctttcttcctgtcccagtttgtcaagttattggataatattcaaaaaccctgaatgcatatttcttgcaaaagtgtttcttatgaaatcacattgttgctttaaaatttgctaaagagacttattttaaactgctaatgccaatttattgtcaatctctctctccaggcacgcttaaaaaggcctcttaagagccttgatggtgctctatatgatgatgaagatgatgatgacattgaaagagcaagcaagtaagtaatggattttggtgtcctattaagtggaatggcttaacagcagaagtttttggtgataaagggtatttcaaagagtatgcactcttagagctcagatgttgcccttttacagtgttcttcagcaaaaggacccagtgctcctggaatgttatgggggatatcttgggacaggaaactaagatggaccttaaatatcttgttcttggaaagcaataatgtctacagagatatctgggatagtgttaaaggggcaatagaagcccatctaaattaggctcttactcattctgaagagaggaaggttaaatatcaggaatggtgataatagtcaatagaaagaaatggaattgagggtacagtagacttaagtctatggtgatatcagaagatgaaaatttaataaaaagtgttaaaaattaattttaatataagggaaataatatatgtttagcttcttacaattgatgtatgacaatgacaaaatgaacattcttttttcttcattaactatatctctgtctatgtaaaggaatatgcattctcctctaaaataagtgattaaataaaggaaaaccatattaaatattgaaagtgaatttaggctatagcagactttccaagtagttcagtctaatattcctaaagtaaaggtcccaaattccacagaattaaactgtgaaaagccctgcttctactttcagtttcataaggtaccgtaaactttttatttgttcttaatgcatgcacaaaatatttccatattggaattagtatacacatcacggtaaagaatttggtgatgaactaattattgattttgttgttaactctctcattaatgtaatgtaactggtgagagattacttacatgcagcaaatatggttatttacctactactgcgtgttttatttttcttcaggttatcttctgaagatggtgaagaagcttctgcttatctctatgagagtgatgactctgttgaaacaagagtgaagactccttactcaggtgaaatggacttactaggagagattcttgatacattgagcacacacagctcagatcaggggaagctggcagctgcaaagagcttggatttctttagatcaatggatgacattgattacaaacctacggttagtagatttttttttacttataaaattagaagaaaatattcttgccttggctgtgattactggatcttatactctttgttggtagaagcatttaacctctaagtaggtaagggtcaaaacttcaaaaatatgataaaatttaatcactagaaattatttc

SEQ ID NO: 3560 - DNA, 2300 bp, Homo sapien
aaaagaattgttttctggattgacaaaggttacagaatgctaaactggtgtttgtttcttcttccactttcttacattcattttgggaaaataattaaaacactttccagaatactgtgaataataacaaagtcttaaatatgtgatttccactcagccatttttagtagagaagtaaaaagtatatgaactgatgagagctttttaatacagaaacatatatgaataatctggatgaataaagatctgcagggttttttttgttgttgtttaaaaaatctccttgagaaataaattggtagaataacttggaatgttttattattttacaagggaaatatacttttaaaagtttggtcaagccaaataccacctgaaactcacaccttttaaacagggcaacttatttttacaaaggttattttaggtagttacattttgctgtagttatttcacaagttaagaaaaaaaatttgtcttcatgtttcatcctccagaaaaggtgcaatgctgtgttctgagtagtcagagatgtttttcagaataaaaattgttttttgatatttcttttaaattagagtaagattttaaatacagaagtgaatccagagctggacacttcttgcctgatgttgattagggatgcaaagataacagctagaaagaaattttggggctgagatcattttgtctctattttgtaagagcaaggtgatacatcttttaaaatccacagccacagagtagaggagaacagtatgttttaggggttctttgtattggatagtgtctgagtagccactgggactttaaaaaaaaaaaaaagagatggggtcttgccctgtctcccaggctggagtgcagtggcataatcttagcacactgcaaccttgaactcctgggctcaaacagtgccctggccacagcctttcaagtagctggcactataggtgggagccaccacaccaggcctgggattttgtttttttattgtgactttttacccctgcgacttagggagtatttaagcttttaaacaagaaggtagctgaaatctaactgagatcagttgatgggaaagattaggtaagttgtatatgtatttctttttttaccttctgatatcatcttattgactaaattatttatgaatttggaaccagatatgttgatcgctggattttattagaactacttttcaacattgcatataaaatttgcctactaaaaattgtgcaaatactagttcttgataaattttggtttacagatttatttttgatcaaccattcctggcatctcatttttatatattccagggaacccgaggtcatatcaacaatgggtgcatacagtcaaggtaatcataagctttcaaatgttattctttcactctaatataaatggagaaatgttcagcaaaagtatgctgtttatacttatgctgtttatttgaaatatttgaaatgtttgtatattttgtcacattttaaatattcttattttacgtttatagtttgttgatactcattaagataatttttaaatggaaagttttggtccaaagataaatggctcattttgaaaagcaagattttactgccaaatgttgtttttcttatattattttccagaagaagaaattaggtggggtagaaggatttgatggcaattttataatttgtggtaatatagttttgttaatatgatttttaaatatgaaactttctcccccagactgagactttatttgcccgatattaaaacagctgataaacttgtatttctttcttattaagctttaaatatattcaaattactagtcatattgctcaagtctacctaagcttcaaggaagaaatgatttttaagtgatgtattatatcaactaaagaacaaggtggaaagtgtacattttgtttgaaattattaaagtacatagaaacttgaaaacactgaacactgaacatgaaataatttgtataggtctttaagttgtgagtaaagccctttttttaaatatgcaacttactgtaatactttgttttcaggatattttagctaaaagtttttggaaatatgtttctgtttttcttttgcagaaaggaggtgcactgttcaacacagcaatgaccaaagcaacccctgctgtacggacagcatataaatttgtaagtttttttgatatttaacaatcctatttatgaaattataaaacattttcctaggtgatagacatataaattctgaatattttctatttttcttttaaataaacctaaaaaaaaattaggattaat

SEQ ID NO: 3561 - DNA, 2300 bp, Homo sapien
aagatgatatgtcatatagaataaggcttagctcatttgctatttttattttatttttaaaattcagtcataaaacatttatcgggctcccagtgtaactagggatgatgctagtactagagattagaaaacaatagacctttatttttaacaggcttgccttcctccgatagattataaattctgtgatagtggaaaatatagtacatttgtgatcatccaaaatatatttatgtaaattagtccggtttaaaaaatatgtaatttaaaggtcatctgtagctctttaccattggcaataataggctaggttggtgacttatgcctagaattccagctttttgggtggccgaggtggggagatcacttgagcccaggagtttgagaccaacctgggcaacatagcgaaaccctttctctacagaaaatacaaaatgttagccgggcatggtggcatgtgcctgtagtcccagctacttgggaggctgaggtgggaggatcacctgagcccaggaggtcaaggctgcagtgagctatgaatgaaccactataatcctacctgcatggcagaatgacaccctccccaacccctcccctctgaaaaaaattggcaatcatctgtataaaaatgtgtaatgacatttttattatgaatcattggctggtagctgatggtaggtgacaccacttaagagtttatcgaattgtcttctttaataatttgtttgaattttgttttcttttttctatagcagtgctatccaggaaaactttttatgctgaaggaaatgttctatatctgtgctgttcaatatggtagccactaaccacatgtgaccattgagcggttcaaatgtggctagtatgactgaggaactgaaattttaattaatcttcataaatttacatttacatagctacatgtgattagtgtctactgaatgtgacagtacagttctatagtgtattaactttatcagaaagtggtaatagtttaattagttactctcattattttatttatacaggaacctattttcagaattgtacttaaagatatctgtaataatattgagtcttccttaagattaaattataattgtaattaaattattcttattttttttcaaagttctattacaaagtaaacaggcacactttttctttttcctatgacataaatattgctacaaggtgcattgtaatgaaggaatcatttttattcatctgtgttttcatttttgtcataaagtttagtcacttatctttgtttgtgttgaatgggctaaagggctgttcaggctgatgagggaaatagcaggtggtaggaattagccagtgggtgatgattttctgcattcatgcaaaggaataaatagaaaaaaaatggaatcagtaggacttgagatttaagtccttgctggtttggaggagcatttggtagagctaccacaagacgcttgcaaaaatatgattacttaacgcaaaggattaatgaaagcagatcccaagtaggacttatcctggaaagtatccagcctgaattgttttgcaatcatgaagagaaggtgattgtaaaatcttttcattaattaaaaaacaaattaatgatcataacaactaagtgcgaatgtcaaatatcatgcagcagtttttatagtaacagtgttttccaatcaggatgcaataaaattatgtgatattttcaggtatgtgtgctatgtttaatactcataattcaatctgatgatgtcaaatctttatttttaggggatttacttttacttgagggagtaaaattgagcaattttaagagtacatgggatcctggattagaaaggtgtagtacaggcttattagtagaggaatatttctactagcctaaactattctgtgtaaggaagggtctgttgcttctgcaccttacgcttcctctatcactcttcacatacctatttaaagagactagttctctctgactaaccttttattgatgcccttaaaatctttatttctatctagggtgagcccatcactttctgtgaggagagttttgtaaagcaccgctcaagcgtgatgaaacagttcctggaaactgccattaacctccagctttttaagcaggtaagagtggacctccacatttttcttttgtaagacaacattgtcagttttacacatttgtattactataaaactatgtacaaaccctgagtagcatcttttctagaatgtcaggaaatttttgtttattttgtaagtcgtagctagttatgacatagcactctagaaatattata

SEQ ID NO: 3562 - DNA, 2300 bp, Homo sapien
aaaggtagaaatttaaaaaaaaaaaaaaaagacctgaacaggaataggaggtttgtaattggttgaacagacaagacagaattgagaagactaaaatatatatatatatatattggaatggtaaaatgagtgagcaaggctctagtctaactacaagctatttgagaacaaacgcaaacttcttattcccaagtcatgtcttcactgtagggagttcttttacatacttaagatatttataaatctaaaaagctaaaatcaaattataattctataccctctttttatgtgaaaccatggtcaaaggttgtactagacgtaattaatatttatcacgcccatttatcagactttttgagtgtaatttctaagtcagattgactttcacatctaaaaaagtattctttcatgtttattcaaaatcacatgtctgtaggcttatttctgaatgaactgctttaaacacatacttttatcagctttcatgtttgcaaatggtgagaactccatctgtggacttaaattatagctaagtttgtgtattctgaatttaacagtgacaagactgtcttatcccatttatttgaagacataagaaaggaacctgctcatcaggcatccagcaaaaagtacttatttctatcaaaacttaaatttgtataatataaaacctggaataatgcgtgaagctagtaggacaaaacataggataaacacttcaggatgttgcgttgggcaaagatttcataaagaaaaccttaaaagcacaggcaacagaagcagaaatagacaaatgagattatatcaaactaaaaagcttcggcacagccaaaggaacaaccaacagactgaagagacaaccaacagaatgggagaatgtatacgtaaactaatcatctgacaaattattaagatccagaatatacaaggaactcaaacaacagcaaaaacacaaacaatacaattttaaaatgggcaaatgagctgaatagacatctctcaagaaaagacataaaaatggccaacaggcacatcaaacaatctcagcatcactaatcatcagggaaatgcaaatcaaaaccacaaagagttatcatctcaccccagttacaatagttatcatcaaagagacaaaaactaacaaatgctggcaaggaggcagagaaaggggaactccacacactgttggtgggaatgtaaattagcatagcaattatataaaaaatagtatggaagttcctcaaaaaactaaaaacagaactatcatatgatccagcaatcccactactgggtatatatccaaacgaaagaaaatcagtataccaaagagatacatgtttattgcaacacaagagccaagatatggaatcaacctaagtgtccataaacaaatgaatggattaaaaaatatggtatacatacaaaatggaatactattcaactataaaaaaagaacaaaatcctgtcattcatggcaacacagatgggcttggaggatattatgttaagtgaaataagtcaggcacagaaagacagatgtctcatgttctcactcatattggaagcttaaaaaattgatctcatagaagtagagtagaatagtggttactagaggctgagaagggcaggcaggggcttggggctgatagccagaggttagttaatggatccaaaatgacagctagatagataggaggaatggtgttctagtgttctataacactgtagggtgattataattaacaagaatttatcacatattttcaaatagctagaagagcagattttgaataatcccagtgaaagaaatgataaaagtttgaggtgatggatatgctgattaccctgatttgatcattacatattgtatacatgtatcaaaatatcacatatatgtataatatctatatcattatcacccatatatatgtgtaattatatgcatatatttatatacatatattatatacatatatatacatatataatataatacatatattatataatatacatatattatatacatatataatataataatataatataatataatataattattatattaaaatcagagggaggagccaagatggccgaataggaacagctccggtctacagctcccagcgtgagcgacgcagaagacgggtgatttctgcatttccatctgaggtaccgggttcatctcactagggagtgccagacagtgggcgcaggccagtgtgtgtgcgcaccgtgcgcgagccgaagcagggcgaggcattgcctcacctgggaagcgcaaggggtcaggg

SEQ ID NO: 3563 - DNA, 2300 bp, Homo sapien
tttgttttctaattttttaacacctcatgcatgtagatcatgtacacctatgttcctatcccttttatttcagtaataacagaacagataaatctcttcattatggtcagcctaaaagctcacttaaaaagatttgctttgggatgcgaatgtgtagtatttccctcgatgtacttaacataaatggaatgaagaacaattttatactgttcaagggtatgactgtcatttaaaataaaatcccaacaatggatgaggaaaacaattgtattattatctcctcacaccaaattaaaaagtcctcaatatggtcaccccaagtagggttcctttctttggaaataattaattataatgaaaggagaagtttgagaaattcagtaacagttggggcagaagtggcttttagcttacgaattttttttttcaaggctttggagtatggtcacttatgcagaaaaatctttatttgggaaaagaaaacttatgtagtatagtttgcctaattgtgaaactgaaattcacagaataatttctcaaaagataatacaaatttgtagcacctgttttacttgaacatcacactgctcatgtgatgtacaagtaataattcccattttacaaatgtaggaaccgagaaactgaagtgtctcaccccgagtcaagctatgacaacactttatgataaacacattttttttttgtttgtttgtttcccagttatggcccgtcctcattttttactaacaggcccatggctatacaatatttctgatcctgttgaccaagtagtacccaattttggcaagaaagtttaaggttatataactgagtgcaacttcaggttctctgactcttgagttttttaattcttaagactccttttctgacttttatgtcttatgactcacactacattcataccacatttggtttcctctcatcatcttaacttctgcatgaataaagtctgaagtaaccaccttttggaagaaacactgtggctatgtgtcaagggtggcagtgttagctgggagaaggcctttcccagaagatctctgtgtaagagcctggccttccacagtcatttgaatgtccatcataagacttttctacctgtcttctcagtagatcctaaatatgagacagcagaggagggagacaggcaatatgaggtagaagtaaataatcagcatcagatagacctggtgtgaactccagctttgccattactccctggtttcttcatctgtaaaatgctgatgaaagtatctatcacacacctatgacaagtactgggtgagagtgcacataacctgcttcacatgtgctttagggctgtgtaaatcagtccctcccacgcttattcagtggtgccctctctgaactcgcctaaactgccagactatgaggcctgcgactatgtacatgtgttcaaaagttagtccttggttatcactgcagtctgtggtataggaatgtctgcctcccacatgcgcagacaagtggggcactaccatttggctacttgacagggctatttagcaggtgcacatgtctgaacattcctgaatcaggagggggtagctctggatttcagagagctgtaagcaggccacagctggagtgacgcaagagccaggggcatcaacttgagctctgaatttgtagtatgaaatgaaaggaacccaagtccgtgtgtatgtgtgtggaaaacactgcaggtcgaggtacttttccaggtacttcgccctttgtggggttgcagccccgacgccctggaatctggactggacccagaaaggaagccggtttggttcatgctgaggacacagggggcaccttgcctttctggctaggtggcaaagcggtacgtgggccatcccagcaggcactagcgctccccctgcaccctctggccgcccgggcgcggggacctggcccccgcctcctccacagtctccgacttgcgagccgcacggcccaggtgaagccgctgggcgcgtccccgcgcgccccttccccctcccggcgacttcctgatttgcaagaaggtgcaggagccgcagcgggcggccccggtcgcaggaactgagaggcctcagctttggtggcggctaccggcggagacgggggcggcggccacgccaccgctgctgtcacagaaaggctctggtgggtggggtgggaggcggggaagtgccgggggcgcagccgacatgggcccgccgccacggctgctgtgagcagcctctttccctgtgtggccgccggcgtgggcggggacggcgcgaccctcg

SEQ ID NO: 3564 - DNA, 2300 bp, Homo sapien
ttaattcagtaatctccttaccaaataatctgaaatccatttctacatctctttaaaattgctgtttttaagccaggtgtggtggctcacacctgtaatcacagcactttgggacgccgaggcgggaggatcccttgaacctacgaattcaagagcagcctgtgcaacattgggagaccgcatgtctacaaataaaaagttagccaagcatgttggcacacacctgtagttccagctactcaggaggctgagctaggaggatgacgtgaaatcaggagttagagattgcagtgagctatgactgcaccactgcactctagccttggcaacagagtgagactctgtctcaaaaaaaaaaatactgtttttaaattttgaaataattacaggttcacatgcagttgcagatatggtactgtgtttacttcacccaggttcccccaatgcttacaccttacatgcttacaatatgaaaaccagggatttgacattaaaacaatgtatgtatagctccatggcatcttatcacatgtaaatttttgtaatcatcatagtcaagatacagaattattctgttacctacaagatctctgttgttcaagccctgtacagtccacttccaccctctcatcttcaccaaaagaagtttcatgtaacaatatgtactcttgtacatatgtatctatataagatatgtatctatataagatagttccatttattttctatttaaatctggtctagtctatttcattcctgtaaaatgctgtctctaccctttgaatcgatgtcatggcctattagtggatcctgatccttaattttaaagacaatgcagtaaatcaatctcaggtttttgttggtgcggggacctgacttatggtgaatgtgaataacatcacagttgttcatttttggtgatctcatgtttggtcccactcttccacagctttctctagggtccctccttcgctttccagattttaaactctcctcagattacttaacagtctccagatcctaattttttattccaacaaaaagaaaatcaatttgcaaaatataataccaatttattaattcactgagatttttaatgaaccaatagggttgtttcaatcacctcctactaagatttaagaaaatgaaaatatgactacagggttgcatggtaaacacagaaaccaaaaaacacgtagtgatggtctatagtggcttagtcgcctttctcctgtacaactgaataatctacttttgtcctcaaagatcaattcctgccctcccagtattgaagagcactaacaaaattggtactcttcagccctccttttcttgaaacccagacggggggtaggaagatggggtggtgttaatttaatcctaacacctgaaattacttcccgggcttgccgtaattttctcaaatacaattatgtgacggtatcaagatcactttcatccatcagaaaggagataatagttttaggttggattttgtaaatattcagcaacatgaacacaacaccttttcttattcagtgtgcgattttacttttggcccttattctagggtgggccaaagaaccaagcaaagaaggctccgcttccacctttattcctatcacatactacctggaaacactcagccttttctggataggcccaaggtggttattcacaaacctcgggtcttttgatcactttctgggatcttaacagttgtggagattatactgaatgatcccaagtccagtctgacataacaaaaaatgtccacctttcagctgggtgggcgcgggggaagaaggaagagcttagaatttaagtccaaagatgtggaaacaccaggctcttccccgtccaggcagctcatcagagcctcgttagctgccttaaaagcccattttatttccgcagcgggcccgctggtgaaggcagaaggctcagtccgtccgcctccacctgctgccacggcagcgcgaaccgaccccacgcagcgatggccacgagctgcccaagaccggctcgccgcgcccaggcccgcgttggtcgcccctccgggccccagcgccgggtgctccgcctcccaaggccggcggcggcatggcggccaggcagatctgggcacggacgggtgccgcgctctgcaggcaaccttccgccgccccgccgccagcacctctctgggtaagagctgggttccgacagcagctcagcttaaccctctgccctgctaacgagggaaactgcggcggctccgcgcccagcacgcccggtaggccggagagagcggcgaggcc

SEQ ID NO: 3565 - DNA, 2300 bp, Homo sapien
gaaatttgtattctaaagtgtgagctttggtgcgcgtttcagtgtgcgtgcgcctgcgtgtgtgtgtgtgtgtgtgtgtgtgtatagaatgcatgtcgttaccaaatacctagaacggtattggaccgcaaagaggttaaacccggttgctttcgacaggaatgagttgaaagcacccaagcgttttcgggtgggtatcgccgtccatccattcgatggcctcgctgatgagcatagaagatgaacccgggaggactgtcccttcctggctgcgaaacctgaccgatataggggagattctagaagaaagagctaaggaggccagggcggaaagaggaaagtcaggtgtaggggagattaaaaggtaaactggtgggactgaccgggctggtgggactagttagcgaagccaagtgtttgggtagaaacagagatcttgtaggaggtgctccgagctacatttcgggatttgggatgaaaagagaaagccagggggttcgccgctcctggtttgttccttaccgaccctaaactgtatggcggagcttgtgggtcaggcgtggaggcggcatccactcccacgtgccccacatgcagcagcaatcccacgcggttttcgcaagcggctgggaggcaagcgggcgtccccccacaccccccccccactgcgccctggacccacgccacgcaccgccaaggagtagctatggtggcacgtggaggaggggcgggtaggcagggcggcaccatcaccgggaccagcatcttggaacggtcaatctcactgctcatactctcctccctaccggcgcgggagccttgctgtaatcccctgccaccccatctccgactgtgaggggcgcaccgggtgggggaatgggtaaataactggcccaaggcccagcttccaggtcctccctccactttcccgcggcctgactgcgccccgggcaacacagccccttgggaacctgcgaccaggtaatgtggcctccgccccgtcccgggtctggctgcatcccctctaacccctgcctgcccgggtccaagtgagggttttctcccggaaggttaatcaccacccccatcccctagccgggtcccgggaggaagagatgccccggctctctcgttgacccggcctcgaacgccgacctcgagcgcagaatactcccgagtgctgggttcctgatacccagcccgggagcgaggggagtgaaggagggaccgggacaggaaggcggggacgcggtgggtgaacaatcaatggcttagcctagtttccccgcaggagctaccgcccattcaccgtctatgcaagcaccagctggcggcagcatcttttaggtacaagctgcagggaggcaaaagctggctggggggccgggagcccagggcacgccgcgggactccagtccccctgctgcgccccagcctcaagacgctctgggctttatgaggttcagttaccgccgagtcctccattaacacctcctctgattattgagaggctggaagggctgaacgcaacctcagagcgtttctctgggcaccggcccgcgtctgtgccctctgcccaccccttcctcctccccctcccgatttggaagcataaacagaaaataaaagacaggtggagagagctaagggtcagaggtgagggaaacagatcaactccaacggggtgggggagagagagaagggagaaattaattttcatccaatgctttatttatttatttggattaacagggggaccctcagcgagacgcagggactggcccgcacctctggccgccgcctcccgccgagaaccgagttctagttggggaaacgtctgacatctggacatcaaggtaagaccctgatggagatattttagtcggagcagttttctgccctcggagtgcgcccggacgcccgggagtttcagggacttcttgggagcctaccggaggaaggcccggctttgctccaagccgcgtccctacctgaggtctccacgggaggagcggtttggacgcgccccaccggatgggaggaggtgcttggggaagccgggccgtaccgccggtctgactcccggcttttctctgccagtgcaaccaccattacggcgtgatccactccttttcctctaagaatgctgaacggtaccactctagaggcaggtgagttatgtgccaggttccttctgatgttctctgccccttgggccagtgcgtataccatgtgagtgtgtgtgcgtgtgtgtgcgccttcgttgggtggaacgaagaggagtgtgtgtttgtcttaaa

SEQ ID NO: 3566 - DNA, 2300 bp, Homo sapien
caaaccgaaggggctccttaaccagcttaacagggtctggaggaaaggtaacgcctccttcttaaagggcaaacttagaggcgcagaatcatggcctccaaaattcaggtagagagagaccttaagtcacctttgctctcaaaatatgcacatttgttgggttacttcttccctctcaaccctaactgttctgtgggtttaatttccctttcctcccccctagggaattctactgggctcgggttctttgcccatgtagacccacctgagccggcgacaagggcgctgcagtctttttgaccttcatagagattctaagatcccgaactctcagttccaactattatgctccactatagtccggccgtccactttcctaaaagcggcaacagtagcgggatgggtgctgtcagaatagaaaggaaagaaagcttagtggactgcgtgtgctcaattgtgagggagagcagtgctggtcaagggacctgccccattatacctggtagaactttgaatttagaggagacttaagatcttatccccgacgcaggctagagagaaccacatgcacctgtccctcagctcaggaactgaaaaaatgaacactgtaatttttatggaacacttgcgggccattcagactacagctgggagaagggggaacatttttttttttgtccccagccaccgggcctcagcccctctgctggagaggtgaaagaaagcagaggtacaaagatgctttccttatttaaagtgcttatttaaagtcctttgagaatgaggagcggggagctcttaggcaatctttcttgggggctccaagacaaaaagagtagaaaacccagggtcacacacccaattcgagggcattccttcccacccttcctgggcttcctccttaggaactgtgagagaaggcagggctggacccatggggacgtatttccgcagagctaacaaggacctcccaaactccagctgacccccaccccacccccagctttctccagacttcctgcgttcactgagaaggaagaatcctggcagtttgcttctttacaggaagtagcaaatgccactggatgcaggaacttataacctgagttttataagagcaggaatagctaggattcaacttggaaactgattgcagaaggtgttctgccttgcctgtacctagatgattaacaaacttgtgtggaatagaagaatgaatggatgattggagggcttacaaaacctctgtgtttggcttccctggagacgctgtaaagttctggctttttcctggagttgtttaactttccctgcatgcagtctccaaagttttatctcttgcaaggaagcagtggtattcttgggttcttcattgttgattttgctgagcaggggcaatatgcaacaagaaccaaacctaatttcaaacacccccatttgggggttgggagaggttttagcacagaaactagacaaagtaggttgaagtcctgtatttactttttgcttggagcttccttgggtgaattgactgaggggacttctcagagactcctcctcctcctcctctttctccctctcctcctccagctctgagccagtttagcctctgacttgtgtgaaggcaatctgcccttttgtgagaggacctgctgtctctgaaaggactgctgcccccagcccctcctcagggcccttcttgtgtgcacgtgggtttgaaaagctcattgattcccatccaaaggggctaattacattacttacagtaaatagcagccctgctgtcaggtatagctgccaaagtaaggaggagggggatgtctccagcttagttcacttgattggcttcatttttgtgtgaaattgcgttttatgagctgcattttggcacccggaggacttaaactgcgtccagtctgcaaataacattatttttgaccctgagaaaaaaggaggggaagcagtagtgtcttcagtttcatggaagaggtcactccaggagcctcagaagacaacgctttgggacaggaagtcaggctgctgcaccaggggtcgtttcctctctcgctttatttctgccttccttccttccccttcttctcatcctctcacttctttttttctttccttcttccctctctccctctctccctggcttttctcccgtcatctttctagctttggccacagttcccggtcgggctcccccgggcggagggaagcgggtctgcggccgggcggctcttgtgaggtatctaggatgtgccaggacacaggcaccgcagtcctgggaaaggcgg

SEQ ID NO: 3567 - DNA, 2300 bp, Homo sapien
ttggcttccctggagacgctgtaaagttctggctttttcctggagttgtttaactttccctgcatgcagtctccaaagttttatctcttgcaaggaagcagtggtattcttgggttcttcattgttgattttgctgagcaggggcaatatgcaacaagaaccaaacctaatttcaaacacccccatttgggggttgggagaggttttagcacagaaactagacaaagtaggttgaagtcctgtatttactttttgcttggagcttccttgggtgaattgactgaggggacttctcagagactcctcctcctcctcctctttctccctctcctcctccagctctgagccagtttagcctctgacttgtgtgaaggcaatctgcccttttgtgagaggacctgctgtctctgaaaggactgctgcccccagcccctcctcagggcccttcttgtgtgcacgtgggtttgaaaagctcattgattcccatccaaaggggctaattacattacttacagtaaatagcagccctgctgtcaggtatagctgccaaagtaaggaggagggggatgtctccagcttagttcacttgattggcttcatttttgtgtgaaattgcgttttatgagctgcattttggcacccggaggacttaaactgcgtccagtctgcaaataacattatttttgaccctgagaaaaaaggaggggaagcagtagtgtcttcagtttcatggaagaggtcactccaggagcctcagaagacaacgctttgggacaggaagtcaggctgctgcaccaggggtcgtttcctctctcgctttatttctgccttccttccttccccttcttctcatcctctcacttctttttttctttccttcttccctctctccctctctccctggcttttctcccgtcatctttctagctttggccacagttcccggtcgggctcccccgggcggagggaagcgggtctgcggccgggcggctcttgtgaggtatctaggatgtgccaggacacaggcaccgcagtcctgggaaaggcggcgggaagtagtggggaacgcaggctgacgaaggggacggaaggaacagagagcggccggcgcgtcctcctctctgggtaaagccgcgttggttcctgccgcagcgctgtgcttcggactcctagggggcctctggccgtttgaatgaatcgacaatatcagagtattgtggacactttttaatggggccggggaggggccgccgctgccgagaactgagggcgacagaacaatcccacctcttgtgaggagcaggtctgccattctgcttgtcagttctcaccttcccctcctccacggcaaagagtccctttcacacccttctgagtgtgcgggtgcgcccagttttacaagtcctctgtcctgccagggtagtgggagaagcacgcgatggggctagcgcccagtcctgcgggggcaggcgccaagctcccgggagtccgcaagtcgcttcctatattggcaagcttcaaatgagacattagaatctccggcaaccttccttcaaacctgaaccggggaagagaataagccgccctatggccaaggcgcaattgcgtacccgtgtgtacaggtccatgccctgtcccctacactctaattttctcaaagaaaattgttttgccaaaagtaaccctgagaaatgcagacgctccaaacgccctctccacttcggatgaagccagcatctagtagggtctccggccctcaagaaggtgaggcaaagagatgaattgtcagacagctgcttttaaaagtggattgaggaagatgggatggggaggagaggaaccagcattatctccacctcagtaaattgcttacatttctgctcaatatttatgcatttcgggtgacagtcctgcaggctggggatgaaaaagtccacaaggaggaaatccaaagtttgaagttgatattctctgtgtcctgagccaaggtctgatcttgaactcggatcaaataggcgggttctaggccttctgcaacagggcggggacaacaagagctccttttcccctttaaaacatgactgctgggaactcttggaaggatgtgtgtgtgtgtgtgtgtgtgtgtgcgcgcgcgcgcgcgtgtgtgtgttttgtggggaggtaaatgccccctcctcctgcctccccgctctctatccccccacccctttgtaatgtttgtcctgcttgcccatcaccagggggttgagaggagtatgacaggtctttgttgtctgaataaaaatccgtggcagctc

SEQ ID NO: 3568 - DNA, 2300 bp, Homo sapien
cattacaatagtcttctaacatctagttgctcttaggctcaatctgttctccacagtgcagctcttctctcccaacccaaatcagatttggtcactcctccaatggctctccttttcattcagaataaattttaaaggttacaagattctacaactatacccttcttgtaccctactccctcttctgatttagtcagctgctttcccaccgctcactgaattctagcctacactgacctcctgcctatttctcaaacatgccaagcccacttccacttagggtctttgcatttgctgatccttctgtgtaaaatattctaaccctgggtagccaaatggctaatttctcacttccttagttctctgctcaaatgtcagagaggcattcccagacaaacatatttaaaatagcatcctccctccccatgtctccctaccctgctttatttttctatgactcaccatctggcatagtaggtatttattggcttttttttttttttggcctttccgactacaatataagctctatgacagcaggcactgtatatctcggtgagctgttgtatcctcattccttagaacattgcctagcccatttatgaatatttgttgagccacatgaatcaaggcctccttttgagatcgtgaacgttttcatttatttatttatttttttgagacggattttcgctctttcacccacgctggagtgaagtaacgcgatctctgctcactgcaacctcctccccgcctcgggttcaagcgattcttttgcctcagcctccccagtagctgggattatagactcctgccaccacgctcggctagtttttgtatttttagtagagacagggtttcgccatgttggccaggctggtctcgaactcctgacctcaggtgatcacccccccccccacttggcctcccaaaatgctaggcttacagccatgagccactgcgcccggccatttttctttttaaaaataaactttccagatcttaatttcatggctttaacattttaaatgtttgaggtataatctactcattcttggctctaatctttttgtcagggaagttaaactagtgagagacctatgaacaacagcaacaatttaatgagcacgtcttatatgccaagctttgtggttaagcactttgctttatctcacttaattctaactatggtcctagaggttggtattacaactaatctccttttacagagagttactgagacttggagaggttaaataacttgcagccaggtcacaaaattaatcactgagttgagacgacaattaaggtatggccgactccatactgcctcctagccgtctcctcgagtagttcatgccctgttaacttaagtcgtgaagctgctggtgtcaaagcattccttttgcagtttcgtgtactagggttctgggtgattttgcacatatttatttcaaagatcctccgtaccacaccagggagtttaccttctggaatgttgttgaagcccctgtcctctatgctgggacactttcatgcaacgtttgcttagccagactcaggaaaacgcctttttttttttttctcatttccctgcactccacattaaacacagaggtagtttaaatcacctggtaaaagaagatgggatcacaaacgctgtggtccagaagggaacatcagtaagtcggttcaccgcttgcaagtgggggcacttacatataaatgaagaaaaaacaagttcttaaaaagcagccgaccctgggttcttaaaaagcagccggggaagagggctcaggggaccggacgcggtgccccgcaccacgctaggcctgacaaccggaagagaggggccaggaggggctcctccagagcgacttcggctccagtagggaaaccgccgaggctcccccagctccagggagcgccggggacgcaggcgggaagcctccatcgggcagccggcctggactcacgacgcggggtggggccggcgcccgccccgcccctctcctcggggatgccgggatgtttacactcctgacagcggcggcagcaggaggaggatcgggagtcgcgggaggatgggccgccgctaggctcgcactccggacgcgcctcgcagtgcgcagggtgggtgccccgcgcctgcagcgtccgccggggcggcgcggcgggaggtggccgacaggctccgggcctcgcagcctcagcccccggcccagcgcgctttccgacggcggcgccgcgccgagccacccgcccgcccaaggtctctcgcgggcgggagaacggaaaac

SEQ ID NO: 3569 - DNA, 2300 bp, Homo sapien
acaaattttttaataaaaatctaacatctattctttgtaaaaacttccagcaaacaatagaagggaattatcaacctgataaatcagggcatctataaaaaatgtatagctaacataatacttattggtgacagatttaatacgtttttcctaagattaggaaaaaggaaaggatgtctgctctctacttctattcattgtactggatgttctatctattgtagtaaggcaaaaaaactacagaaaagctacttggactaataaggaagtttaggaattttgcaagatacagggtcaatatacaaaaaacgttttattcctatatactaacaatcagaaaattgaattaaaaaaccccaccatttacagtagtatcaaaaaatataaaacacttaggaaataatctgaaaaaagatgtgaaagaccagtataatgaaactggaagccattattgaaagaaacttaaatgagatagtctgtgttcatgggtttgaagaccccatattattaagatgtcaattctccccaaattgatctttaaggtcaacgtaatcccaatcaaaatcccagcagtgtttttttagaaaatcgaaataggctgatcgattttacaattcgtattaaaatcagacacgtaattaagtaaatatcaagactttataataagctatagtaattaatactgtagttttatatagagtagtaatagtacagtgtagtaggtacactgtagggcagtagtacactgtatagtgtactattgttgttagtgcaaataaatagccagtgcaacagcaaggaaagtgcagatacctatatgtgtgtgtgtatatacgtgtatgtgtgtgtgtatatatatatatatatatatatatatatatatataaaaacacatgatcatttggtatatgacaaagatgaccatagcagcagtgcagtgtggtaaaggataattttttcaatatatcatttgaggtcagttggatatccataaagaaaaacaaagattgactttgccttatatcataaaaaaacttaattccagatggtttgtagatctaaatattaaaggttaaaaaataaagcttacattagaaaataatatgagcacttagagtagaaaaataattcatacatagtacacaaagcattaatcataaagaaaaagtttaaatacttagaccacattaaaattatgaatttctattcattagttcatggaaagataccattgggaaggttttagaaagacaagtcacagggtagaggaagaaatttgtaatacaaatgaaccatgcccagaatatttgtattggtttttaaagagtatgatgaagtgaagatgtgttttagttgttccatcagttaatcccatttaaaagggaagctagttttttgagtcttagattttggtcataaaataatatttatagagaacctagaaacacgtggtgttgagtagaatcagtgcaaatgtagttcctggagtgtaagggctgtgtgtcattaaatatttcaatttttgagtcttgtgcaatgcctgacatgcaattaccttcagcctatgtatactgaattaatggatgaaatgctttataattacaaagtatgcgtaaaagagtagacactcatatgacgactggccttttaagtttaaatttaaaaaatcacagtaagcagttggataaaagaaagtactaacatttttagactataaagataaggtgcattttagggatgtaaaacattgagcataattttagggagcttactctgttacttagcttctcatagtggcagggtagaggaaagtatctttgatctaaaaggcagaatgcagaagaaggaatttcatctcaggaaacaggattttctaagcaaataatgcttttggagaagtggaaatggttgagacagtgaatatttgtgggagctaactagagcttggatttagcaaatggcaaaagagtgtggtatatctcagtgaatttttgaagcatcaagtaaatctctagcatttgaatgcatgtgtcggtgtatgatgaatgatgtgaattggtaatgattacattatttaaatttcaactttacatttttgcagagttctaaagttcctgttgcttcagacaatggatgagcaatcacaaggaatgcaagggccacctgttcctcagttccaaccacaggtaatttatcctaattaagatgggcagaactatatataatctgtgttaaatatgtgtaagaaagtagtacatttacagttcctttaggaaataaagtagcacaaaagtgctaat

SEQ ID NO: 3570 - DNA, 2300 bp, Homo sapien
ttctgggttgaaaattcttttctttaagaatgttgaatattggccccactctcttctggcttgtagagtttctgcctagagatccgctgttagtctgatgggcttccctttgagggtaactcgacctttctctctggctgcccctaacattttttccttcatttcaactttggtgacaattatgtgtcttggagttgctcttctcgaggagtatctttgtggcattctttgtatttcctgaatctgaatgttgacctgccttgctagattggggaagttctcccggataatatcctgcagagtgttttccaacttggttccattctccccgtcactttcaggtacaccaatcagacgtagatttggtcctttcacatagtcccatatttcttggaggctttgctcgtttctttttattcttttttctctaaacttcccttctcgcttcatttcattcatttcatcttccatcgctgataccctttcttccagttgattgcattggctcctgaggcttctgcattcttcacgtagttctcgagccttggttttcagctccatcagctcctttaagcacttctctgtaatggttattctagttatacattcttctaaatttttttcaaagttttcaacttctttgcctttggtttgaatgtcctcccgtagctcggagtaatttgatcgtctgaagtcttcttctctcagcttgtcaaagtcattgtcagtccagctttgttccgttgctggtgaggaactgcattcctttggaggaggagaggcgctctgctttttagagtttccagtttttctgctctgttttttccccatctttgtggttttatctacttttggtctttgatgatggtgatgtacaggtgggtttttggtgtggatgtcgtttctgtttgttagttttccttctaacagacaggaccctcagctgcaagtctgtttgagtacccggccgtgtgaggtgtcagtatgcccctgcaggggggtgcctcccagttaggctgctcaggggtcaggggtcagagacccacttgaggaggcagtctgcccgttctcagatctccagctgcctgctgggagaaccactgctctcttcaaagctgtcagacagggacatttaagtcttcagaggttactgctgtccttttgtttgtctgtgccctgcccccagaggtggagcctacagaggcaggcaggtctccttgagctgtggtgagctccacccagttggtgcttcccggctgctttgtttacctaagcacgcctgggcaatggcgggcgcccctcccccagcctcgccgccaccttgcagtttgatctcaagactgctgtgctagcaatcagggagactccatgggcgtaggaccctccgagccagatgcgggatatagtctcctggtgcgccgtttttttaagcccgtcggaaaagcgcagtattcaggtgggagtgacctgattttccaggtgccgtctgtcacccctttctttgactaggtaagggaactctctgaccccttgcgcttcccgagtgaggcaatgcctcgccctgcttcggctcgcgcatggtgcgcgcacccactgacctgcgcccactgtctggcactccctagtgagatgaacccggtacctcagatggaaatgcagaaatcacccgtcttctgcgtcgcttacgctgggagctgtagactggagctgttcctattcggccatcttggctcctcctccccatctatggtgggccttagcttttctaagaggtatgaggagccattgaaatgcttaaagttgaagcatcacctggctagttaggcagtgctagagaaataggaagacaactgaaagcaaagccgtcagctggaagactatccaagagtgtggcagtggagatggtgtggcaggagcaaacaaaaggtttaaggagcctgagaccaataggactggttgctgacggttaggcaggtgggaaggaagtatgatgagatgtttgatatgaatttcaaatttttgacttaagaagttggaggtgctgttaggaagagctggttggggagaaaaaaatactaatatttcagttttaaacatgtttaatgtgaatatttacgtgcagctctactcagaaggcagttggaagtatgggaacagagcctgcaaagaggtctaggctggagacagataacctgtgttcctcagcatgttggtggttattgaaggcatgggagtaagtgcagttgttgaagataagaaggaagagtgaaacaggaaaagagttaaggaaaggaaaatat

SEQ ID NO: 3571 - DNA, 2300 bp, Homo sapien
ccactttcttctgcattgtgtattactggatatatttatttttttttttttttttttttttggtaacctggtaaaatgccagtctctttctgatgtaaatttctcttagatcaccataataaaatgctttgtgtattgctgtaccccttaagggttttaaatgctgttctctgctcttttggaaggaatataaattaaaatcttcaggctctcccagtgggtgtaacattactatgaaacattgttgaatttccaagtgtagctaaaattgattcattaaatttcattctgctagaatcgtaaaatgtaagagattaggatgagaacagcccttataggtcatccactccaacttccctatttaatagatgaagaaatgaacctccagagacagtgacttacccaagggcacagagctacaaagtgccttcaacaagactggtttccatttcactgtactccttaccaaactctgacccttcatctggcagactctttgacccacctcctctttcagaatgacatttctcagtgccattagccttctccatagcactagcaacatcttcagcccaagctttttaatcatcacttgtattttctctggttgaaagttattttatggtagaaattgagaactatgaagaaattgtgctaatttaaaaatttactaagtgctatatcgtggccagagttaatgcaaattctcaaaatgtctaaactgttcctaaagagacctacaaagcaaaagaatatagtttttcctcttagtttattgtctatgaagatcatatacaatgttatgatgacacatagtttcataaactgatggaaattagaattgacaataaaatgctatgttcttctacccgatggatcgaggaccatataggagggtagtttcttaatttattgaaatctgcttttattctatgatataaatagaataaaatagtaaacctcaactctctcatctataaagtgaggacatttaaatactgtgtacacaattgaggattggaataacacttataacttcccatataatttattataattagtttaaaggagtgtttttttctctaatacaaaatttaacataaaacttttaatatatatttgtacaaaatggttcattataaatgtatgtcaactctaattgccttccatttaaacttacaattaagtctgttgtagtagattctagatcaaatatgtatgtgtgtatttacagttaacttggagacttatagttataagactagtgtcctcagtgactgctatcttctgattaaactctgaaaaattaagagagtccattttaaagcctctgattgtggaaaatacttcttggttgacattaatactgtccattcaatgcacttcatagaacatttaacttattgtaagatcattggcagcagtcttatatatatttctagtacagtgaatgtttagtcagaaaatgtactttccttgtaaaatctatagctattcataatttcttcctctcagtaaactaaccaaaaatagttgtcttaatcaggttttattgtttttctttcttcacagctccgacagttagttaatatgtgcatcaacccagatccagagaagcgaccagacgtcacctatgtttatgacgtagcaaagaggatgcatgcatgcactgcaagcagctaaacatgcaagatcatgaagagtgtaaccaaagtaattgaaagtattttgtgcaagtcatacctccccatttatgtctggtgttaagattaatatttcagagctagtgtgctttgaatccttaaccagttttcatataagcttcattttgtaccagtcacctaaatcacctccttgcaacccccaaatgactttggaataactgaattgcatgttaggagagaaaatgaaacatgatggttttgaatggctaaaggtttatagaatttcttacagttttctgctgataaattgtgtttagatagactgtcagtgccaaatattgaaggtgcagcttggcacacatcagaatagactcatacctgagaaaaagtatctgaacatgtgacttgtttcttttttagtaatttatggacattgagatgaacacaattgtgaacttttgtgaagattttatttttaaacgtttgaagtactagttttagttcttagcagagtagttttcaaatatgattcttatgataaatgtagacacaaactatttgagaaacatttagaactcttagcttatacattcaaaatgtaactattaaatgtgaagatttggggacaaaatgtga

SEQ ID NO: 3572 - DNA, 2300 bp, Homo sapien
agcatttaaattgattcatatatttaataattttacacagagtgaaatgtcaattggtattctttgttttcttccatattttttattaggaaaagaagagaaacctggaagaaaattttcctggaaagaaagagagcattgttcagcagcaagaacactgaccatgagaacaattcttctactcagaagccacctgaccttgggcctgtcactcaggttttctgagccacagttccctgaccactcgtcttgcttattttataggggctttagtttctttactgataaaattgctgtgctttgtaataataacacctatgtaagaatcaaattagttaaatatggaaatatgcataattgtaaagtatcatacccagtttctggaacctagctgatattttattagtgaatagaaggagaaaagcttgtcccattgatgctcagtaatacaaaacatttaaagaataaattcaaaatcttggctataatagaattttttaaagtgttattatccttcaatgtttgagtttgtaagtgaaaagtcacattaggaatcagctttgattaaaacaaaggaataactcttatagcaagtaaaccatttgtatgataataatccattggatatataataaagttcaaattctccagccaggcttttacctctatctactgctacactatctacctctcctcaactttactttctcatttgttttgcaatttagattgtaaaagtgtgttcagtatggttttatctctgcagaggctgtggcagttcaaacccacataagtttgggactgtgattacttcttttttttttttttccatccagagtccagattgagatgagaagcttcttctttgtcatctttctctgcttctgggtagatttttctatccctccttttcactgagagagtaattttttgagggtcaggagaggatgaaattcattctaagtctccattttgggttattcccaaaggctttttcctctctaggacttcttcctgttaagccaccttgtatctttttgtctggagggatcatacaagagttgtgcttgttcgaaaatcggtttatcccagttacaccaggtatttaattacgcaatacaaattaagtactttataagctgattaaatgtgacttcaaaaaaaaaaaaaaaagtaaaagtgatcctgtggaaaagtttttccttttgaaaatatttgctgaaaatgcacacataatgtaggcatgcagatatggatgagacaacttgaaaagattaggagaaaataatcattaaagccttaaaagatttagtgcccagattgttttacaattgtctttaaatccagacaccttattaaagaaaatgaacctggcacttacatatgaggcaatagaggtatagtttatgaaagcaataatacgtgaaaccccaatctgcaaatcgtatcggggggaaagccttattctaagtcaacagattagcttttcacttcaaataaaaattttagatacatataaatgatactttgtggttcttctctgtgaccaatattctgatttgtccaattgctactggatcgaatcaaatcaagtatgatggattttattgtattatcttaggacaatactcaccacaaacactgaataatataaaatgcatgtttaaattattttaacttaatcccaaaacctacagttatagtctatttctatcatgattactactactaaaattactaattgtttagtcaccatagtaagatcttcctggaacttcaacctacagcattacttaagagcagcacaatgcccaaaagaaatctttttattccagtcacctgagaccttgggggaaaaaaatccttagtccaccatctatgcacaaagctagggaatctctttcctaacaaaagattaacacgttttctccaagcagataactgaatcactagaaacaaataaagaaaaagacctgaaacaaagtactgcaggtacaaagagcaaagatcttgttacttaaaagaaaaactcagtaaacatgtcaatgtttcttggaagattagggaaaccaacattcttaaaaggtctcttattcattatttataagtagatgcaacacctcatttatacctccttatctcatacagaagagctaagattggcagaaatggtaagttctcaatttatgcacattggtttaacttgtttttctagattccaccttgggctttccttgggacccagctatccagcccaataaagccagtttgaaacagctgcatttggaacttgctgttga

SEQ ID NO: 3573 - DNA, 2300 bp, Homo sapien
acacaatgaatatgttaaaacattatatatgtgttggattaacacatataatgcaactcatttgttgctaatctatcttggattccttgggtagaatctgtcttctcacctgtctgaaatggaattgaatctcctaacttcttactatttttttaaagccacaaatcccttttaaaatgtccgtttaaggctgctaaactcacattgttatagagtatattttatatacttttcttccttttaaaagatcatatacacttttctcctggcctctaattttgccaaatattctgccataacagcaagctcacagaacacaagtatttgcttaaagatatttaaagcaaatccccaaagagttttctgttgcaaatgtattttaagacataggctgaggagctgagtattcaaatccatgagttctgacactgatgttttattaggcctacccacatgaaaattagtgcttacttgcacagttatcttatttaaaaatacatttgcaaaaagagaataatttcattttcactgattcaaaggtctatcttttcgagtattataaacttacatagtacaaaaagattggtaaaagggatgagaaaaataaagggcaatagtaaggtgagtaaggaaagcaaaattaaacttggagacttgggttctaaatatagcttgtctacatcctagctgcaagatcttaggcaactcaactaacctctctgaacatcacagataaaatggggaataataacattatctagctcaagggtatcgtacaaattatacaatatatgtaaagtgcaaagcatagttcctgcacatagtaagtgctccataagttaaatataataataatcatagtaaaataatattcttaactacaatcttattaaaaggttattacctagagtttaagctgtggggttatttccatttgcacaaagtgtgatagaaatttggctctgtagttcctagcagccaatgtaagagtaaaacaaaaaagtttgtaagtatcaaaagatttatttacttaaatataagaaccctacaataatgcttccaaactagggtttgcagaattaccacaagggctctgtctgtctaaaagtcccccaagcattatctattgttcaaataaatgagttgcacatgtgtgtacttttatttttaaaggcatatagatattgtattaataaaaccaattcatctaattgtattgttgaatttatactttttgccagtaagcattttcctaatagatggacttaactaagaacatcagaatggtgaagagcattgtgttaatacaattcattgtcttatttgttaaaaaagttgaaaaagtattgctgagaaaaaggaaacaagttaacttttgttaaaggtatctcttggttttcactgtcctttccctcatcagtagcgccaagaacatcttaagtcacagaaacattagtttttggaagcagggtttgctgtaactatagtagaaatgacattctgattccactcctagcttcacaaggatatctgtgaaagatttggggcaaaactgttaagctgtctgaaagtgcttttgcataagaaatgggttttactgctaaaactgtcatattgctgagttttgaatgccctaatggtaaatgatactgggttgccaaaaataaccagattagtagttttttcattcatttggccgtctcagtaagtcaaatattgatactttctactaagtcatcttgccaacacccattttgttatacttatgctgaatctgtttgtcatctcttaagtaagaaaattattgattattttgtggggatttaatttaaaaaaaatggtaatggatactgtaaaggagcattatttggatggtttaaaaacatcttccttgatgggaaaatcttttaaaaggctttctaacttggtgtaattacttgaattaaggaagtgcaatgccattctactgacttagaacaacttttttgacttcctgcaaagaggacccttacagtatttttggagaagttagtaaaaccgaatctgacatcatcacctagcagttcatgcagctagcaagtggtttgttcttagggtaacagaggaggaaattgttcctcgtctgataagacaacagtggagagtatgcatttatttatttacttttacatttttgattcgtttttacagagaaaaacttctacagagataacaattattttgcttttcagaaggacgcatgctgtttcttagggacacggctgacttccagatatgaccatgtatttgtggcttaaact

SEQ ID NO: 3574 - DNA, 2300 bp, Homo sapien
tacttcagtgcttctatgctccacccagatgcccagtaaatcacctatctactcaaagagccggcctgaagctttctgaatgtttttctgaaaataatcttgtcttcattctatttactagaaagggaaatggaagagggttgactgactccgtttagagcactaatttatcttaattcttacaaataatcagataatataattgcaattgcctttttgcctatgcataaagctaaccaactcaaactgaagaggcaacattgaatctcttttcctgcttaagagttaggctaaaataaaactatcttaatccattcagttaattgtttaatgtataacaagtaatatgcttattgacttttgttcttagggaagaaaactctgaagattaaaaatggggaagaaaaccaaaatgatttatttggaacacacagttgactaagggataaacatatatatacagagatagattaaacagcttctattatagctaatctatgagacagtgtgtttatgtcaaataaacttatttaccttcatgttaacttttaaaatcatacttaaagtctatccccaatttccatgtgcctaaggggaataatgggaagaaaatattacttgctatattaaccataaattataaattttacttaaatttacaaattataaattataaacttaattataaattttacttaaaaattttgaagtgatataaaaaaacacaacatgaaaacaatgcatatcattatgtatgtttctgagatactcatttattatttgttaaaacttttaagaggaagagaaaaatataacagattttcaagggggaggaaaaagatgaattcttatatgggtcagaatatacgcaaactgaaagtaaaaattaatccagattcccattatcttcagttacattataattcttcatagttatattttctagagaaaataaaggaaaagtagttgaacaaaatgctcaagatgtataccttttccattattgcaagatgccaatgttcaagggcaagggtgttgttatgagtggcaggagatgtgaattgcattcccttttccattgccaacttgccaagtggtcttgggtcagcaaatttatctaactaagcctcagtttcttcaactgttaaatgataggttagactagagaaaaactatagttcatttcagtcctaaaataattatggttatggtgtcatagctaagtagagacattggggcagcctttaattattggtggtgttactactgctcaagccatatggaacttctttaaccttggctatatccataatagaacaatagcttgccacttaaaagaaaaactctccaaaatatttcatatgcttgctattcaagtttatttccaaagtggaccaaaggccattttccataattttattgctaacaaactgtacattttctttaaagaatagtaataaaggtgatgcagaatgagaaagagatccccaaagggaagattcttcccaaatattaccataagaattggatcataaaatggttagaagtggaaattatacatatatagtttgagcttcttctgaaaattgaagtctgacagtgtttttattttaatttggtgaaaaataatagtataaacttaatgagacattcagtcctcctctttgattaaaataatgccagatgttagaacgacaagcacaaatccttccattcatgtttcactttcttgttttctaagaagagaatgcaaacaatatggatttttttcccccggtccttctcttctgctgtacacgtaagaatctggtgctatctagctattccctcagcttaagcaataataataatgaacatttgttgagtgcttataatgtaagttctagcctaagtaccacacaagtgttatttagtttattccttataacaatctagaaggtagatatcattataaccttccatttgtagatgaggaaaccaaaggtcagagagggcccagtgttgcacggagaggaagcagtgtggcaggccacctggcttcggagcatgcatgcttagccaccacaggatacttcctctccaccctatagcacacatggaaataaagacataaaaaacttaaatggagttcactcgaattatatagatccttattggtaagttctgaataaaattctggtggcaagctccttaaagttccaattccaagcacagagatgttcatggaaggttttacataacacgtgtagaacctgtccatggctgggttttcttttgttcagttttgggtctcagcacct

SEQ ID NO: 3575 - DNA, 2300 bp, Homo sapien
aacctgcttgtaatagtttaagttgtagcaccacttcacaattcagaattagaagtgaaaaattacatttatgttaccgtcagtttaaccctaaaataattaaaatggagaaaaaagaaagagcatatataataaatcagaaaacatttccaaccttaaagccatgatctaggaagatgaaatggacagaatggaacaagatgatccataaactactgcagagaggaacattaacgaaaagcaagcattgtatctctggaagtctcaagaacaattagaccattagtacctttcccagctcacctcccagaatattagcacccagactggtagtccaaaaagataagaccgaacaaatctttggagcacaggaatagtccccaaaaatggagccagagatcttgacatttaggagccaccctcacaaaaccagcctaccactcaacaaacacagctgaggaacacagattttctagcttttaaaataacttcattataaggtgaatctgcaaatcactaggcttttgaagcatgccgccaacataaataagcaaatacaaaaagaaaaaagaataaaagcaaaagaagatgaaggagatttaagagaacatgtaaaaattcaagaaaagtgtgaaagaactgtaattaataaagtaacatataataggcagaaacacggtggttgaagcaattggccctggcagtgaagaatattttatagttgactttgtttagaatttactgatgcatggtgatgataaaaatgaaaactgatatttggtcaactctagtattattctaaaacgttctttattctaaaacgttctacaataaaccccttattatctgtacccaaaagagattgctcctaccaaccatcccttaatgtgctgctaagttaatatcctcaaagcaatgagagaagcatttgtactcagtccagattggagtaggtgcattaagcacttctgaatgacagttttcgaacaaaatctggtccactaactgttattaaagatatggaacaacttagtaacacttcaagagaaaacaatgaaattgaaaaaattagataattattaaatacaacaaactaaaaagtacacaaaagggaattgtggtatattattggtgttagaagagaatggtactagtattctctactagtagagaatactagtactactattctctactagccactgggtgcagtggcttacaacttaatcccaacactttgggagggggaggggaatcacttgagcccaggaattctagaccaacctgggcaacatagcaaaaccatgtttctatttttaaaaaataaaatagaataatattacatagtaaaaataatggcaatatagaatacggataagaacataatgtaatcttacagttataggaagtgcatgcatggtgtcaaaaattaatatatcaaaaagcaacaatcatatatttcataaacatggaggtatagttgaacaaatatcccaaagaaagtggttgtacctggggattggaatgattgggactcagagagtaggggtaactactttttattatgggctttttgggcataaattaaatgcatatattactttgattaaactcaaaaagtgaagattatatggatttaattagaacaaagctataataatgacataaaacatttcctgtaactctataggctgtcagacaatgcagaagttaaaaaagtcacatttggcacgtttatttcacactacattattctattttataaaatttaaaaaattctgtaattctgaaaaacatttgttatcggaatgaaagataacataactagtcttagatgtagaattctttcataaattagaaaaagaccacctttatctttaattaataaattttaaaagttatgtttaatttaaacttaagatttttatatagtatactctttgataatacataatttggaagcagattttttaattttaaaaaataaatgtgtaaaataagtatgcatttttaaaaatcaaagacttaactaggattttattgtagagatggtatgatctttctggctatatatacttggaattgggctgggtcctaattgatacataggaaaccaaataacctagagaaaacaatacccatgaatgattagcaaatttcttacatataaaggaaatgatttaacttcaagagactagaataaatgaaaacatattcaaaattgaaaacgttaatggaaggtaagtttggtttgcatttgtgcattttattttgcagactagaacagacataaacttcta

SEQ ID NO: 3576 - DNA, 2300 bp, Homo sapien
agagaaaaaaaaaagggcctggtgtggtggctcatgcctgtaatcccagcactttgggaggccgaggcgggtgaatcacctgaggtcaggagttcgagaccagcctggccaacatggcaaaaccccatctctactaaaaatacaaaaattagccgggcatggtggcacgtacctgtaatcccagctactaggggggctgaggcaggaggattgcttgaacctgggaggcggaggttgcagtgagccaagattgtaccactgcagtccagcctgggcaatggagcaagactctgtcattaaaaaaaaaaaaaaaaaaaggactggcctgggtttacaggtagctcacacctgtaatctgagcacttggggaggctgaggcaggaggactgcttgaacccaggagaccaacctgggcaatacagcaacacactgtctctacaaaacatttaaaaaattagctgggtgtggtggtacacatctgtagtcctagttactcaggaggctgaggcaggaggattgcttaagtccatgagtctgaggttgcagtgagctatgactgtgccactccattccagcctgggtgacagagtgagatcccatctctaaataaattaatagaccataaattctgtaatgtgaatctttagacaaagactgctaaatctatcatctgatatatgaagttttattacaacaaatgtttatatattgagttaaaaattatctgtacccatacacacaacctgcatttacttaatttaaaaggagtgtcaatattaaaattgaggattttggccaggtgcggtggctcacgcctataattccagcactttgggaggccgggtagatcatttgaggtcacaagtttgagaccagcctggccaacacggtgaaaccccgtcttgactaaaaatgcaaaaattagccgggcatggtggtgtgcccctgtaatcccagctactggggaggctgaggcgggagaattgcttgaacccgggagacagaagctgcagtgagccgagatcgtgccactgcactccagcctgggcaacagagcgagaacccatctcaaaaaaaaaaaattgttattttgttgttattgttgtttttgaagacagagtctcactctgttgcccaggctggagtgcggtggcatgatcttggattgtgttcttccagggttgcagagagaagtgcaacagcgtctcattgcaacctctgcctcccaggttcaagcaattctcccgcctcagcctcccaagtagctgggattacaggagtgcaccatcacacccagctaatttttgcatttttagtagagatggaggtttcaccatgttggccaggctggtctcgaactcctgacctcaggtgatccgcctgccttggcttcccaaagtgctgggattacaggtgtgagccaccatgcccagcctaagaataataactttataactatgaaaaatgtgttacatattcaccattttgccagcattaatctcaaagcataagttttaccttttggggataaagagatagattgtgttttagccatatgaccaatgtagaaacaagctaaggttaactcctcatctaatgaataggcccgataaaaaagttggttgaccacaacatgaataaataaataaccataagcttggaaatgctacctgtagtatttcagagtgtcgatcacatttgtagtcatcacttaaagaattaatgtctgccaatgttatcatctaaaatgtatttacagaggtcagaagagctatgtctgtcctcctctatgcaaagaggtgatgacatcaaggggtatgtcacaagccaaagtttagttagcctaagttagttagctggtttgcagtttttatccactaagtctgatcttctgacccctcagttttacaactttccactctctgtgctgcatagcacctctccacttctgagttaatcatttctttgccattatctggcaagaattcttatctcttttgctgtcactttataacagggtcctcttatcaacctgcatagagtcatgtgatgagtcaaagcctatcaaaagtttccattcttctgattagaaaccatcatgaaactggatacatggtttacagcaggtcactaatgttggaaaaagtacagagtccagggaaagacttgcttgtaactttatgaattctggatttttttttttcctttgctttttcttaactttcactaagggttactgtagtctgatgtgtccttcccaaggccacgaaatttgacaagctgcacttttcttttgctca

SEQ ID NO: 3577 - DNA, 2300 bp, Homo sapien
tttttttttgagactgagtcttgctctgccatccaggctggagtgcaatggcacgctcttggctcactgcaacctccacctcccaggttcaagcacctccagcctcctgagtagctgggattacaggcatgtgccatcatgcccggctaatttttgtacttttagtagagacggggtttcaccatattggccaggctcgtctcgaactcctgacctcaggtgatccacccacctcagcctcccaaaatgctaggattacaggcatgagccaccacacctggcctcactgagcaccttgatgatgccatcagaaagccacacctgatgccgtgttcctggaagtaagaaggggatggcacggagagccccagaagaggagaattgctgcagctgctgccgggatccaacggaaccaaaaattcttatgatggtgctgggttgaagcatgaaattcatatgtaagaatggtaccttttgctccagcgttggaacagactgtggctttttttttttttttcagttgagcatgaggtgaagtagttggcttatgttttggggccaggagtctcttgaaactctccacttacttgtgctcaaagtcccagaggcatttaggaaatgcgaggcatttaggaaatcacagccacattcactacagtcctcattttgtggaatgacctgggctatttctattgttttatttatcttgtttaaaagaaaattactgaatgagtatatttgaattcacttaagtcagatactgatatgatgtgaccccactcactgtaaggtctcagttctccagaaagttctagcctgggaatgcatttggaaagtaatcagcatgtagtttagtagttaaagctgtgagtgtggatgtgttcaccaaggggagtgtgtgtcaagagtaagaggacgcagccttgggcagagccttggtgaatacggatgtttatggggctggagaaggaggaacccaaaaagcaatctaaaaaaggtatgagcctggaaagtaacatggagaccaaggacaagtgtttcaaagaaaagagagtggtgaaaagtgtctagtactacagaaagaggtattcccctatcttctttaattcagataggcctggagggcgtcctttaggtttaacagcttctccaaagcggccaccattgaaagccatagtggggtagagatcagattgcaaaggaaggagctgggaatgggagactagttatttcaagagttagaagtgagcatggaaggttactagagagggggttgtggactaagaaaacgctttaaaaataaataggggaggaaattcttgagcctgtttttatgatgaaggggagaaccagttaaaaaggagagcttagaaataaaagtgcatggtggtggagatgattaatggaacaaggtcctggaggatacgggaggggacgatctgaaggccaggtccaacatttcacctcggactggcggaaggaataggaaaagcaaatgttttgcaaaccaggagcatgtcatatttgtgtctttgcccctgtgcagcatggtgcctgtttgctggaaggtgagggaggtacagatgactgtgctgtaggtgagggatgaagggtcaagtgagcacttgcctcttttcaaagaggagcagtcaagaccctctattgaaggcacctgagaaagtggtggggctttggagacagagtgcaggttgggaggacccactgaaggaggtggagaggaggagggagaagtaattgtgctgggggaaatcttgctaagattggggaccatgaagttagcagccaaatccatgggatgggggtgtcttctccaggagtgtgcagatgcccatgggtaggagtcaagaaggcagcacctggctgggcatggtggctcacgcctgtaatcccagcactttgggaggcagaggcaggaggatcacctgaggtcaggaatttgagaccagcctggccaacatggcaaaaccccatctctactaagaaaaatacaaaaattagttgggcttggtggtggatgtctgtaattccagctactcgggaggctgagacaggagaattgcttgaacctgggagacggaggttgcaatgagccgagatcacgctgttgcactccagcctgggcgacagagtgagactccatctcaaataaagaaagaaagaaggaaggaaagaaggaaggaaggaagagaaagagaaaggaaggaaggaaggaaggaaggaaggaaggaaggaaggaaggaaggacacgaaagcaagcaagcaggcagcacctatcagaa

SEQ ID NO: 3578 - DNA, 2300 bp, Homo sapien
gtggaaaaagatctagagaatcctcatctaagcagaagatgaaggagtaaagagagaaagatgggtgtattggaagcttgcgggtgatggagaaagtttcaaataattcttggaaaataagttgaaaaaagaaacgtaacacagttgttagagcagggcatgattgcttgtgcctatagtcccagctacttgggatcctgaggcaggaggatctcttgagcccaggagatggaggctgcgttgagctgtgtttatgccactgcactccagcctaagcgacagagcaagactccatttcttaaaaataaaacaaaaatgtagttgttagtattgagggcccataagaagttggtgatgatgaacctatctacgcttttgatcacctccagcagagtttgactgttgcgtgcaagcaaagagaaaggagatggcggggttcaatgagggctgtcgttttcctagataggtttgtagaaaaaacagagaggaagggagtttaagggattggcaaaaaggatatagtaataacagaccatggaataaaaattgagtaagaaggaaagtgaaaacagctgaaggctaatgaattgggagaaagcagatggatcaatagactggaggccccaatatttctaagagcagttggagttgttgtcatgcaagttggaaggaaagatgcttatccaaaagctgaatgcctgaatcagtaatcttgcggcagagctattgtaggtgatgacaaggtcagtcctttgaagtctatgcatatatatcttcattataggctgacttgccaagtcttagaatttttacaatataacctcactgtggatctcatctaagcaggtttggtaaccaaaagctcaagagcgtgagattgagaccccagagagctcatagcctgtcacaaaccagctgtgtaaccacggaccttgaggaaatgaaccttatggtcccttccgtctctaatctgtgactccatagccccattataatatagccttttcccaaacactgaccttcaacatagaccctgggggatttttctattaaaaatttgcaactctgcacatttttatctgctgatgcctcttggaatattaaatgcttagaaagctgtcgtcgggatcacattctggaatcttgaccatgtagtcatctgagtgggtgtgacaggaagtatacaccagcagcatttgtgtctgagtgtccttcagacactgggatggctgcacctttacccgtcctctccaactctctccacctagaaagtattcttttctcttaattttgttagagttatataggaatgctccttcagcagaaatgacagaggctgttgctctcagaatcaaatgcaataatgtgacctgtaaattcctgtgaatatttggatattttagcgatatttgtttattcagaagagattctggatgcagaactctcctcctctctgttctctaaccctgctttccaccatcattcttctctctctagggcacagagagaattaagaacaacctaaggtaaatttttaacaagatggtctagcttgagctctgtaggcttgactgatgaaataagtagtagttttttgctaaaataaccacattgtttgcaaaagttttctcctttgagttttctagggtcattacaatgatctaactgccttacctgcttttgaactggttgagcctcttgtgggaccgaaaacaaaagaagggtgttgaaatgcaaatagataactctgggtcccagtccctgactgcaaaaggaagccaaaactgacaacaacgtctccttctctacggaggtttgtagaaaggctgtacaaaaatctcacaagatgtatttcttctcgtggactggagtcccaaggtaggtaagaaaaacaaaaacaagataaaaacaaacaaaggattccgtacttggaatttgctcagtaccagttgaatagctaattgtttcttgtgttcttcccctcccccctttttttctgcctgaatagataatccttacaaaacatctattcattctacaagtgaaaatttcaagaatattctatactgaccttggcaagagtaatggaccgagattgagtgatgaatttgtgtgtgttgtggctgatgtgcattttggtgctttgtatgcaagtttaagaatatcttagcaataggaaaggaagatttatggcagtttaattaatgaatataatgaaggctaaaacttgtagataaatttataaggtacacaattatttttatagcttatttttagcacaaaggtgattgtattttgtt

SEQ ID NO: 3579 - DNA, 2300 bp, Homo sapien
acagcatcagatcccccagattaagagcccaggcctacaagactggccggccgcatttcagatgccaatcacaagccccaggtagttttacctgtgcttctgactgaccagctgtaaatcggggttcccatgaccccttccttgggcttgattaatttgctagagcagctcatagaacccaggcaaacacttacgttttccggtttactattaaggacattacaaaggctatcgatgaacaccagatgaagagatggatgggggaaagtctgtgggaaggggcgcggagcttccacgccctttccgggtgcgccatcctcctggaaccttcacgggttcgcttacaggaagctctccaaaccccgtccttttttaggtttttatgaaggcttcattacacaggcatgattgattaaatcattggccattgaagatcaacttaaccttcaatccctctctcctccccggaggtcggggggtgggactgaaagtcccaaactctaatcctgccttggtctttccggtgaccagcccccatcctgaagctacctaggggttgccagccatcatcagtcgcttcattagcatacaaaaagacatttattactttgcagattccaaggatttttagcagttgtatgccacaaaacggttcaaagtccaaatatatatttcacaatatcacaactatacttgacagtattaaagtgtcagtttaagtggtggaatacttacatgttgtttcatgggattagaaaaaaagcaatttcttcttatctcaaaattctcattaaatattgtctgtaaaatttttagggcaggctgagagaggtccataagtattagtaaataatccctatggtttcgattgtgaaatttcccagagaatttattatttaattatgagaagttatttagctagaaacattgtgatgtacatgtaacttcattaagaaaacatactatgtaaataagctgttgtcatagttctagttcttttatttaaaatttctcatttataaatatcctttgctaggaaagtgtctggtttagatttctgcatgcttaacatgaaatcgagtgccttgtgtacattagacactgaataaatatttgttgtttgattttgttgatataactttgattttaagattttacttcataattttcccttacaagaaaaatttctaaatttgcaatgagtttctcggtattctgtactggcgaggaaagagttgatcctagcagagctcttagaatggcctggtggttaatttttcataaacaatataaagggccaggcattcataacgtggcaaacagactgattagccaggctaaggtacgggggcatttaaataagatgtaatgataatgaagtatgtgtgtgggcgtgttttacaggactgctgcacctggattacgctcggtttcctcttccagtagccttcaggaaggttggcagtaagacaagtttttttctttttcttttttttttttttgttgcaacggtaccactaattgcggtttcaaagcaggctcctcccataaatgcaaaggatatgcgcccattattagtgcttccaaattcaaagggataacataagcacctgttttaataaatgttgagcatttggagttgaatgcttcttgatagaatcaaaagtgccctcaatgatccacttctaggtttgaattttatttcaagacctggattgcaaaacctagagtgaagaaagccctaacattgaatcctcagtttccctcaccttctcttccagcccctttctctgcatctcccacgccacgctgtagtacagtcccccgtaacttcccgccccttgggttccacctcctgagcgtctttcccccagaaaccctcaaccactttcatctccttcagtgcagcccaccaatcacgcctgttcgcctcgaaagcccctttttagcagggctccaaatccccgcctcccctgcccttgctcccccgcctccgcccaacggccccagtgattgacaggcaggccgggcggaagctgcggcgcaggcgccctggctccttagccctcccctctggccgggtcgaggagttcccagcagacactgcgccgcggctgcgcagtacacgggaggcttttaattccattgtggagaggacggcgttatttttattaactggaggcgacggcggctgcggcggcggcgggacccgtaagtattgccggtgggtccaggagggagagggcgaggcctggggaagagtcgcaggaccatgcgtgccggtgccggaggcgactggg

SEQ ID NO: 3580 - DNA, 2300 bp, Homo sapien
ctaaggtcgagagttcgagaccagcttgaccaacatggagaaaccccttctctactaaaaatacaaaattagctggggttgtggtgcacgcctgtaatcccatctactcgggaggctgaggcaggagaatcgcttgaacctgggagacggacgttgcggtgagccaagatcaagccattgcactccagcctgggcaactagagcgaaactccgtctcaaaaaaaaaaaatttaatcttaagagatcattaattagcatgagttaatcatttttctttaaatcttacataatccagaaagcttcaaacgtgccagttttacttcgactctttccacgttttctttctgtttgtctccctctggtggatttaaaaaaatacttgctttattctatttatgagcttattttccttttaaaattgaaaaaggtctttatgtcttctgtcatgtttaatatatatttccagttacattttatttttattattttgaattatacatatgtttaaaatttttatgtatttgagtttgtctgtcttttctttgacatatcttgctttgtttctaaattgaatgatcattttcccatagatgtgataacttttttttttttttttcttgagacggagtttctctcttgtcccccaggctggagtgcaatggcgcgatctcggctcactgcaacctccgcctacccggttcacgtgattctcctgcctcagcctcctgagtaacggggattacaggggcccgccaccacggctgcctaatttttgtatttttaggagagacggggtttcaccatgttagccaggctggttttaaactcctgactgcaagtgatccgcctgccttggtctcccaaagtgctaagattacaggcgtgagccaccgcacctggccctgataaatattatattctattttctgatagtttccttataccttaattttaattgagttttagaatgatttttagagtaagatttagaatgagtactttatcatctgtttggttggtctatataattggagctacttatggtctctatctcagtgaatacttcttcaatatctctgtactttttgcctgtttaaaaaacattgttgctttacaatatctatttatctagtctttctcatttatttggttatttttcagaatgtatttgtaatattttttcagatttcaaaatcttatgggggctgggcggcgcagtggctcacgcctggcagcttacaaggtcaggaattcgagaccagcctggccaatatggtgaaaccccgtctctactaaaaatacaaaaattagctgggcgtggtggtgcgcgcctgtaatcccagctactccagaggctgaggcaggagaatcgcttgaaccagggaggcggaggttgcaggggccactgcactccagcctgggctgcagagcgagactccgtctcaaaaaagaaaaaaaaaattaaaaaaagggaacttttactgaaacggagttacattgtacggcggcaagaaccttcaagttctagttatgccactgctaattgtctgatctttcacaagtttaactctaaacctcagttcctcatctgtaaacgagggataacattaatatttatctcacaagattttcaggactgtttaaaaattcatataagacatttagcatatttcctacgtgaacgccttgcataggaaacactagaaaagttaattattatgattaacttgggggcaaatatccatttacaatgtgaagtcttcgatgtaatggcttcttttagattaaagaccgacaagagtgtcactgtcatgcttttcgtttgacacccacttcaacgaggggcccgctgcgcccgcgaccgccgccccttcctctggtcggatttaaagggggccaagctccacgctttagcagaacccgaggaggggagggagcgttgcctgggagatgagggtggggcgagtccagcattcagagacggctaccggagcccaaccaccggcacttccggggggcgggtggaagcaaaggcgcggcacccgacgcgacgcccagcagccaatcagaaggcggggcgcccattcaaattgcggccttctggggagccggcgctggaggtggtgagtggcgtggggactgtgtcgagggggtccccaaggtgccggaccctgcggaggggcgaagtttcggcactggggagggcgtgcggacgctttccctacaggcgaccactgctctgcgggcgggtggtcttagctccagtcccccattcagttcctcagcattccaggtcggcg

SEQ ID NO: 3581 - DNA, 2300 bp, Homo sapien
cctgaaaggaatagtgaggacatcatgacactctttatatcaagcttttcttccattcgccagcttccactgatgaagagatggagtcctcttcctcacacatagcagtgttgtaacactgcacactgctcaacatagccttgtacacatggtctatttccgtttactgattatttgcactttgaagtatcagatattatagaaattctggggtaaatccttctattatagcatcaaaaaagaaaacaggagaaatacttcacaattagaatctttaaaatcaaagccacaaatcatagagaaaatgctattttcataagtaacacttagtgtttattatatgccaagcacagtgcttcacctaatcttcacaaccatgtaaagcagttagcattgcctaatatatatatatacagatattttttcattatgctatactaggtatattacatagagtaatatacacaagactaatatacatagtatagcataatgaaaaaataatatagtaatatacataacatagcataatgaaaaaacgtgtgtgtgtgtataaaacacattatatacactcagaagaaactgagccacttagaaattaagtggtttgggctgggcgcagtggctcacgcctgtaatcctagcactttgggaggccgaggcgggcggatcacgaggtcaggagatcaagaccatcctggctaacacggtgaaaccccgtctctattaaaacaaaacaaaacaaaaaaaattagccgggcgttggcggcaggcgcctgtagtcccagctactcgggaggctgaggcaggagaatggcgtgaacccgggaagcggagcttgcagtgagcccagatcgcgccactgcactccagcctgggcaacagagcaagactccgtctcaaaaaaaaaaaaaaagaaaagaaattaagtggtttgtccaagctcacacaattcttaagtgttacaaccctggcactgtggatccagagcacaagctctcaaccatacgaggactaagctctaattttttatcttacccaaattcctttctaaggggtctggagagtcatgccctacaaaccataaattctcatcagatgggttttatttaaccctgtatatcgtgacttactttccaatctgactctggcctaacaaggaagaaaataaaaatgttttaccccaaaatatatttccttgtcgtaccttaaaactcccctgcaaagtctcttgcaggaaaaatctgcatttggtgagaattcccatctccccttgttttccctccttccttcccagatccaggagataatcaactaagagccaggcacccttttaagtccaatataaaacaatttacaacctgctctctctaaagtctatctaagagcttcctctgcacaataaaacttggtctccacaatcctttatctctagcctgaacattcctttttatggatcccaggtctttagataacctcaaccagataacgtttacatttaccgattgagttgccccgcctttctaaactaaaccaatgtatttcttaaatgtatttgatgtctcacgccttcctaaaatagataaaaccaagctgtaccccaatttccttgggcacatgttctcaggacctcctgaggactgtcactggccatggtcacttgaatctggctcaaaataaatctcttcaaatatttttcagagtttgattcttttcatcaacccatatctatacctttttacaccaaaaacatgtctttgcaaaattacagttattgggaataaggcttttaacctaatctggggactatcaaatatactaataaatatttttcttaaaaaaattctttgtttaaactgccagattccaacttccagaaaaattccaacagaaatgcaaccgagggtctagaattactatcctaaatctccgaaaatgtacagggggtggcgggcggggcagggacggctctaggtgagcaggaaaaagcttggaactcagtcttccaatggcgaaagggaacgtgctcctgctgggcgggacggcggacggctggcggcggcgcggcctccaattctcgccaacgcgccccgcacccccgtgcactggcgggccctcccctcgggcgttgcctcccacccacgcccggcggcaccgcaccccgaggcgcttcacgtcacggagctgctaggagacgggcggggctccggttccgggtagaggcctgggacacggggaactgtaaggatgggaggaaggccgcgcaggggcaccagttctgccgccgcggcctagcgccc

SEQ ID NO: 3582 - DNA, 2300 bp, Homo sapien
cagcctgggtaacagagtgagaccttgtctcaaaaaacaaacaacctcaactggaacatttttctgtgagtataaaagagaatatcattgtctttggagacacatgctacaacttactcctaaatggttcagaaaaaaatatatatctatagtatacatattttatatatataatctctcctacacactaatatagcaaatatagcaaactgtgaacttatgtgaagggtatacaggagttcattaattctgaaactttttgataaggttgattttttcaaaataagtcaaaaaatttttttatttgaaaacacactataaacagggagaagatatctgcaacacctacaattaacaaaagaatgtttcattatatatacatatatacattatatatacatttatatatgtacacacacacacatccttagaagaggaagagaaaacatgaatgaataacatatttcaaagtgctcagccttatcagtaattacggaatgcaaattaagacaaaaacatggtatttattctgggtagactagcaaaaagtaagaagtgtgaaaataacgaggatttagagagaattgtggtcggtactggtggcagtatagattggtacaaccactttgaaaacatttctgctttatctttgaaagctgaacagcccccatagcctctgatgccgcagtgctaatcctaggttcaaattagagtccagcgcatgcacagaaggtgaacaagaatgctcctactagccttattagtaattactaggggcagattcaggttttatggggtatgagcttatataattggaaaagaggaggcttttaaagaaaaagattcagaatgatgaatacaaattaggttcaaaagtgactaatttttataatggcaaaagaaattacaacaattagaaatgtcacaaaacccaggaaaagagttctgttataggtatgtgacctacgaacttgggaagtctgatacatttagtctgtgtggttcccatcaataaagaaaatacttaaagtgcatttataatcctatccgctacagtattgaatacattcctgacaggagaaaacttccttttgactaggcagtaagaaataaatgttctgttactacacgtaacaacttggatgaaccaaaaaaacaaatgttgagtgataaaaagcgaattccaggctatatgtatttttataaagctcaaaaagaagaaaaatacaccaatacacaggaatgcatccaaatatgataaaaccactaaaaatggcaaagagggacaaaactgaagatagtggtggtgagctaagaggccaggagtagaatcctggagatgcatagatacatgctaaatactgataacgtggtggagtgatagtttcattagcatactttaaattttacatatttggtaaatatgctcttttgaatgcatcgactattacactgaaaatatttttaaatacttaaggcacctgaatataagctggcttccctccttcctctcccgtgctgtctcctctcccccatcacttctcaactacaagctgcttgggacacgtggctccagaggttggcaaaacagggaaatgtcagcccacaaggaacaagaaccgtgacttgtgttattttcttgttggtgttggggtggggggaggggtgcggtggtgcaggaaatattatccagcttatcatatatgccacatcaagctgactccgtttaaattttgagtggctctactagctaaagccagaaaagggtttttgggcccaacgggcagaagtgcccctcccttttacactcacacttcccactttctaagggtgccaggcccccgcgccgccctcctgcttctttccggacggtccaactcttttccaccagtcccagcccattcgattacgtaaattcttccaagaggattcccaaacgtgcccctccgtccagaactcgcccagcccggaccagttccgagatttaccaccagcccagagctgggcgggggcgtggaaaacgcgaggagccttcccgcccctctccttctccctccctccctcccaagccactgccggctcccagccgagctccgcccccgcggtggccccgcctccccgccgcccggaaagcgggctgcggccccctcccaaaacccggggaagtggattctactctacgctccgctccgctccgctccgcaccaccaaccccgggccgcagtcctgacgagcgggtcagggcttgtcgggcggaagcctggcctggagcctggaagggggagacggcccgagcggga

SEQ ID NO: 3583 - DNA, 2300 bp, Homo sapien
gtaatcccagcgctttggaaggctgaggttggcggatcacctgaggtcaggagttcgagagcagcctggtcaacatggtgaaaccccatctctactaaatacacaaaaaatcagctgggcgtggtggtgcgcgcctgtagtcccagctactcaggaggctgaggcaggagaatcgcttgagccctaaaggtggagattgcactgagctgagatcttgccaccactctccagcctgggcgacttaacaagactccgtctcaataataataataataacaacaacaatcacttaaaaataaaattagataatgtattaaaatgagacgtgaggagctagtgatttaagtaagctcagtatgtgttaactttgataatattcacatgtagtccattaattgagcaattatactatggggctgggcaccgtatagctgctggagatataccctgtcatcatgtcatcaatgggaaaaaccgacaagtaactgattattgccacacgatgtgacagatgctacgacagaaataagaacagggtgctccgggaacaacaggggaggcacctgtgtgacagccctgactggaaagttgtcagcagctgtcagggaaggcttcatggaggaagtgactactgtggagtttgaaggtgcagtaggagtaagctgggtggacagaggaaccaccctgagcaaggaggtagagatctgagaaggcatgctcattgaagaaaatagagagcagttctgacaaaatgaagctataaaggcctgtagatgccagatcacaaagggcattagcttgttttgtgaaagaatttatgctcttttctgagagaatggggaggcattgttggacgtgtgccctctcagagataaaatttaagtggagagcactgagttaagaaaatatctcgatatcatgaaattaacacaggtttggagcccccacagatcctcaatcctggttaagttccatgtatgacctaatcaactccacctctctttcgtggacaatcagcaatgacatctacctctcaggattattgcgagggctaaatgagatagtgcaggtcaagttcgctgcaaagtgtgtgtcacataatgaacattttaagtaaatatcaactcttttcgatgaagcactgtgtaagtagaatacgaaagctattgccaggcctctccctcctccctcccttccttttcctctctcagcagtgcaggcagcagcagccaaaagccagggacgtggaggatgtccactgaagcgagtactccagagcgatgattaaaaggcagccgccccgaatcccgggcgcgggcggggagcgaggctgggcatgctcagtgggccggagacgggagggaagcggggagggggcgggggcgggggcgggggttggggggggtgggtcggagccgcgcgaaggcgcatgctcagtctccgcatctgctccttcatccagtgccgcagccggaaaaccgcagcggcggcggcggcggctgagggggaacgatccagcgagctgcagaaaggggggcaggaaaaaattacaaggacattactgataagacaggaactgagagcttgggattcgcggcctctccccggccaccaccttcgccgtcagcaagggaggaagacccgggagacggcagcggcgacggcggcaggggaaggaggagacggcgacgggagggagcacagaggaggggacgggccggcggcggcctgtgagccgcagtgattttgacgttttccgctgctgcgtctccggcgggcaggggccgggctgcgctgggtgggccagctcgccccgcgcttccccctcgtcctgctcgtccctccgcccacccggggcctgaggggtctccccgctccgagggaaggggagagggaggcgagggcgtgcgggcatcgcgatggcggggacattttccacaacgtgattgttgaaggctccccccatcccccctcccttaaaattccgggcccttccagcctccaccctcccccaagcccgtgtgactaaaccgagacaaaggggaggcggcctcgctcacacgcgggctcgcggggcgggtggctcggaggggcgcgggcacggggcggacctcgcgcggacggacggacggagacggcgccgccacattcctatgcccgggagcggcggcggcggcggcggcggctcccgcgggaggcggcaggcgcgcggcgcggacagctgagcttctcctccgtcggcgcccgggcggacatcgcccgggccccgatggtttgagcttgcttctccctccctcccg

SEQ ID NO: 3584 - DNA, 2300 bp, Homo sapien
atcaatattaaataccagattgttccaaaacgtcagtcttaatgtgacactgtcctgtaaaactgtcagcacctccttgttagctaatatacaaagtcctcgtgtttaaaagatgaatatttctttcaagtcctcatcacgaacctctcccattccagctttgcctcttactgctttcccacatgaactcttctctccacccagattgttcaatttggtgtctcttcacatcttttttccctactctttctctcctccctctccttacgtttagaaaggctcttttttttctgactaaaattctgccgattcctgctattctattttttttttttttttgagatagagtttcactcttgttgcccaagctggagtgcaatggcgcgatctcactctctgcaacctctgcctcctaggttcaagcaattctactgtctcaacctcccaagtagctgggattacaggcacctgtcaccatgcctagctaattttgtgtttttagtagagaggggtttcatcatattggtcaggcaggtctggaactcctgacctcaggtgatctgcccacttcgacctcccaaagtgctgggattacgggcgtgagccaccgcgcccagctgcagatttttcgaagtaccagttttggttagtattgtggcattattgagcttatattaaagctgcctattcaggaaacagctaagatcagtgatgggatggctggcttcagaacctcactttctagagagaaggcaggtgagggactggctaggtctcaggacagagctatcaggttctataattgcagctccatgttaacctctaactcagaagccctacctctgggggacatacctcatccttgtcctgcttcgatgagaggtatagagcccaggtaagaaatggagaggaggaggaagagatacagggtagaataggcaagaaaacttgtaaaacaatgagaagtattttgtttctctcgtttgttttggtaattttgctgctgtcaaatacaaatgcctttgcttaagttgatttgggagcagacattgggagagtgggagtggacattggaagagtaggacttggcattcttaaagggtagtggctagcaggaaagagaaacttcggaggagattttggttttcttcccatctcccatttctaaactactacttatgttttagtcgaacttgtcagttgggtgcccaggaagtctttttcaggtaggatggggagtggtcagtggtaatgtggcaatatcagtggtttactagtgtaagggatttttaagagtagttctctcctaaacaattgctataattctttttcagtagtgtcagcaagctaagcatgaagggagagacggcagaggtcttgaggcaaagagatagaataagttaggcagtctctattctgcagctcattagctgtaaaactgggcagatgattttgtattctcaggtggcaaggactagcagtctcctgaaatacctattgtgcatttccatgttgacagcttgcctgtgaggagcgtcattgaaattagtttttaggaatcttatagttcattctgtagatttgactatgaatgtgggaatactttcccaagagccactagactcagaaagcttttctccttgtcttgtagtccctttttggaatatactcagaaagtatcttctgtaaaggaaatttgtatctttgtctcattccagagtatatgtcaaagtttaatgaatcatcttttcagttaaagggttattgctatatttttagagggaatcttaaattctatgacataaataataattattaattaaattctatgtttcttttataaaaatcttgtaagagaattttttccattaatctttatagaaaatgtgccagaggaacttcaagaaccattttacacagatcagtatgaccaggaacacatcaaaccacctgttgttaatttgcttctatcggctgaactatactgtcgtgctgggagtctcattctcaagagtgatgctgcaaaaccccttttgggccatgatgctgtaatccaggctttagcacagaaaggtctttatgtcactgaccaggaaaaattggtaactgaacgagatctccacaagaaacccatacagatggtgagtctttatatacccaagattattttaagtttgaagtgtgtacttttgagtgtgaatgatatactgtaaaacagagggaaatgttttgaaattggattgtatttttgcctagagtttacaactcatctttttcttaaccttgtttccaaatgaagg

SEQ ID NO: 3585 - DNA, 2300 bp, Homo sapien
aaatgtatttcagcagctcctataagcagctttttatttgaatctattagaacctacaatttatattgactttggactccctaatctatctgattttttacgttaaaactaatgtcttttgtgggtttttggaaattcagacacattaaaaatacatttcaaaaattatgagtaaaacattcaaagtaatttctgtatgaattcttggcttaacacaaaaatatgaaatttagcaggcatggtgggtcaatagtgacatttccttccttgaagatttagaaaacactcagtgttctaggtcatcactcttgctctattaaatctttaaattccactttcaaagtggaggaaagtaaagctttccactcaaagattagattattccataattattctaggaacctaaatggacagtctcccacatttctgaaaaatgttttaattcatgtcctctggaaaactcatctcttttctgtctctcagacatctcagcagctcatttttcctatttttcccagcagaaactctttttataatgcagatggatgtctacattcttttccttgaaaagttattgtgtagccattattctaggctattctgagttcctagtcatcctctcatttctataagtctccatatggtccattgtagttctccaacactgtggaacttttgagaaagaattgaagtatttttacccttcctgggaataatgtagccacatctcaaatgttagtgaacctaaataatgattttatgagaaagaaaaaaacaaaggacgaagacagacaaagcaaaagatgttttcagcagctactccacacacttggctaccagctgttggagatatacaaacaggtccgtgagcagagaggctgtcaaggtattttactagggtttattatacctatagtttttagagattagatttgaccaaagtatttcaaattggtgagtttcattttacttttttatatatcagtttttatgtttataaaaatgaaaataattcatatctcacaaagacattgagatgtatatgaaagtacttcaagttgtttggctaaaagacataaaatatatatagatacatactgtaatcacagccattctttggtttaaacaatatgtttccatatttttaaaatttaggttgtagaatgagaggtggtagtgttgtttctaacttaagacattctacctaaatttatattaaacagctaaaatataacattttaaatttattttccattgcagtggggaaggagctacatttacacagtctcatcatcatttgccttctaggtattcacgtccccaggctcattcttcagcctcaggtaatatatttgaaaaagcctaggaaaatactcttttaagtaggttacctgggaaatgattgacagtaaatataaataaacaaatatccagggtttttttgtgtgtgtgtgtgtgtgtttttttgtttgtttgtttgttttctgaaaaatggctattataacacactaaaagcatggtcagtttcactgtggttgcttttcttgataaaattatctctaattctccttatgtacctatttaatttgtattgctattaatgaatcctcaaatacatgaaatctcctaagttgctataagttaatttttttacatgatttcaatggctttttcttttttgcatttgaaggaggaattagaaggtcttcatctatgtcttatgttgatggcttcatagggacatggcccaaagagaaaaggtaaacaaagagaattacttttagtgtattcagattattaagaaatgcaaattgcatctgtgtctctcttttattgataaccaaattgctaaaacttttaattagttcctaaatttgaaaaaggcagtataggcagatgatagagatgtaaaagaggctaactttaaaaagtagctagatagccctccccttaccttgaagacagtatgattatgagaactggggaaagaaaggaaatgtaatttcaaataattcttgttaaatgatactaaaaatcatttctaggatttttaaaggatttttctctttaacttttttttagatcatcagtgcatggcgtatcatttgatatttcttttgataaagaagatagtgtacagagatccactccaaaccgaggaatcactcgttctattagtaatgaaggacttactctgaacaacagtcatgtatctaaacacattaggaaaaatttgtccttcaagccaataaatggagaagaggaagcagagagcattgaagaagaacttaatatagatt

SEQ ID NO: 3586 - DNA, 2300 bp, Homo sapien
aaagaaaggaaatgtaatttcaaataattcttgttaaatgatactaaaaatcatttctaggatttttaaaggatttttctctttaacttttttttagatcatcagtgcatggcgtatcatttgatatttcttttgataaagaagatagtgtacagagatccactccaaaccgaggaatcactcgttctattagtaatgaaggacttactctgaacaacagtcatgtatctaaacacattaggaaaaatttgtccttcaagccaataaatggagaagaggaagcagagagcattgaagaagaacttaatatagattctcacagtgacctcaaatcttgtgtgccccttaacacaaatgaactaaattctaatgagaatattcattacaagcttccaaatggagctttacaaaatagaatacttcttgacgagtttggcaatcagatcgagacaccaagcattgaagaagcattacaaataattcatgatactgaaaaatctcctcatacacctcagccagaccaaattgctaatggcttctttcttcatagtcaagaaatgagtatcttaaattcaaatatcaagttaaatcaatctagtcctgataatgtaactgatacgaaaggtgccttgagtcccataactgacaatactgaagtagacactggaattcacgttccttcagaagatattcctgaaactatggacgaagattcttcgttgagagattatactgtaagcttggactctgacatggatgatgcatctaaatttcttcaggattatgatattcgaactggcaacaccagggaagctttgagtccttgtccaagtactgtaagtaccaagtctcagccaggcagcagtgcttcttctagttctggagttaaaatgaccagctttgctgaacaaaaattcaggaaactgaatcataccgatggaaaaagtagtggaagcagttctcaaaaaactacaccagaaggctctgaacttaatattcctcatgtggttgcttgggcacaaattccagaagaaacagggcttccacagggacgggacactacccagctgttggcctctgaaatggtgcatcttaggatgaaactagaagaaaagaggcgtgctatagaagcccagaaaaagaaaatggaagctgcttttaccaaacagagacagaaaatgggaaggacagcattccttactgtagtgaaaaagaaaggggatgggatatctcctctacgagaggaagcggcgggtgcagaagatgagaaagtatatactgatcgagcaaaagaaaaggaatcacaaaaaactgatggacaaaggagcaagtcactggcagatataaaagagagcatggagaatcctcaagccaaatggctaaagtctccaactacacctattgatcctgagaagcagtggaacctggcaagcccctcagaagaaactttaaatgaaggagagattttagaatataccaaatccattgaaaagttaaattcatccctgcattttctacaacaagaaatgcaacgcttgtcacttcagcaggagatgttaatgcagatgagagagcaacaatcttgggtgatttcacctccacaaccctctccacagaaacagattcgagattttaagccttctaagcaggcaggcctgtcatcagccattgcaccattctcctcagactcccctcgtcctactcacccatctccacagtcttctaacaggaaaagtgcatctttttctgttaaaagtcaaaggactcctaggccaaatgagttaaaaataacacctttgaatcgaaccttgacacctcctcggtctgtggatagccttcctcggttaaggaggttttcaccaagtcaagttcctattcaaactaggtcatttgtatgttttggggatgatggagaacctcagttaaaggaatccaaacctaaagaggaagttaaaaaggaggaattggaatccaaagggactttggaacagcgtggacataatccagaagaaaaggaaatcaaaccttttgagtcaacagtctctgaagtcctatcactgcctgtcacagagactgtatgtctgacaccaaatgaggaccaattgaatcaacccacagaaccccctcctaaacccgttttcccacccactgctccaaaaaatgttaatctgattgaagtttccctctcagatttgaaaccccctgaaaaggctgatgtacctgttgaaaaatatgatggagaaagtgataaagaacaatttgatgatgaccagaaagtatgctgtggattcttttttaag

SEQ ID NO: 3587 - DNA, 2300 bp, Homo sapien
gatctccctggagcaagaatgaatcctgccagcaggttgcttcgaacttgaactccagctcttccctggatctccagcctgagagtctatcctgcagattctggatatgccagctttcacaatccaatgagccagttccttaaaatcaatcaatctctctcttgcattctctctctctagatatagctatctatacatacacatcttactggttctgtttctcagagagtgctgattaattcaagtagcttctcttcaacttcagtataaaaatcttaaatcctcacctagcccacaaggctcttagtcatcttacctcatataatgcctttgtacaaattagaaaaagccaccctctctaggcagatacagctctgaccaaacatagggcgaggtgggtggagaatggtgaaccttccctcttagtatagtgcacaacctggacaaccacatggagttgccttacttttgtttgtttgtttgttgtgtgtgtgtgtttttaattgagacagagtctcgctctgtcacccaggctggagtgcaatggagtgatcttggctcactgcaacctctgctgcatgggttcaagtgattctcatgcctcagcctcctgagtaactgggactacaggctcccagcaccatgctcgctaattttttttgtattttaagtagagatggggttttgccatgttgcccaggccattcttgaactcccgacctcaggcgatccgtccgtattggcctccgaaagtgctgggattacaagcgtgagccaccgcgcctggccgttcgttgtgggttttttgttgttgttgttgttttgagacaaggtcttgccctgtctcccaggccggagtgtagtctcgggatattggctcactgcaacctccgcctccctgctcaagtgatcttcccacctcagcctcccaagtagctgggactacaggtgcgtgccaccactcctggccaatttctttattttttggtagagacaggttttcacaatgttgcccaggctgatctccaactcctgacctcagtcgatcctctggcctgggcctcccaaagtgctgggattataggcgtgagcctctgcgtctggctgccctgcttctggatgagccactgactgacgaattagcctcgtctctcttccatgttctttccctttactccttcctcatcccaaaccctaacctccctgcagctcctggaacctgctgtgctcccttgctgctgtgcttttgtacacctgtcactgctgtttcaagtccctctcttattttctggtattgcttcctctggccaagttttgccgaggctcagcctgggtcagccttccctcttcttgcccggggtcctagcccttacttcaggtactgtgctgcttcatcactcgtctagattggagaatcctccagtgaatggggcttgagctttgatccatcgtgctgggcactagtaggtgctcaataaatgtttattgaacaactgaaaaccgggaagtgaatgaatggatgaacggggacacagcagctcgcagcgggcagcaggaggcgctcgccgggagggtgctccttcccttcagccagccggagttcagccagcgggcccggcgggaggagtgggagtgggccggggccagggccggggagaggggccatccccgcgcgacccgcagcgccgcacagcgagggggagggcgcctgcggggaggacagggtcgggggagcgcccttccgcaggctcctttcattcttccacttaggggtctccaggaatgaaaactggccccagccaggccagagcgcgcgaatgaaaggcggcactgggaccaagagagaagcttcgtcccgcctgggctgcggaaactggcggcgccaggggtgtcccaccgcgcgggcgtccgaaagcggggcaaaggggacagcctcgcccctcgagcggctgctcccgcagctcgctcacccctgcgggtacgtcgtcactcccgcgtgcggccccgtcccgactcttggatcggactcttcagtcccttcttgcgtcttcccctctttcctctgggccttggtatgccccaggggacagatgtcttgggatctttaacatttgggatgctgcaaatgccgaagttaaatgaaatacctccggggagggcaggccgcagggaggctcggggggagggaagatggcctggacaaacaggtcctgaagctgcgaggctggagtggagggcgcaggggcaggcgggcggcgccagagctccatgggacaggtaagcgggaaaacttcggggca

SEQ ID NO: 3588 - DNA, 2300 bp, Homo sapien
cagcctctctcccctcccaagacccatcgtcaccgcggggcctgggtcccagccggcagcagagagctggtcgcccaccaccccaagctactgctgccgcctggctatttcccggcggggcggtacgtggtggtggctgagagccccctgccgcctggcgagtgggagctgcgccgcgcagccccgggccctgcttacgaggaggagggcactcccctgcgctaccagcgtctggtgccctcccgcagccgcatcgtgcggacgccctccctgaaggacagcccggcaggccgggggctcagcaaggccgccgtgtccgaggagctcaagtggtggcacgagcgtgcacgcctccggagcacccgcccccactcactggaccgccaaggagctttccgggtcaggagcctgccccttgggagagagggcttcggacgagccctgggaccccgggcacaggtacggctgctctggagggaccccggggccaggcaggagggctgttttgttggggaggggctgcaattctagtatgtccaagggtacagaggcatcaaagcagcaacctagtggccgggtaatccccgtctaggaagaacaggccaaaaaatcatttcctcttggctttggaaggcactcttggcttccctggggcacctcctaattttgcctgccatgtctagctcaagagcatatacactggtggagatgatccccgaagatagctgagactttttctctccctaaatgatgatgcacaaagcagataagcctcttcataatcaaaagtccagtccaaatcagcccctcagatttccatttgaaggtctaggacaaagggagagtaggaaatgagttgcagaagccagaacctgtgattttctgggcatcagcatcctccctgacacccctcctcaccaccaagccgagaagaagggtggcatcagagttaagagcacccaccctcaagctagaccaccaggttcaaatcccagttctgccacttacgagctgtatgattgggcaagttacttaacccctttggacctagtgtttcctcccctgtgaaatgagagtagtagagtacctatctcatagggctgccaagaggctgaaatgattagagcaatgcatggtaagcgctagatatgtgatattattatcatctggggccacagaggccagggagcaggctggagggtagtatataggatagagcaccctgacactgggtagggtggcagccttggtttccttggcccctatttcttcattctggaagtggggagccacacacaggaatcctttctttattctttctccctggtacggagggctctgcaggtgatgtgctccagaagttaccaacaagctgcttctttgagaccccagattcccagcagacccagctgcgtgtccctcccccacccacggttctttggactgcagctggcatcctgggcctggcagcaccctggccccggtccgaggccgcgccctccagctgacgtgcttttccctttctgcgcgcttgggcctgtccttggctggatagacccagcccatcccaacgtgccagacagggagggtgatgagaagtgagcccaggaaaggtgggggaggaggaggtcagggcgcctgtcacaccccaaaagaacatggaggaaaatgtgtaaagggggtccctgaagaacagagagcatcctgggaggaaggggctgagtgccagggcctgctgctgctgctgcttctgctggtcagtgtccctaagggataaggatggtgtaactgtgcctgctgtccccgcttttctgcctggttcatttacccacctgtcctttcttcctgaccctggcaggtgcccacagtttgtgtgctgcggagatcgcctgatggggcccctgtgcaagtctttgtacctgaaaaaggagagatcatcagccaggtgtaactctgcgccccacgctggaaaaaactgtttcatagaggggctgggctgagacccccccacccctgagtgcctctttcagctcccccatccccatcgcaggccgatgacctggagctgagaccttttattattttttttttacacgacttttttcagaagccctgacctaaggatttatatatgtggattgtcctcaatacccctgtgatatgattatgttttatcccccagagtttggcctactggacttaaggccttgcctgtctgactgacagcctctatctccttatataagacaagtggcaggggacgagtgaagcagagtgagccaccttgggagttctccaac

SEQ ID NO: 3589 - DNA, 2300 bp, Homo sapien
tgaccccgctggtccaaaaggagtgtgtatgtgtacacatggctctctgcttggaagatgctagcctcagaggcagttaccagcagaagggtttactgggatcagggtgcatgggggtgatggcctgagcaaccctccctctcagcacccctccctcacactcggttaactgaagcagcatgcagcttctggtggaagctacagggcccagttccagcccctgggcctctgccctgcccagctggacccgggcgcattcacatctcaggatctgggtcagacattgtcagataggaactctctgtggacagagcccacacctcctgcaccttctagctgtgcctaacaccgggtttgcttccccagaagtgctcaggatggcaactgatgattgctgattaagacaggctatctccactctgtgtagcccgttcccggctctcagaccttggtggaatttggctggagtccttaaagtctctgttatttggtcctcatcccctccctgccctgtccccatcccacacacgtgccttgatcagcctggccacagtctccctggctgacgagcatgccttctctccctctctcccgggaaggggcatcatctccccggttggaggagccaagggtgcacggacggccccactgcagtgtgtctccatggccgaaggccacaccaagcccatcctctgcctggatgccacagatgagttgctattcacagggtccaaaggtatgtggaacgccaactagccaggtagggttggggtctcctactcacccctgcttcctttgtcagagtggtctgtgaaggagaaaagaacatagagcccccaggagttgaggatatggggtctatttgcttactacccttgtttcttaccttggctcaaggcccccatcccatgcatccttggccaagccttccctcatacctgacctggtggctccatccagcacttccttccagaccttccagggaaacttcaggaagcttcttgggtgccccacctgtacttgcactgcccaacatcaccccagctcatacatctaggcactccctatgatctcagcagcagcactttacaaagtcacgctcacctgattacagcaacaaagtcaaacattttaccagcagataggctgggcacagtggctcatacctgtaattgcagcactttggaagcatgaggcaagagaattgcttaagcccaggagtttgagactacctgcgtgggcaaatagtgagatcctgtctctacaaaaaataaaaaattagtcacaatgacatgtgcctgtagccccagctactcaggaggctgaggtgggaggatcgtttgagtccgggaggtcaaggctgcagtgagctgtgtttgtgcaattacactccagcctgggcaacagagcaagaccctatctcaataagcaaatacaaaattctttatttactctttcattcattcattttaccgacagaaagaactagtctgtaatagacacgcatactataacacaagcataaatatagctctccacggcagtagggggatagctgtcaatctaggtgtgattgattgattccaagttttcccataacatttgcttgcactggttcatttgctttgtcagcaattagtgtttggaggaacaggcaccataaaagcttaagaattttattttagccctggacaccttagcagtatggctcacaaaactctggtgttagtggaaagtttgcttgaggaaccctggtctgaagttctgagggaattctctcttccctgagttttttactagcacacacatgccagtgagcacatgtgtatgtgtttttttcctcttcagacctggagctccgtcctctggagccctgtggatccctttcccctatcctgggcagcccctgcagaggtggagctgcgccccctagtggctgacatccctcccctccctgtggcttcctcccatctctcacagaccgaagctgcaagatgtggaacttggttacgggacaggagatcgcagctctaaagggccaccccaacaacgtggtctccatcaagtactgcagccactcggggcttgtgttctccgtgtccacctcctacatcaaggtgtgggacatccgggactcagccaagtgcattcggactctcacgtgagtaacccccgcctgcctcacagtggtcggctgcagcaggctgtgttgggtacagatgctcccagcccaagtgacccactcagcacagcacagcccggctacatgggcacagagaccattaccagcctatgaactt

SEQ ID NO: 3590 - DNA, 2300 bp, Homo sapien
ggagccatccctggggctgcaggaagagctgactgggaggcgatgatttgttttcggaatatggccatccattactagttttatgactttaagtccttttgtctctctgaggctcatttccttgtttgtaaaacaggaacgataatgcctctctcatgattgtcatgaggagggtgcctggcatacagctgggtctcagtaaataatggtggtttttattgctgtcactgtgagcctggccatgagggccctgatcttcacctcagccctgtctgcagctcagccttcagcaggggagaggattacctgcctccagcaacccagactgtttctggaatggccagacacaggacagtggctgtgggtgagggccaccaggggctgtggcattccaagcagcaagggccacagttgggccctgcagagtggggcacctgcactgctgggctggctgtgaggccactccttttggcagcttgcccaggcggcttaagctcctatggaggagtgggaggtagaacccctcacttcagacccccaggccctgagccagtgttgcctggctagccactatccctgccccatgccctcagagctggcccctccctggagagtgtgggccacctgcctcccagccctgtctcaccaccataatctctgcccatcccaggtggccctgatgaagcagatgcgtgaggagcaacagcggcggcggctagtggagaccaagaggaaccgggagatcgcacagctcaagaaggagcagcggcgacaggaggtgaggggtggcccttgagcctcccaggagcctttggccctagcactcccagcctcctggtgcacctggctgcccctcctgaccaagcgggcctcagtctccactgtcctaagtggtaatggtcatgcttggaggacagtacagcctgtcagagcaagatgagaccctgtggcttctggtccagcccccacatgttaagaggagggacttgagccctggagaggggaaggaacttgcccaaggtgaccagcaagctggaaatgtgcagcttcaggccctgcagagaagccccagtagggctgagccctccgctccaggattcctcctcactggagggaagaagaggctaaggaaattgcccttgtggagaaagcagttttcactgcaacctctggggaggggagctcaaccctgggtcccactttatcaagagtttggctgcatgagaatcaccctgaagcccaggctttcaactacagggctagccagcctgtacacagacagagagggctaaggtgcctgagtgtggagcccagccctcttctgtctcccacagtttcagatccgagctctggagtcccagaagcggcagcaggagatggtcctgaggaggaagacccaggaggtgagctcactcgaggggctggcgaggccctggccctgctgcacatgtgtgcgtgcatgtgtgcattgcttgccttctcttttgggcctccaacttcctggcggtggaataaaggcggtatttcccagttctgccagagccggcagggaggggaagcaagccctgcctgtggccctggctctccctccttccattcagcaagcatatttggtgtccaaattgtgtccaacctattagaagggcctttctcaacaagagctcaggctgcagggcagactgcaggccagttcccaaatgcctgagctgtgcgttaaaaaaagaaggtggcagcctcttttgtgtgcatgtcacatcaaacagagaccccttggcccttttgcagcccaagcccaggccagcacagagcagcctctgtgttcctgctgcccggcaccccaacctgggcccttctgtgtggctccaggccaccctgctcaccggctccctcttttctccctgctgccccaggtttctgcactgaggcgcctggccaagcccatgtctgagcgggtggcagggcgtgcaggactaaagccacccatgctggactctggggctgaggtgtcggccagcactacctcatctgaggctgaatcaggggcccgctctgtctccagcatcgtgcgccagtggaaccgcaaaatcaaccacttcttgggggaccatcctgcgcccactgtcaatggcacccgtcctgcccggtaaggtggactggcagtcccctggcctgtgcaggcagagggggtgggaatatggggcagggccagggtgaggaagagggaagctctggggagtgctccgggtccccgtggctgtcagctccagatgggggctcagtggagctgcagaggttaaaag

SEQ ID NO: 3591 - DNA, 2300 bp, Homo sapien
tgtctgtgcgtgtgtctatgtgtctctgtgtgcgcgtctgtgtgtgtgtgtgtgtgcctgtctgtgtctgtgtgtgtgtatctctgtgtgtgtctctgtgtctatgtgtgtgtctgtgtgtgtgtctctgtgtttgtgtgtgggtgtctgtgtgtgtgtctgtgtgtctctgtgtgtgtatgtctgtgtctgtctctgtgtgtgtgtctatgtgtctctgtgtctgtgtgtgtgtatgtttgtgtgtctctgtgtccgtgtctgtgtatctctgtgtgtgtgggtgtctgcgtgtgtgtgtctgtgtgtctctgtctctgtgtgtgtgtgtgtgtctatgtgtctctgtgtctgtgtgtgtgtctgtgtgtctctgtgtccgtgtctgtgtatctctgtgtctgtgtgtgggtgtctgcgtgtgtgtgtctgtgtgtgtctgtctctgtgtgtgtgtgtctgtgtgtgtctgtctctgtgtgtgtgtgtgtctgtgtgtctctgtgtctgtgtgtgtgtctgtgtgtctctgtgtccgtgtctgtgtatctctgtgtctgtgtgtgggtgtctgcgtgtgtgtgtctgtgtgtgtctgtctctgtgtgtgtgtgtctgtgtgtgtctgtgtgtgtgtgtgtctatgtgtctctgtgtctgtgtgtgtgtgtgtctgtgtgtctctgtgtccgtgtctgtgtatctctgtgtctgtgagtgggtgtctgtgtgtgtgtgtctgtgtgtgtctgtctctgtgtgtgtgtgtctgtgtgtgtctgtctctgtgtgtgtgtgtctatgtgtctctgtgtctgtgtgtgtgtgtgtctgtgtgtctctgtgtctgtgtctgtgtatctctgtgtctttatgtgggtgtctctgtgtgtgtgtctgtgttcgtgtctgtgtctgtgtcctgctgcttgtgatctcaataagcttctctctcacatctctttgtttttgtcccttccctatcctgttgccatggagaagcccggaagagcaggttcctagaaaatcagttccatagggtgaaccacaagaggtcaaatgatagtgtgtgtctaccccaacacagacagacagacagatattgtaggcccccatctgcaccatcctttccatctcctcttccccattcatgtggggtatttctgtccctttagggctgtcaaagccccagatgtcagagggctgcagtctcccccttagtcccacagcattttcttggctgctgccctagctgcccccatcccttattccactccccagccctagttccctgcctgttgaacatcccagctcttcagcaggtgacactttccatgccagcagttccaaacacaggaatctccttggctgagaccacctgaaatggggtgactgctcctggccaggccccctccccacgatggtctcaccaggccctctccaggacactaggccacagtggcgtgctctccatgcccacccgctgccaagcatagggcaaggcacacaggcgtgttcctccccttcgagagcttgtcgtcacctcagagacagtcagggctagggcacagctcccctggtctccactgagctctgtctctgccctgcctcatctggaatcacatccccatctactctttccaagtccaggaatacgacaggatcttctcaaattgtggccacatcttccttatctcctacatctgggacccgtgtccctttgtcctcttttggtcctcagcccatgctgggaccgagctgctggctgctggttccttagggaatgaggaacagtgtgcagcctccagctagttctgcccagggcccagctgtctcctgcccctgtcctgcagaaaggtcatgggattcaaaacccagaggggacccacagcctcagtttccacatctgtaaaacagatatggtttataggcatgtggcagccacctggggccccagtgaatgccctatgaattcagctgtttccttcctgcacagctctacaacgaggagatccttgacctgtttgacagcacccgtgaccctgacacccgccaccgcaggtccaacatcaagatccacgaggacgcaaacggtggcatctacaccactggcgtcacttctcgcctcatccactcccaggaggaggtgagcctctgctggaggtctggagcaggtccagggcatcctgaaagggcaggggctggcaccacggtagtcccaagccctcacttctgcttctgtttccagctgatccagtgcctgaagcagggggccctgtcccgcaccacagccagcaccc

SEQ ID NO: 3592 - DNA, 2300 bp, Homo sapien
tctgctgcagatgccatatttacatttctcactcccaccccccagccatgcacccctccctcgacctccacaagatcctgctgcaatgtcagccccagcagcagcctggccccgccccagtcagcccaccaggcacctgcagggctcctctttgtctctggctgctcagggccaggaaagctgtgctcaagtgattcttgagtgctgcctagggtgcatgggtgggggtgcctcaatctccttcccttcacccaagcactgatcagtgtcagctcctctttgggctgcagaggcctggccaggtggccgtggcaaggggcatctgccctggggcaggaagaagaaagctttttcattgccatctctgactctgtctaggagcaacctcctaggacccctggaatctgggtcacatatgacccaagggatctagagacctgagagacctaccctagacctggacaatcccccgccccctccatcatacagggctggggcagagatagatgttcttgccacatccctaccttggtgagcagctccagattggcactctgccgccaagacacccctctcaaagagaaaaacccaaagcaaaaactgggagaagtggtgaggtgtgaagcatctccacccagcacaaagaacacagatggctcaatttcacagcatttcctgctcctgcacctttgtgtacccctcccaatagaacccacccagccatgtcctctccctgtctcatttctgccggctcaagtcccggagctgttgagaatggaaccccagataagtctaggcaaccctcccctgctcaattttatctgagtgcctgaggatggggcatctgcatcacaccctcctgccctctcagagagaagcacctcagatacacctcttcctcccttcctaggcccatctcctcttgggacaggactggtaggattctcccccaaagccattgacttcccacagaaggccaaggcatcatcccagcttttccgttggtccccgcacccgatctttgtctgcagatctggctcccagggtgggtgtgctgcctttgctagctggaccaagagcacataactagctgactcgcatggatgaggggaaatttccctctctggtatccccgtatgagacagcagcctcgtggggaggcgaagaggaaacgcacagacgctccggcctgggccagagctgggtgtgaaataccggatttccttgtttattcgattttctgatcattaagggctcccaagaggggcccaaaattaccacccaaacaaagccaccttccagtagtcggcggggtcgccgctcccctgcggcagactggccagcgcgcggcgccctccatcccgtcccacgccggcccctcctccgggagtgcaggctccagcccaagcggtgctcgcgccccccgcccaaagcccacgcgagacaaagcccgaggcttctccgcgcgcccccttccccgccccgggtccctacctgacggccaccttgacgcagcagtccccctggccggccatggccctctggagctagggtctgggcgtggatcagaggcgggggtctgggggccaatgcccgaggcagcggctgcggctgcgggaggcgggggcgcgggcgcggctggcggaggctgcggcggcggcggctggaggtgacatgctcgcgggcggcaggccgaggggctcacccgcggccggccccccggggctgggcccgcgcgcctcctcgcgccatcgggcggcggcgcggagctagctgacagccggcggcgcgacccgccgctccctacggcgcggcacacgcgcacacacctcccacccggcagccacctcccgccgcagcgcgaacaaagggggcgggggccgatccggccccgagcccgccccgagccagccccgagcccaggccgggccccgccccgcccaggagccgccaatcgaaagccctaatgagcagtgggggcgggactcgcgcctttaaagggacctcttggctcgcggccacggggtggctgggggtagggggcgggattgaagggtgggggtgggggtaggggtgggagtaggggtgggggcgctggacgcagaccacgttagaacctcggctcctggagtagcagaacctcggcttcaatgggaccctcatttcataaatgaagaaactgagattcaaagaggggaactaccgaaggttacagagcgagttcgtgggtaagcatggtaagaaccctggtctcccggggatcccacagcgattgacggtttatagttcaaaagagccag

SEQ ID NO: 3593 - DNA, 2300 bp, Homo sapien
cgcgatgcgccgcaggacggtgactgtaggaggtccgcggcgctcccgtgtctgcgacaccctccctcctccaccagcttggggcggaagtgcagggcagcgggtacgatgggcacgatagagacctaggagctccgtgggtgaagcgaggggcagggcctgggactgctccgggcgtcctgcgtcccctccggggtgcagaggggctccccaggacggtcatccctgggtctggctcccgctcggcctcaggtggctctgctccgtccttccttgccgcaggcgcagtccagtctctgcgagtccccgggatgcgagcccgactttgagccctcggttaccatgccactgctctccaccagatggcctcagatactagcgacttctttgggagcacgcttactcctcgagaaaggaacccagaggaagggatgggaggccagattgctgctggcgctcagcccagaccgaacctacagactcagcagaggcgacctgtgtgccccggtggcgttctctggcttcctgggttgggagggggggttactccctccccgcatcccccccatgaggtcgtctagttttgtcccaggttgggtggggactgtggtttttttccctcagactgtaagccttgggggaggggggcgtgcatataggtacataggcactgcgtcggcaccaaagagctaaataaaaggattgttgaattttctcattcctagatcattgtctaccctcacccttcctggtgcccctttcttattctcactcccagcccagagtacttgctgggaggatatgtggggttcgctgttagctcagcacatttaagattcagtgttgttagctcaggcgttcaatgaatttttttttttttttttttttttttgagacaggttttgctctgttgcccagactggagtgcagtgattcaatccctgctcactgcaacctccttctcctgggtttgagcaattctcctgcctcagcctccagagtagctgggattataggtgcacaccaccacgcccgctaatctttggtatttttagtagaatgcgggtttcaccatgttggccatgctggtctcgaattcctcacctcaagttatctacctaccttggtttcccaaagtgctgggattaccgtggctatcctcaatgaacttttctttttgagacaaggtctcactctgtctcactctgtcatccaggctggagtgcagtggccagatcttggctcattgcagcctcaacctcccaggctcaactgatcctcccaccttggcccccctagtagctgggactacaaacacacaccaccataccctgctaatttttgtattttttgtagagacagagtttcactacgttgccccgactggtcttgaagtcctgagctcaagccattctcccacctcagcctcccaaagtgttgggattacaggcgtgagccaccatgcctggcctcagtgaacatttacagggagcatagtacatagggggactgtgcagagaaggggccagagtcccagagataatgcacacaacctttacacctgtagggatgggaggagatggggaagaaagatacacagcagatgctccacagtgaggcaggtgctatgccagaggtgtgcacactcagggttgttctgggagccttctagcccactggagaggggtttactgtttctctgacatgggattgcttgtgggggtgggttgagggtatgcttggggagttttggctgatggtgcagatactgagatgggtaggggctgctgtggagctgtcctgacttaggctgcccagtgccttctccagacaatgtcatggggctgaggaggggtaagcctaattttggcatgagggggccactctgcagtttgaggttccatatccaaggctacctattcctgacctctgttgccccaggcttgaaaccttccatcctgtctccctctcccactgcccctgccccatcccaggcctgtgtgtaagttcttcccccgacccaccccaccctcctcaggggacagattgggaagtcactggctgggctgggtggaatgacagctgcctggcctcagaagctcaggcccggcagcggggagccgagtggaggctaattttacttgctgggagcgaggagagtaatcctcctgcccccactcctgcccccgccccctggctggctcagcagggcaggctcagccgacagcctcagccagcctagtccccaaggcgggggcattggggacacagggaagggaaagcactggggtgggggagca

SEQ ID NO: 3594 - DNA, 2300 bp, Homo sapien
aactggagtgaggtgggttgggacccctggcagagcaattgagttagcattggccctaggggctctgtggaggcactgaccgggcctaagctggggaatgacatgaccagagttgcattctggaaaaccacttggctgccgtgggaaggtagtatgtgttagaaaggccaaactcgaggcaggagggcagcgcggaggctggtgcggttgtccgaggaagataggatgagggcctcagctaagacacagcagtgggagagaataaaggagatggattctaggaatttttagggaagtaaaatcactggcctttggtgattttacttagatgagaggaaggcagtgtcaaagatgatttccagggtttgacccggacagtgaagtggacggtagaagtgttctctctgccattgcaaatggggagccagtttgcaggagtagggagttgagggcaaagggtgtgcaggggcgggtgtagagttcatggtctctatgggacatgcacatagtgactcctgtagctcatagaggagagcggccctggctggagattctgatctaagatccgtcagcttctgagttgaacctttgggacagatgagcacatgccgggagaacatagcatgagatgaggaaggcggctgggggtagaaccctgggaacgttgatggttttggagccagccctgtaggcagtttggagagctggttttgatgtgtaaggggcatgggctgtgaggctgtgggttaggaagggtttctgccagcctaatcctttataagcccttggccctctctgggagcacccttcacctttgcctagcccctacctctcagctcccctggctacctgcttctctggtcttgaggctctaagacgtggtggccctgcctcgacagccctgtctctctctgttgtagcaactgcctgcacgtggtggagcccatgccagtgcctggccatgacgtggaggcctactgcctgctgtgcgagtgcaggtacgaggagcgcagcaccaccaccatcaaggtaacgccagggtctcaggaagccagtgggattcccacacgccattctccaatcgcagactggcctacacccacagtttttcactttattctggaatgtcccaatggctatgagactggcttctaggctggcctagtgcagacactgggacccacatcccacaccttcctggagccagctcccttctctgctctctttccagtagttaccattacagtgagaggggagagccctgggagagctgctggagactcctttttccctgcattctttacagtttatttcgttcctctcccttcttctattcatccagtaaatctcttttcggtgcctgctatattctgggcaagatgctgccaatggggaggttgggctgccctcctggagcttagtctaattaagcttccaaagtgactaagctcctctaaaaagcatcagagctgtggactagggctgggtgttgggtgctgggagaacatcagattggttcttttgtgttttcctgaaccaccttctcattgatcatttgggtgaattcaggaaagagatgatagacacagtcaccaccatagacgtcacgaggtgtctgttcattcctgcaccaggcagaacttcccgtgtcttctagaggctgtgaagccgccctagcagagaccgtcatgacccccagccccccagtgcggcttcctagtccaggttctaacaatcctgggccaggcacctggcacacacagtactcactgattacatagccatttctttttttgtttgttttttagagactgggtctgactctgttgcctatgctgtagtccagtggcacgatcacagctcactgcagctctgacctcccaggcccatgcaaccctcccacctcagcctcctgattagctaggaccacaggtgcacatcaccacacccagctaattttttaaatttttggtagagacagggtctcactgtcttgcccaggcttgtctcgaactcctggcctcaagcactgctccagccttggcttcccgaagtgctgggattataggtgtgagctccatgcctggcctaatgtagccctttctgttccagtttgtagcatttttctgcttgtcctttgaagagtctataaatagcattggaaaataattctcatatttaaaggcactgctgggtcctccatcaggtttctcctttcgaggcacatttagggggcggtggtcttcactgctgtccttcctgcctattccagggagccctgtgctgtagctcctctgtgt

SEQ ID NO: 3595 - DNA, 2300 bp, Homo sapien
tgctgggggtgataatgtcctatggaggactgcaatgagcaaagtcagatatagggacagccggtggggggagtaaccagtgatgagatggggtggggaagtgcagaaatggtaaccacttggcttggttgccaagtggaggggtctgaattggatgcaacagggtgcttgctaccagggattgagcaatgagcgatgtgctgaaaacagaattggaggaagacaggatggacctaggagcacacaggaagggagtgcatttcagggagcagaatgctagccgaggaaagatacaggcagggtgatgatagctacctcctggggacacctggatagacaagatgtggaaatatgagagaggagtcaaagatagtttgatgccacaatctaggacctgcagaaatgcagaatgacagtggaaggcctcccttctgtttgatgaggaagatggtgagctcagcattgggtatctttagtgttgtgtgtcagagggtcatccattggaggtgacagactcagccccatgcttttgtccccatgaaagtcccaccttcatatggaacgtatatggggggaagaagtgtctttttccagtacttgaactatcccttctgcccccacgaggtaggcattctgtctctgcctgagcttgctcaccaaagcagccattctgacctccacaatgagctaacattgccatttatagagcctccctctttgtgtcagatgctgttctaggtgctttgcatatgtaaactcattatatccctacaaccaccttgaaaatttggtaatattaatcccattttatgggcatggaaaccgagacttctgaaaggattccaaagacttccaaagatccaaaggcggtgtcctaaaggaaaccacccaaattcacacaactaggaagggaggaaccaggattcctgccctggtcactctagctccaaagcccctgacctttgcatcacactgcaggcctcctgcccctgccccctgccaactagatttaatttaattctatagaattcagtttagcaaacacttcctgagcacctaccaaacacaggtcactctgccaggtggcaaggatataaagaggaataagacataagcataggagagaggaacacaaactcagtggcctccagataagtgcccacctcagttcacagggcctgcgaggggcttgattccacctggacccagcccctatgctaatccagccaccaacctcaagtttgggccatattgatacccctcccacccacccctaaggaatcccaacatatcaaagctgaaggggatcttagaatccaaccgaatcattttacagataagggaagtaagggaagctgaggcccagagaagggaggtatcttttccaggctaacacagctgcttagggggagcgccagggccaaagccccggtgtcctcactccgggtctggtgccctgaattcatatgactcccctttccttcacagctggcaagaagttcacatctgccacatagcagccagggaccctcacccctgcatcctggccatgcacactttgccccattttgccaggcccagcaccagcatggggtagggggatcaggctgaggacgctgttgtgcacactcttcacaggcccagcccacaccacccatcgccaaccctagatttctccttctcagaggtgtgtgtaggggtagagacgttgccgcgcagaaagtcttctgcagcaaagacgtggatccctaaataacatttccagattttgaatgaggacaaagcccttcaatctcgtatcgtttttgttgacgttactagcttacagtgtataaagcgctttctttctaaaacagcaagatgaaacaagctgagttttataatacaaggaagggagaagcaccgcagtgggagttctcaggccacacaaaggcaagacccttccccaggagtttggaaggctgacgttcccttttctggtttggtcgggtttgagaaatgcccgcctctcccttgcgcaagagtctccccgcccaggtgaaggcgggtcttgttgccatggcgacagcgcggtcgggttaaggggctgctctggcaaccaatagaagctaggagagggcggggacaactgggtcttttgcggctgcagcgggcttgtaggttcgtggacgcggcattgggggaggggacgggggtcgcggggctattgggggtcccagtccggcttaagacctctgggcgtggtgggcaccggccttcgccgtcggagcaggggtcccagactcgcacccaaaagttcc

SEQ ID NO: 3596 - DNA, 2300 bp, Homo sapien
actgagaaacattgacaagaaacatgaagaacccccttctatggagatttgtaagaagagttctcagttgggcatggagaaggggtcatccagcagagaagcaggaagtggactttttcacctcctagccctctgtgtgagctgagaccggatgatggagggatgatgtggaaggttatgacaaaagattatgaaatcatggcagctgtgagagaagcatcaggtggaaacaagaagggctgggtcacggggaggccagggcttctggaggagcaggaagagggctccatgctcagcccttgtgactcatgaaatagagaggccctgtcaagtgatgtcttctgatggctgcctcatcagcacccctaatcctgcagggtttgcacactcctcttctgtcccacaatgacagctgaactcagtcaggaggcccaggccggcctgttggacagtacagaaagagaagcaagtgaagtctgagaggggggaattctccagggggggattggaggattgtaaatcttcaagggcctccagaggtcatcttgatcaccccttctccagcaagagctgcacacacccagctggagggaggaaggatattttgggtggacggagtctgaggctgacaactagactgttagtaagttcttcccaggcccatccctgctgggtggctcagaggatggactctggagccagagggtctgggtttgaatcccagctctgccccttccttgctctataacttgggtgaaataatttaacctttctattcctctgtttccatgcttgtaaagtgggaataaaatgatatcttgatgtttggggcaaggactttcaaactccagagtattcattaagcacctaatgtgtgtcagacactgtgttaggcatttaacacaggttgggtcatttggaaggactcagccggagaccgtgagaccatttatatgtgccagtgtcttcatgttgggagcacttattccactgtcttcttcctaggactgattttcgggcctcaagggtaactgtaggaggtccttccctggttactcctgctgcgcctgcccctcctaaccatggctggactgtccctgtcccaggctaagccagctgcagttggctgtgattaatggcctctattaacagcaagttgtaaactgataaagtacacagtgcccatgaaaatctcacctctgctaaattccacaccagtgagtacttactccttaacccccgaaacctcctgccttgcctcgtttgagagacatagtgacagagagtacacctttaaccagaggaattcaaaatgccttggaagcaggaaacaactccatgaattctttgggggaaaagcccaaatcctaaaacctggtttcacatggagtggagcctaggcgagatgaaattaaagtccaggtcaaggaaggtagtttcaatcagcctcaaagaaatcccagagccaactggccaacagctgcgtgcccttgggtaagtcactttctcctatctgggcctcggtttcattatttgttaaatgagaggtttggttcaaaatgattcctagtctcctactctactcggcagacttaagagcggttctgaatacaggaatctttaccaaaaaaaaaaaaaaaaaaaaaaaaaaaatcacactccaggccttagttccattccttctttccctgagagaatctttgcaaagcagcagccctcttccacctggtcatcccctgcctctctacactcatccagccaagtaattagcttggtttccttcaagtcaattatcaccattaaaaaaacaaacaaacaaacaaaaaacaatgaaattggcattccttggtgagtaaacgtgcaggccagacagggatgtgagatccacaattcaaagaaacccttgcacactcctgacgtgttctttccgaacactcttcggagtctcagttttatcctcaaaaggcagagaggcgcaggttttagcttaacccactgcgcaggtgagaaaactgaggtccagggtgacgtcatgatctagggcgagcggcaggtgggagattagaacccgagaggctgccgcggcctctgctccctccctgctaggctctgtcccacaatgcacccgagagcaggagctgaaagcctctaacacccacagatccctctatgactgcaatgtgaggtacgtaatctctctcgtgtgaagtgtttatgtgtaaaaacagcggattagtgtctccgtgctgctatgtcttctgggatcagaaggacccagcctcctgcccctccctgggacg

SEQ ID NO: 3597 - DNA, 2300 bp, Homo sapien
ttataggaaggacttgggggttcctgagggaataggttcaggaagtaaggcaggttttagggatggtttagggggttctgaagaaatggggtcagtgaataaggcaggttataggaaggatttgggggctcctaagggaataggttcagggagcaaggcaggttttagggatggtttagggagttctggggaaatggggtcaatggatgaggcaggttataggaagaatttgggggctcctgagggaataggttcagggagtaaggcaggttttagggatggtttagggagttctgtagaaatggggtcagtgaatgaggcaggttataggaaggatttgggggctcctgagggaatgggttcagggagtaaggcaggtttcagggatggtttagggggttctggagaaatggggtcagtgaatgaagcaggttataggaaggatttgggtgctcctaagggaataggttcagggagcaaggcagattttagggatgctttagggagttctggggaaatggggtcaatggatgaggcaggttataggaaggatttgtgggctcctgagggaataggttcaggaagtaaggcaggttttagggatggtttagggagttctgtagaaatggggtcagtgaatgaggcaggttataggaaggatttgggggctcctgagggaatgggttcagggagtaaggcaggtttcagggatggtttagggggttctggagaaatggggtcagtgaatgaagcaggttataggaaggatttgggtgctcctaagggaataggttcagggagcaaggcagattttagggatgctttagggagttctggggaaatggggtcaatggatgaggcaggttataggaaggatttgtgggctcctgagggaataggttcaggaagtaaggcaggttttagggatggtttagggagttctgtagaaatggggtcagtgaatgaggcaggttataggaaggatttgggggctcctgagggaatgggttcagggagtaaggaaggtttcagggatggtttagggggttctgaagaaatggggtcagtgaataaggcaggttataggaaggatttgggggctcctaagggaatgggttcagggagtaaggaaggtttcagggatggtttagggggttctgaggaaatggggtcaatggatgaggcaggttataggaaggatttgggggctcctgagggaataggttcagggagtaaggcaggtttcagggatggtttagggggttctgaagaaatgcggtcaatggatgaggcaggttataggaaggatttgggggctcctgagagaataggttcaggaagtaaggcaggttttagggatggtttagggagttctgtagaaatggggtcagtgaatgaggcaggttataggaaggatttaggggctcctaagggaatgggttcagggagtaagacaggtttcagggatggtttagggggttctgaagaaatggagtcaatggatgaggcaggttataggaaggatttgggggctcctgagggaataggttcaggaagtaaggcaggttttagggatggtttagggagttctacagaaatggggtcagtgaatgaggcaggttataggaaggatttgggggctcctaagggaatgggttcagagagtaaggcaggttttagggatggtttagggagttctggggaaatggggtcaatggatgaggcaggttataggaaggatttgggagctcctgagggaatgggttcagggagtaaggcaggtttcagggatggtttagggggttctgaagaaatggggtcagtgaataaggcaggttataggaaggatttgggggctcctaagggaatgggttcagggagtaaggcaggtttcagggatggtttagggagttctggggaaatggggtcaatggatgaggcagattataggaaggatttgggagctcctgaggaaatgggttcaggcagttacacagattacaggaatggtttaggcagttctggaaaaatcagttcaggggatgaggcaggttataagaatgttttagggggttctgggaggaatccattagggagcgaggcaggttctaggggtagtttggaggattctgggtacattttgtcatggaatgaggcaggttctaggcaaggctttgggggaactagtggcatggggtcagggagtgaggtcagttatagaggaggctcaggaggatctggggaaacgggaccagagggtaagatgggttatggagatggttcagggaggcttggagtac

SEQ ID NO: 3598 - DNA, 2300 bp, Homo sapien
gtcaatggatgaggcaggttataggaaggatttgtgggctcctgagggaataggttcaggaagtaaggcaggttttagggatggtttagggagttctgtagaaatggggtcagtgaatgaggcaggttataggaaggatttgggggctcctgagggaatgggttcagggagtaaggaaggtttcagggatggtttagggggttctgaagaaatggggtcagtgaataaggcaggttataggaaggatttgggggctcctaagggaatgggttcagggagtaaggaaggtttcagggatggtttagggggttctgaggaaatggggtcaatggatgaggcaggttataggaaggatttgggggctcctgagggaataggttcagggagtaaggcaggtttcagggatggtttagggggttctgaagaaatgcggtcaatggatgaggcaggttataggaaggatttgggggctcctgagagaataggttcaggaagtaaggcaggttttagggatggtttagggagttctgtagaaatggggtcagtgaatgaggcaggttataggaaggatttaggggctcctaagggaatgggttcagggagtaagacaggtttcagggatggtttagggggttctgaagaaatggagtcaatggatgaggcaggttataggaaggatttgggggctcctgagggaataggttcaggaagtaaggcaggttttagggatggtttagggagttctacagaaatggggtcagtgaatgaggcaggttataggaaggatttgggggctcctaagggaatgggttcagagagtaaggcaggttttagggatggtttagggagttctggggaaatggggtcaatggatgaggcaggttataggaaggatttgggagctcctgagggaatgggttcagggagtaaggcaggtttcagggatggtttagggggttctgaagaaatggggtcagtgaataaggcaggttataggaaggatttgggggctcctaagggaatgggttcagggagtaaggcaggtttcagggatggtttagggagttctggggaaatggggtcaatggatgaggcagattataggaaggatttgggagctcctgaggaaatgggttcaggcagttacacagattacaggaatggtttaggcagttctggaaaaatcagttcaggggatgaggcaggttataagaatgttttagggggttctgggaggaatccattagggagcgaggcaggttctaggggtagtttggaggattctgggtacattttgtcatggaatgaggcaggttctaggcaaggctttgggggaactagtggcatggggtcagggagtgaggtcagttatagaggaggctcaggaggatctggggaaacgggaccagagggtaagatgggttatggagatggttcagggaggcttggagtaccaggctcactggctggaataggacatgaggctggacccagaggccataaagccatgggtcacaggtcaggatattgggtagcatcagagggtgacacgaactccaaggatggtccagagcgagccagggaaaccaggcttgtggatggggcaggacctggggtggaacctgggatggctggaatgccaggcactgcaggtggcatggcacacagagacagcctcaggggcacaggggtgctggggtctcagggagggcgacagactctttcagatgagcgaggctccaccaaagatcttgggggctatggaacttcagggatccctgaggcctcggaggctgctggtgccaagggaaaaccagatgtcaaagaatggcaagacagttctgggactccagggtcttctagagacagaggggctcccagggtgaaggataggtctccagaccaagcagggataatgggggcttctgggtttcttgatggcaagggggcagtggaaggtgagacctgggcaggaatggctgctctagggtctggatatgaacgggacatctggaaagcaggcccaggaatgacagacaggggtagagttgctggccagggggggttggcatctcagggaggtggggactcacttttgggaggcagaagggtaggctcagggagttcagtggggacaggtcaggatctggacagcggctctatgcctgggggaaggggcaagtcaacatcagggcctgctgatagacaagggacgagcaatgcttgggctcctgattgggaaaaccaggggtttagccaaggcagcatagatgctgggaagcagcccgcaggctccagag

SEQ ID NO: 3599 - DNA, 2300 bp, Homo sapien
acttcatacctggaaacaattttaaagataatcagttctgcttccacggacttgccttttataggaagatgagctactctaatcccctccttcagggcccttctatatcctagaataggaaaattatcgttatttaaagatgtaattaacatttattatggctagcatattaggttttagataggccaaatgtgtgatacaatagaattgtatttttatatgctgctgtgtatactttacagtacattggggcccttatataatcggtgtgcactgtactttaatgtccattttataggacttttataagggaagctggatgatgtggtggaatgagcactgtgccaggagtcacaaggcctggttaggatgcaggctttgccacatattaactggggcattgcaagcaagctacctcctctcctaatcagtgaaatgcagtgcttggctggatgaagtccaaggctctgtccagtcctggcggtctatggctagaggcagaatcttacaatatgaagtgataatagaggtttacaggtattttgtacacatctatgacatattttttatcacatctctggtttacttgaggttaagttcttaggaacagcgccctcaataataaaactgtttctattggaaactataatctgctttacaataatctgctctgcaaattgctactaggaataccttccttgggaaagctggggctccccgcatgtaacacccacatctcaggagttgcgtgagtgaccttcatgtacatggtccctgagacagtcattcagtcttcttgatccttcctcgacataaaattcccaaaaagaatagatttctgattgtcctttcctctgtagattagaagagcaaactaaaagtaaaatatgtgagctgtgagcggcagcctcaaatgacagcaagagtgacggctgtgatagtgtcacacactggtggaggccccaaaactaagaaactgaccggacagcacgactacacagttcagtaatggatgtccagaatgagaaacccagggcatcaagaagtacagcaaatatgttcagtgttgtttgctttaggaggcaaacagaatgcgataccttttagaaagatttccatcaaagtaaatacttaaaaaaaaaaaaaaacactcagctcctgttacacaccaaattcactgatgtgggctccctccacgcctggagaggatgctacatgaataaagcttcactgcacatgtgtccccaggggtgagtgtatataggggaatgcacacagtggtcccagaataataagtccagagtgaaatttcagggtaaagcagcttttcaatttttcagtgaggatctggttaggatccgagttagatttaatttaccttaaattaactagcattcacgtattcacctatttaaaatattttttattaagcgcctaatattatgtgtgccaggcattgttttagaggttatagtggagtttcagagaggatccgctgttcacgtggtgttttaccggggtatactcatgaacaacaaataaccaccggttttaccaaggcatacccactgtgtggtctgatatcccaagtctgctccttgatgtggccttactgcccctaccccactttcttcagaggaagctcctttagagtagactgggttacccccataagatggagcactcctttggagcaagagctatggttctgccatcagcccgggagcctccaccgccggggttggtctctgctatgacctcagtacagagggagatggacgcctggctctcctgggcagcctggtcaagaaagactcctttctttcctagagagaggtctccctcggttcctgagctgagcacatgctttctcagtgagccggcagaacaggacagaggggcgtctccctggggcctcaaggcttgcgacgtttcttgctcatggggagagggaagggagagaaaaaaaagagcgagcaggaaggcgcccagcgtcccacacaggggactcgcagccctgcccccaagagcgctggctccgcagcagcagtgccctgcagctccgcgtctgagcagcagcagcgcgcggcccggtggagtgggtggtgcagggcaggggtggtatatcctgtctgacggagggcgggcctcgccagtgccagagagggacgaaccagggtggaagcgccaggagcagctgcagggagccctcacgcggaccacgcactctatggccgtagggagccgctgagagcgagaagagcacgctcctgcccgcccgctgcaccgcacctcgcctc

SEQ ID NO: 3600 - DNA, 2300 bp, Homo sapien
actcacaggctcttcccatttcagtggggccttctgaaaccagcccaagacatcccagatccatttatttgcccagtgccttcccccttcctggcctcttgtgcactgcggtatctcatttcagctccacacacctgagggcagatggggacatgaagaatcagagaaccccctgggtctcagtatgtgttgggaccaggaccaaactgcaagactcccaggttcatggccagtttctgcggggtccaccaggggatttgaagtccaagaagcatggcatcttgtcacagcttctttgattccaagttgtgtggctttgagcaagtcattctacctccctgagcctcagttctcctaagtgagattaacggtacccacttcatgggcatatcatgagcatgaagtgaaatagcatatgtgaaagagctttgtgtattcccaggtgctgagcaaggctgaggactgccattgttgacgtcagtgttactatcattgctgtggttggtcggggcagtgctggaagattctctaggaaggatcagggccctgcctgtcctggacaccctcagtccctgggtccagaatggggctgatgctgactattcctctctccaacaggtcgttcatgcccaacttggtgcctcccaagatccccgatggagagagagtggactttgatgtaagcggtggctgtgggttgagtaggcctgggctggggatagtcccaagggccctcagtgacagagattttgtgaccttgggctggggtagagcataggtgggatggggtgcagcaccagccaggctgggtgcccatccatgagcgtggtcctgggttcaggccacagttaccccttccctggccaggcgccaggccctgccagaggtcttttgcactgcgttggggggtgtctagcccacccatctctcctctggactctttggagtggcagcctctgagccgcagcggtccacccacaggacatccaccggaagcgcatggagaaggacctgaatgagttgcaggcgctgatcgaggctcactttgagaacaggaagaaagaggaggaggagctcgtttctctcaaagacaggatcgtaggtgtccagtctgcccacctaacattctctgatggcccagtctgtcctccatcccttttgtgaggccccacctcctccagacagccttcctcggcgcctcaaacccagctaggtgtgaggtctccttcagaggccctccagcattctgcacagctcctgcagccctgactggtttctcgggtccctgccttccctccccatcctactggatgctccttgactgccagagctgagtctgatctgtttcaggcctcccccagggcctaattcaggcccgggctgtggactgattggtcacaggcctgctgcgccacccctgcccttgcctcctcttcccccgcagatgaaggggagtgtgacctgcagaatcccacatccttctcctgcagagcgtggaggctgctttgattgcttttgtttctccccatcaaacttgccttcccacagacatgctgctctggctggagcaatgacttggccatctatccaagcatatggcacagagcagctgccagggcagggtgggatggaggtgggggcagagcccagaaggagcctgcctgatgtctcccagttgtggagggcagtctcaccatgaggaatgttggaggtgggtcactgcaggtaccctggtgtgcacgtccgtggagctggttgaaagtggaggcccttggaggccgggcaccattgcttcaagactctggaaggaaccctcccccaggaattcccttgccaccccatgcaggtttctgtacctgcgatgtcaccttctccctatgcacacctgggtgggctttgcctcttctccttaggagagacgtcgggcagagcgggccgagcagcagcgcatccggaatgagcgggagaaggagcggcagaaccgcctggctgtgagtgacccctagcccaggcccatggaggccccccatgctcccagctcctgctgggcccccaggcccctctctattcatcaacatgaatgaaatcagtcaagagacaatattggccgggtgcggtggctcacgcctgtaatcccagcactttgggaggccaaggcgggtagatcacttgaggttgggagttcgagaccatcctgaccaacggagaaaccctgtctctactaaaaatacaaaattagccaggcgtggtggcacatgccggtcatcctagctactcaggaggctgaggcaggagaatcg

SEQ ID NO: 3601 - DNA, 2300 bp, Homo sapien
acaggggccctgtgccccacaagtggcccgtcctattgtggatcctcaaatttacatgcactgtttcagcataagcctcccattccactctggctttgttttctctttacatccctttgaaaggacagggatataaaaaaaaaatgggctaagagtaaccctactatgcccaggagtggctgctgcatgggggctggatttccttatctgagaggctgtctcacagcgctctgaacgaagctcctgccttagaacaattcgaagccatacacgtgtggcctgtgacaccaaggatctactgggcttttcccatggggctcagtagtgacctaggtgcccagatccctcttctaggcatccatgcaaataaaccgtggtctgtttgaaaggttattgggcttacaaggaacagtaacccaccctcaagttaaaaaagggtttgggaaaagtaattccgaattctacgttactccaggccaggacccaaggcaaggctgggccctgcttcgtgggctagaatgggagagagagatgatggggctccccccactttcttgacagcctgactccttcctcactatccctcgggaatctgtcccctccatctgcctgtctctctacaaagtgcccctgcttccctgtggtggtcctcagtcccacaatgctggccagcgggcggttggcttcagcttgccctgccacagatgtgctggcagtgtggaggcccacgtggcagggcaatcaaggccactggactcagaggccacagggaactatggaggggatggagtcagctgagtgatgggacaagagtctgacagcagcatgggtgtggagcaaatggcagtcccctgcgcagaggaccctttcaaggacattagtggtggaggcagcatagtagctcccaaggcagagggattgagagaagagtttgaggactgggaaggcgggacacatgattgggtgatgggagaagggggcagagaatagcgagattgctttctttgcccacggagaaacagaggagtgtggatcatgaatgggcaagatctttaagtgccagggggggtcatggaggaggggagggcctgctccagaggaggaccattcctgcttcagagccaagcaggacctaggctgtgaagattcggagaaagagatggaggggagagtcagctcagctgcttactggcttgctttcctcctgtctctttcattttcataatctaccaaaccctgcaatgggccagccttgaacatacaagtgcatgtgcatggtcagacacaggcaagcaagcaagacccctaggcctgacctatgcatctgcaatctagtaggtttagcagatcatagccccgcactgcttgattttaaagccgttaggggatgacctttgacagtccgcatcacccctctcacacaacgagcgcctgttcaaggttcttgactggaagttctaccttgtatctggcctcctgtagcagtttcagtccattccctgtgaggagggtgtgccacatggctttgggggtcatggagaagacccaccttgcagatgtcctcactggggctggcagagccggcaacctgcctaaggctgctcagtccattaggagccagtagcctggaagatgtctttacccccagcatcagttcaagtggagcagcacataactcttgccctctgccttccaagattctggtgctgagacttatggagtgtcttggaggttgccttctgccccccaaccctgctcccagctggccctcccaggcctgggttgctggcctctgctttatcaggattctcaagagggacagctggtttatgttgcatgactgttccctgcatatctgctctggttttaaatagcttatctgagcagctggaggaccacatgggcttatatggcgtggggtacatgttcctgtagccttgtccctggcacctgccaaaatagcagccaacaccccccacccccaccgccatccccctgccccacccgtcccctgtcgcacattcctccctccgcagggctggctcaccaggccccagcccacatgcctgcttaaagccctctccatcctctgcctcacccagtccccgctgagactgagcagacgcctccaggatctgtcggcagctgctgttctgaggtaaggctcgggcagggctctggggaagaggagagcagagaatggacggggagatgtgagggtcttgggccctggcatatttacccagagtctgcctgtgtccgcagaagtccatggcccctcctggtggaggccacacttc

SEQ ID NO: 3602 - DNA, 2300 bp, Homo sapien
tgttcaattcataacttctggtacctgtgaatgtgacctcatttggaaatagggtatttgcaggcataatcaagctaaaatgaggtcatactaaattagggtggagggatacttgaacacaaacaagagacacaggcagaatgctgtgtgacaagagaggcaaatcttggagtaatgcagctgtatgccaaggagctctgggaagaagcaaggaaggattctcctctggagcctttggagagaggctggctgtgctcacatcttcatggcagacttctaaccttcagaactgtgagagagtaaacttctgttgtttaaagccatccagtttgtggcacttcatcacgggagccccgggaaatggatgcactgatccagcaccaagtacagtagctggcacttagaaagtatcccataaatgtacagtgtctgatctcaaggaactttctgggcattgacatatatgtcattcacttttccttacttctagggttgtctgcatacaaactttccatgtctttgggcttttatatctgtagagaggctgttagattttgggcttttagaaacaggactgttcctgccttcgtgaagtgtccctggcatgaccaggcttcagatgacttcataggagtatttctcttcctgtgttgaggtgtcagcactgaccagccatgggaagaacattcagtaggtccctagggagacagcagcttccctgacagtgtcaggccccgggtcagaggatccagggacctagactattggggtcccctctttctcttttcctgtaagcagcatacagctccagggcctgccttggcctctgttcagaactccctggagccttgtcgatattcatctgtgcactccaatgtcactagcagggaactcatatgatttccacaacctggaaggaagcagagcaaggtatcgtaacatccactccacagataaggaaactgaaggagtttgtcccaagtcacacagttcacaaatgtcagaatcagagctcaagtgtgcaagttaccagtccagttctcatgtcctggacctcgtcccacccttgccaagaaggaaggctccctggaggagggggtacttcgggagggggaatctcaacaggctggctgtgtctgtgtttccaggcttctgcccggcagctagcttgccctttgccgtgagatctcagagctggaaggcctgacatgagcaccaaagagaggctgaggctgggcagcgaggcccaggagcatgagggcagttctggctctggctcaggctcccttttgatattctcatcctggcgctggggctgtgcctccttcctctcagggcaggaacagcaactgtgcgctgaccctgcagttcagatccatcagggaagataagattccccatgctcaacgcctgaccctctcttagcccaagcccacctgaggctggttcctggatagaaagcacctggccccgcaccagcccagatgggcacctaaagggagccaggtggtgtcaggggtgcctgagctgtctcacggtgctccaaaattcgagtcctagatatctgtgtttaatctttccttggggaagaaaaactgagcttcctctgcccttattatacaccctgccactctagcccaaagtccagtatcagggagcaaggacagtgcctttgacatatttgtgctttcacaaatgtttgctgaattgagtctaagattctccctttgggtggggctgggtctaccaggggcatgttttgtgtgcagctcagaaagcaatgcctcattcatctcagcgaggcctactgggacggtgggcccgggtgggttccgaagccagggagtggggagggcgctccctgcgaaggggccccgaaggcgcgggcgctctagacccgagatcacagtacctgcgctaacttttccgctcggcttcttgctcttgagcgtctccgggctaagtcgggttcccggcaggggtccccgcccccagcccagctcctcggcaccccgggccgcggcacagcgcggggaggcgtcccagcgccaagctggtcggactggttctgagcaggaagtctcccgccctcgccccgggcagccgaccagccccacgccggccccgggcgtccgtcgttcggtcccgcgatccgtccgacggtccacccagtgcttgcggcctcgcggccgggccggcctgggctgcaatcaatgcggctttgtctgggacgcccacatcccagaggccattcccgggtcggcaaatcggagcgcggccggggcgcgcgggggtgagat

SEQ ID NO: 3603 - DNA, 2300 bp, Homo sapien
gaggctggattccacatggtgtgcagggatggtggggatggaattgggacactggggtgaggggtcctggtcccatgctgtccaacagagtgtgaagatgaatcactccgagtctgagattctccatggctcctgcccagggagggcccctggctgcactatgttctccacgtcttgctgcggacatccggccacctactttcttggcttttgttcaccctgctttgttcttctatttgtcgaactgtcttcttttgtttttccttttcaaaaagcaggataattcatgcagagaattcattttttgagaatatcaaggccttttaagaaagttattgtataggctggtcatggtagctcatgtctgtaatcccagcactttgggaggccgaggcaggtgcgttgctcaaggccaagagtttgagactagcctgaccaacatggtaaaaccccatctctactaaaaatataaaaaatagccaggcatggtggcgtgcctgtagtcccagctactcaggaggctgaggcaggagaatcacttgaacccgggaggtggaggttgcagtgagccactgtactccagcctgggtgacagagcccctgtactccagcctgggtgacagagtgagactctgtctccaaaagtatataaataaataaataaataaatggaaagttattgtataaattataataagccaaggcaataaactccagtaggctcatctgcaaagcccctaaattccttctcccctctagctgctccttttggctggagcctgccttcattatccatcacagcctctccacttggaatcctatgtccccaacccctatgcctccccagaccctgtcatttctccctggcagccgtctcacatagaggcttctcaaagttgacccgaccagaacagaattagagcaacctctattaggcagcagaatgtcgttgtagagagggcagggcctttacctctgtgggcactggggtgtgtctccttaggacacccctgcccattactctctccttctccaaatggggagcatggctggggctccctaacctcctgcttgcgaggcctctctctggcctctgagagggtcagtgtcctgccccaacccatgagatgacagactataatagccacaggattaacatagcaggcattgtctttctctgactatagggtgggtattatgtgttcatcaaccatcctaaaaatacccggtaaacaggtgcagcccctgtggctccagtcccctgggatctgttggcttctggctggagatgaagattagggcagaggagaggtgaattagtctcactgagttccaggcatgagactcgggtgtcctttggaacctgggaaatctagattccaggaaacccatctggagggggatgcagagtgtctgcagaccctcagacctccctgagcataaaggtgtgccctgctgccactgccattctgctcagccctggaaacactcactggggtcagcctgcaacactgctcacatcactccccacagccaggcaccctcgtatcccacgtgcaccagagccactgaaaaatccctgaaagctgagtctttagccctcttgggcttttggggcatgggttcaggggcctcatttccatattgccttataagagatgcagggttagcccaatggtcctcttcccccagctgctacttgcccctctgggccttcactgtggccctttgctctccctcattccccctcccagtcccatctctgctcagtccccacacctggtctggctgctcattctttccctttctgcagctcgagtctccccaggtgggtgctggtttcactcagttggtggcacctatgtgcacagaatttgcctctgctcctgagccacaaattcacatggctttccgcctatgtgcctgttgtgtgcattgcagcacgcatctgccctgtgaggtgtgtgtgtgtgtgtgtgtgtgtgtgtgtgtgtgtgtgtgtgtgaagggtgggagggaggaggggcagcaggagggggcagtgggtctgttctatttttaccagccagttgctgctggacacagttttcatagcctcccctcggctctgcccctcacagtctgcagtctacggcgaggcacaggccagcccagctccacgaggactgaacaaggtaagcgtctgcagcccagaacttcagatgtaggttgatcccaggcagagaacctggggcttttgtttaaggagaaagcgaggtcttggagctggagaaaaccatttcttgcctgtgcagttggtt

SEQ ID NO: 3604 - DNA, 2300 bp, Homo sapien
gaataagtcaccagttttacccaccattgccttcgcactatcagcccacatgccaatccaatgcaaagataaatatggtacccccaggagttggtggaccactcttcgagaagcattaccacatcgcaaacccaggatagtctgtgacggggcggagaggggtctgtcttagggggcctaatccctctccacctcctgctttggctggggaaattcattccacccccagctcccaaggcccccgtttggtttccagcctctgctgcagcagatgcactctgggtgtagttatatgtctgcagtcccgttccctgctggactgacagtgagcaccttggagctgggctttgtgttaccaattttcctatagctgagccctgatgagcagcaaagagatgggttgaagtgtggctgggagtctgcatgtataaggaagcaaagggaggcctcctctttcttgcacagagaggagggtagcagcttgcccctccccctgccccattgtgaacagggtgagaccccatgaaagccctatcctcagaaagaggctcagcccagcctcagagttttggagaggttgtcctatcctggctagggtctggaaggatcttcattagatctgctgactgagaaggtcccacccttctcaattcctccccaagcctcctgcaaaacagtcatggggtgggggcaagggcgtgagagcagggaagaaggacagctggggtctgtggagttatggggctttggaggagaatggagcgggaggaggaagcagccagggaggtggggatacacaccagaaacaagggcagggctctttgtctgtgttggcacctgcttccccctgacatttctggccccaggctgggcacagggtggagggggtggtcatagttcagggtgacctcccagggcctaagtttaacaacaacaaaggcccagtgcccagctgttgtttctatgtgtgtccgagcacattgttggagggcgagcagttcatcacctatgtcaaggtcagtgagtggctgcggctgcttctctctgggagagggggcatctggtgcccagacactccaggtgccaagaacttgaaacagatggcttctcagacggccctttccctgtacccttagccatgagcctcctagccttatttcaggaccctgagaaacaagcaaagatccctcctgagccatgaaaggcaaatttcctgcactgtgtctggccagaaggtgcctttctgtgttggttacttgtccattcgtttattcgatgagcatctactatgtgtcaggcactgtggtggtcactgagaatataaaactgcataagacatagtgttgacactcaagtttctcccagatgagtaaatagatgacttcagtattgtggatgccatgtagaaagagggacatacagggctatggggcctggaggagcggctcctagtgcagtcgggtggccagggtagacttcctggacgagtcagtgctccactgagacttggaggagggtaggagtataggtggattgggagagaagggcctttggagaagcctctggtgatctggggatgttgaatagttctgtgcagctgggaccagggggcataggggctagggaagctgcaagggtgtgatcacagaagcgcatgtgacttgaccacaggtttgcattttatcctcatattgtcattgaaggaaggtggttcgggcggcagtgggatggagaggcttccggagcagtcagctggagcggtgaggaggttgctgccatgaagctggcagaagacagtggctcaaacagatacggtggcgtgggtctgtggaggagggcaggttaggaggcctcgaggggagcaggacaggacttgctgctctcctggctgcgaggaggaagggaatggagcagagggggggaccctcagatttctagtttggctcagcggctgtggctgggcctttgtgtgacagggagaagaggaagggagcagatggggttcagggtggggccatcgagtgaggaggggcttggcggtgcctgagccagggtgttgcccaggcagctgggcacatgggcctggtgctggagtgggccaaactgccccagcaggccccagggaaggacggcaggctgggatgccgtccccacggactccctctcctctcttagccctggcactaagtgcgttcctctggcaaagaagaaaataatttctgtccctcgccatctgctgcatgggaagatgggaatggagtgagcacggtatgaggggatcaggaacgtcaaggggctgt

SEQ ID NO: 3605 - DNA, 2300 bp, Homo sapien
taatcccagcactttgggaggccaaggcaggcggatcacctgaggcggggagtttgagaccagcctgaccaacatggagaaaccccgactctactaaaaatacaaaaaattagccaggtgtggtggcagatgcctgtaatcccagctacttgggaggctgaggcaggagaatcgcttgaacctgggaagcagaggttgcagtgagccgagatcgcaccgttgcactccagcctgggcaacgagggcaaaactccgtctcaaaaacaaaaacaaaacaaaacaaaaaaatgagttaggggtagagcctgatctagggccctgtttcctcagagagagaactttggatcatggcaggactgtgccaggttggtgcacccaggagacccctgtggagtggtggggaggagccatgggagggcagggctggcaggcaggctgagaccttgtgggtccctcaggtagggccgtggccacctcgagctccctcttctgctgctctctgggcctcaggagacacctgtctttgtcttttctttaatgccactgtctattccctctcctggaggggcattctgggagttaggagttagttgtcgtcacacgtgtgtgtgtgtgtgtgtgtgtgtgtgtataaagagttatggatgagacactgacagttcccttctctcatctcctaactttgggactgcagaggagcgcactcctatccccacaacaggaccttccctgtatctgttaggctctgctctttgggcaggaggatggcaacacagggtgtaagtacaaagaggtcttattactgtcattattatatatcattactcccgtaagaatctattattaacatgttgatgaatagacctttaagaaactgtgggcctggaggaactgatcaagatggggacagaatgaggacctaagagagccctcttccagtgcctggcttaatctcagggcccccatcattctctaaagggaataagagtggggagaggggaggaagaacatttcttgagactcaagagttgtcaggtcctgtcttgggtctttcacaaatgttatccaacttattcatcaggacaaccccatgagatgagaataaattaatcctcctattcgacagatgaggaaattgacggaggtcagtaaagttgccccaggtgggcaggacacagccaacaagggagaagaggtttgaactcaactctgcaaagctcttgtgtttacacaatattctagccagaacagaaagagacctctccctctgcgttcccctccagctctgtatgcgggagaagtccattcttggggaaggccgagggaggacagaatctgcggagcggaaggagcaaggttggagctgcgcttacacctgggactggctgtgccatcggtccagcgtcggcgcctgcaagtgtgcggtggagaggactgcagacagtggcatccccaggtcacggagggggtccctcctcccccactacgaggagggcatgaatgacctcaagcctcagctctcctttgttggcactggctactctctacaggcctccccgcgcaatgcatgggggtaggagtaggagcaggtgaactgtccaagcagaggcagcgatggacagcctctcttgggtgctgcacagagaaatcgggcgatggaggaggaacccaacatgggcttgatgcagaggctgggggccccatggcgtgccaagtaaccagcagctgtctgacgcctaacatgcaactggtgccactgcgcgttcgccaagcaagcccacccccttgctagcagcgcgctctccaatcgaggagatgcgccttccccctcccttccccgccatctcccccttcattcaaggcctgggggagctgcggttccgagaagcggcagacggcagccagaaggcttgggctgttgagtaagcagccccctctcagtcccggccctccccgccccgcgccctgcgcctccagtgagtgactgagcccccgctgcggccccgcccccggggccctgccggagctggtgcgcggcgcggaggggagggccggccagggtaggaatgcgctgcgggcgggcggcgcaggaggcgagcggcggaacatgtaagggcacatcccgcgagctgccgcccagcgcgcagacagagcccaggggagcaagagaacgggcgggcggtggggctcacggcctagggaggcgcggaggcatctggcagaggcgggtcgggctgggccagctggggtagagcggaggagcgggtgccggctgaagcggggcggtgggcgcggagcgc

SEQ ID NO: 3606 - DNA, 2300 bp, Homo sapien
cagcctctgcttcttgggctcaagtgatcctcttgcctcaggctcccgagtagctgggagtacaggcatgtgccaccacacccagctaattctgtattttgtagagacagggtttcaccatgttgcctcctctttttatagatgagaaaatccagcccaggctcagtgacttgcctggggtcccacggctagtgagtgtcggagccagatcaggggctcagggcagcaccgttgccacaccagcctcactgtctcagccctgctatctctcactactgagaagaagtcatttccctttcttcgaaatgccatagggtgtcatcagccccaccacacccccctcaccccacggcactccctggcctctgggtaaatggtggctgttggcagtcagcctggcttgctcctcggcctggggggtggacggaaatgatggatgaattaccaagtttcagccaaggtcattgccccagtgggaatgattcatcagcagatttctcctgtaaagaatctgataatagaccagctgcaggaatgaggggcagaggagggcaattcttagcaaatggggtgttaaatgattctggggttaactgggtgaccgagggaagtatgatgttacaatggaaataacattgtgctgaggcttggtttgtccatctgtaaaatgggagatgaccctagaggccctagcctttgtgactttggcagagagaattgcgcgctgctctggcatgagatgaaggtagggtcatgccctctcagtgccagccccacctgtacttacagtgtaagtcacctcaccccatgcccttctccatgcagagcccctggccacaggcccaccaccaaccccaatgcatccaaatttgcccagaagattggtggctccgagcgctgcccccgatgcagccaggcagtctatgctgcggagaaggtgattggtgctgggaaggtaaggtggctgctgggcatgagagggatggggggagatatcttcctgaaatgtggattccagaacttttaaattggtgacctagctctgctcagggcagcctgagcactggggtttaacctcttctctttgtccctgtgggttgcatgtacctgtgctttccagtctccaaggagctcatatcagccatgagcagtaacatccccagcattgatggacaatgggcaattcatagggagtggcaatgatcaatctgtatctctaatataggagaacagaaagtaagggtacgtggatgggctgcagagggtccacaaagccctgaagattatatacaaagtttcatgggaacctgtctgtttcttagaagaagatccatagcttttattaaattttcaaaggatttgtgatcccaaaaatatacattctgtttcatgggatgtggactcccaaaaacccatccaaatacccccagggcagagattttcaaggttcagacctaccagagcctcctaggaggcttttttcacactgtttagaattgccgcacatgcccttcccccatgatattctgacagtagcccccaatcaccaatgcacagtgagaatcactgtagcaaatcaacagttcccaattgagctgatcacttccttcagataggctgcagtagagaagaggcagaactcttgcccctggggtttgcagtgtcagattagcagtcagaaaatcacagaagagatgtctttcagctgtggggccagagaggaattctggagcatcacgtgaggcctgagatagaaaagtgacttggccaagatcacacaacaaggttatggaatgtctgggcctggagcccatcttcatctcttctggattcaggttttggctttcaaggctttttgaccttgaggaatgggataggggaattgatcaagaaatgttaaacaattaacacttaggccagtgttagaatctctactctcacagtcatggttggacagagatggggattagtatccctgttgtacagatgaagaaactgggagtcaggaggattacataatttgcccagatccgctagctaggaaggggctaagccagactcaagcccaggtttgtctgactccgaagcccttgctcttactgctgttactactgttaatgctactttgggccatttagcctcttcaaacccatttccaaggctgcaaaatgggaggggatcctagcacggtgattaagagcttggactctagacagcctgctttgaatcctagttttgccatttattggctgagcgaacttgggaaaatttagccttcctaagcctcagttcttcagctc

SEQ ID NO: 3607 - DNA, 2300 bp, Homo sapien
tggttgagttttctcattattacggaggaggtaataatagttacctcatgggattgttgtgagaattaaaatgaaagaagcttgtaagacaaagcacttaaaatgattatgagtgttgaagaaatgatatgcacacacacatgcgcacacacgtgcacacgcacacacacacacgcacactgctgagggatctgtagcaagatggtgtgatacaaagaagccctcaccagggtctgaggcccctgaagatggggagatccaagaatggggtcctgtctgttctgcattacacgaagcaaagtttcatgatttgtgctccagagtaggatacagatgggccaagagccacctgttcaatggacgtttgcatctctgcctgtcgctaggtagacccacctgaggccaccccgcacagggcagcaggggccccacatcctgctcagccgggcctggagtgacagctccagggctgcgtctgatgaatggggagtaaacaaggtttagtggagctttgttggcttccagcctgcaaaggaggccagaaacagcagcgtcttgttatcagcagttcactactcttaggaatttccaagccgtttatctttccagagggaataagagagagcttggtgctggctgggaagggggtctaggctgctggggtcctaagggcccctctctttgctctcagatgttgcttaatcactgaccataaggggtcagctgtgggcgggggtgcctgcctgcagacctgtttacggaggagtagtcggtcagagggttgagggaagtcaggaattcagggggtggcataggaaggaaggaacagggcctggggcagggtgtgaggggcgctgcggatgagaaacagttgtagaaagtcaggctggggagcagggctcttggcggggtgcgggggtgttatgcaatgagcagccgcaggaagcagtctcaggtcacgctagggtctcagggccagtgcagctattggatatcagagcaccaagtggaccccctagcactgcacatgtcccagcaggctgagccatctccacaacttgctcattcatcatgcctaacacagcacctggcacaaagtgggttcctgacaaagatttgtttatgaatggaaggcacatcatttctcttttccagtgaagtgggtgataagtgttcaccccattcagggtgcccactgaatcaaaggactttccctcccgaggaagggagaggctagccaggtctgggccaagggcagtaagggccatctccctcattggccaggcctggttgggtccccaaaagcagttgtgaccatgtgggttcttggctccagattctactcagcttgcccacctacatgcctgtattagtctactctcatgctgctaataaagacatacctgagactgggtaatttataaaggaaagaggtttaatggactcacagttccacatggctggggaggcctcacaatcatggcagaaggcaaaggagaagcaaaggcatgtcttacatggcagcaggcaagagagcttgtatgggggaactcccatttatataaccatcagatcttgtaagactttttcactatcacaagaacagtatggcggaagctgcccccatgattcaattatctccatttggcccaaggagagatttgggtgggaacacagccaaaccatatcagtgccctttcctgagtgtctgaatgggcgggaggaagacatgatgatgtcataggcaaaggtggggagaatgacctccaccctgggcttggcctgggaccagggactgagagggcctacagtatactcccatggtcttgaaaggggctgccagatcctatgagcaggtggtggttcagaggctggtgggaaagctcagctccgtggctgggaacctgccctgaggttatgtgcccatctctgagctgtacccagctccctgctggggaaggtgggttaagcagccagccctgaggaaagaagaactctgtgatggtggccgatggaacagggccccacaggttggccctgggctgttccctagaatccaagagcacaggggaagctcacggaagccttgcacactttctgacaccagcgtctcctcacctgcaggctgagacttactgacacttttcaccctcttggccccacatgtgtggcccactggaggggagcaatggctggcagaaaaccaccaggtctggaggtcaggggctgggttctggcctggccctgcatctggccaacacgtgatctggaactgttttgtgggcctcggttttccttcc

SEQ ID NO: 3608 - DNA, 2300 bp, Homo sapien
actgtaggtggtgctttgtatagcccttccctcatgaacttctgttgaaagagctggaagggtggtcttcctccttcagccacgtctgttgagtgagcgagtgaaatggaaggagagaagcaggccccatctgttctccacactcactagtgttaccttccgtgctgctctgtggccacgtgggcactgacctgaggcatcacttggacttctgtgtgctgtatatgtgccaagtactgtgccttgcctttgacatatcatatctcatttaatcaccagacatactcggtgaagtcgctatttttatccttttttttttttgagacggagtcttgctctgtcgtccgggctggaatgcaatggcgcgatctcgactcactgcaacctctgcctcccaggttcaagcgattctcctgcctcagcctcctgagtggctgggattacaggcaggtgccaccacgccccactaatttttctatttttagtagagacaggttttcaccatgttggtcaggctggtctcaaactcccgacctcgtgatctgcccacctcagcctcccaaagtgctgggattacaggcatgacccactgcacccagcttttatccttatttaacagatacagaaatcaaggtttggaaagactgactatcttgcccaaggtcacacagctaatgagtggcaggatcaagattgagccaaacctgcatggcatcaggacgccagctctgaaccaacacctagagcatctcaaagttggtctgggccacctgctttgtttgcctggggtgcttgttaaaaattcagattcaagtacctcattctctcaagtatctcattctcagaggttataattcattagatgtggggtggtgttactaaatctgattttgcaaaagcccctcactctgaagtttgataactgccctgtgtgcctacctcctgcctttttttttttttttttttttttttgagacagagtcttgttctgttgcccagactggagtgcagtggtgctatcttggctcactgctacctccgcctcccaagttcaagtgattctcctgcctcagcctccagagtagctaggattacaggggcgcaccaccacacctggctaatttttgtatttttagtagagatggtgtttcgccacattggccagtctgatctggaactccggaactcctgacctcaggtggcctgcccgcctcagcctcccaaagtgctgggattacaggcgtgagccaccatgcccagccctgcatttaaaaaacaaaacaaaacaaaaaaaacttttttcttgtggtgagctatagcttatatacaaaagtgtgcacaaaacctacatgtacagttcaaagaataattataaagtgagcccccatatgacaaccaccctgagttaagaaggagagcattgccaggcagtgccttaccagcctccctggtctcccaacccagtcatggtcccttccctctcttagaggtaactcttctaaggtaaaagcttgtgatcatcattcccttgcttttctgtagtaacttttccacctatatgtccatcccttggcaatatgagtttagcccatttgtgaatttcctacaaatggacttgcattttcccagctctggtctgtctgcttcttccacattctctttgagatccgtccatgttgacgtgtgtaggggtaggcagtccatttttattgcagctggagccttctttataaagcctgcttcttctgctgatccacatcctttagagtgcctagcacagggctgaaaatgcagcagctgctctgtaaagacctgttgattagattggggggaggaaatccccgagaacgtgcgaggctgctgtcgagagctagcagaaagtgctctgccaggcctggtggccccccaggcattctacttttgtctttctctcctctggatctggctgttgcatttctgtcgtggacaatctgagatgtttccatctccctgtaaaattaattcccatttctgtgtcccttttcagaatgccgaactggggaggaggcaagaaatgtggggtgtgtcagaagacggtttactttgccgaagaggttcagtgcgaaggcaacagcttccataaatcctgcttcctgtgcagtgagtacgccccaggccctattgctgttgccttggacaccctggacgggcctgcccccacaggctgggcctgtcaacaccccagggaactgatcccatgggatgtaaacagcttgacatttggctgaagcgcagctgggcagggaaacacttcagggcct

SEQ ID NO: 3609 - DNA, 2300 bp, Homo sapien
aaaaaaacctacgccttttttctctcacctgcttgtcaatctacccaagtggaaaaactggctagtaactatttgcaaggtttatgagtatcccgtaggccaactcagctgaaagaccattgctaccccactcattcatcaaatgtttgctgatcactcagtcaagtgtcactacactcccaggctgcaactctggcccagtcaggactcactagctccagaggcagatgcacatgtgtgcaattaaaagagcaaacacctgggccaggaaggcaggtgctaagacagaccacaggcaaataggccacagcacccctgtttttcccattttattagcaggccaattgcagagttgatgggccttctctttagtttctctcctgcttcttcttccccataccctccatcctgggcatctcaggccttgcagacagttctctcctccctctcctctaacccacactacaccctctgcaggataaacttccttcctcgtctgactgcctccgccccggatatcctctccaaggcaaagagtcattcactggaagaccgtgagcaggaggaggctggatttaggaaacaatgggtaaaagctgccctccagcagctgagggctgaggacagtctctctcaaaagaggtagccagaaaccagctggagagtcaggaggcagcagttgagtgagagcagttgaggggaggctcagtacccatccccaaatcccacctggggaaaatccccaacatgcagtctgagaggacagagggagacaaccagcacctccagcctccttagcttctgggaggaaggcaagggatgaggggaggacaagaaagacagtaactgagagatcactcctgtgttggaggttctgtgtaatatgctccccaagtagcatccctgaaagaaactgagacattgagaagttaaatagtttgtccaaggaaacctgcgcgttaagtggcaaatccaagagtcaaaactctgccttccaaacaatcccaccaagactccaagccacctcttcatgatatactgatatactttctaccagggcccagtggatttcctcggtgccactgtgatagtatcccagcgtggggagagcctgcccattcattcactctcagggagcagctggtgggtggctggagcccagggctctaggcagagcctgagcccactattgctccagccgattcctgggtcctggttagttcacaacagcaccagaaccagaagcatgcaaaatattctctagtctgtaccagtagatacaatacctgcctcagagggctgattgttagctaacacattgtgatttgctttaaatgtgctcaataccagcccctttatcacttcccagctttcaaggactgaggccacaaaacactgactgcaggctctttcaggtttcagtaaccatcaccacctagcaccaagatttggagtggagaggtttccatgcagttatttcacaagagggaaaactcacacctgcgctcagggacacagatgtccaaggtcaggcccagatgtttgccccaccccgcccgcgggcattttctccccagcaggagggtgagggagggggtggcacggatgccctcatctctctgccatacaatgagcgtcagtggcgcgcagaatcgccgattgttctgcccgacttgcaggcggttgcggggagccgggtcgccctgggtcacgcacacgcggaagtcaactgtgtccaggaagcccaggaaggcccgggatggggacggacctagtgcctccagaaaagagcagcactgcccgggctaactgcggtcacttctcacagttccccgcctgcgacagccccggggctgcggcggggctggcaagaccgggaggcgctgagtgcgtgcccaggcgcccctccgcggcgggcagagccgcgcgactcagggcgcactcacctggcagctggctcggcggcgcaggggcggcaggcgctctcggaagtggcggctgggtgcgcccggcctgcgcgccgttttgttccgctccgcggaaggcgtgtcccgggccacgccaaccagtgggctttgcacactgcaccactccagggctgatgtcatggcgcgaagcccggcggtgctgccctcctaggccccgggaaggccggccggcaggggcgggggcaggagtcgccgactctgggggtgctccgagctcgtgctgcggtcccactgtgcgccctgtcgccgccaccgcggaaaacgtcttgcacgtgcgaggggcatttcaggagtttcctgtctgtcaggtga

SEQ ID NO: 3610 - DNA, 2300 bp, Homo sapien
gataaacacttttttttttgagaaacactcttgctctgtcgcccaggctggagtgcagtggtgcaatcttggctcactgcaacctctgcctcctgagttcaagtgatccttccacctcagcctctcgagtagcttggattacaggcacacaccaccacgcctggctaatttttttaatttttttgtagaaacagggtttcaccaggtctcgaactcctgggtttaagcaatctgcctgcctcggcctcccaaagtgttgggattacaggcgtgagccacagtgcctggccaaatacttcattttctagatcataagatgcttaactttattcctggcaaaaagttgattcagcaaaccagggctttaagtgaagccggttggggcctgaacccttgacacctgcccagggtggaagacatagcagctgcatctatgggccacctggggtgtagggtgaccagctggaggctgtgagcttctctgctccctgaaatgcctgcacggggcactcaggaagggctggggactgggtgaggaggtgtggacagaatgtcccctggaaactgccccaggggcagcttgagtggcctgagcctgtgtctgtcctactgaaggttggagccccagagaaaagcctctatggaggcacccacttttcagaactgctgcttttgcgggagaacacctttttccaggtgttgtccttagggtagcagggaagactgggaaaaactgaggggcaagagctgttggaggggggagttacatttattgagtgtctattacatgccgggtgctgctgaaggtctgcgggtcctaccggatctccttttagcccctcacatccctgtagattacacgccgttcacagatgaccctgaacccagaagggctgtctaggcccagggcccagctagtgagtggatgggcagaatcagacctgccctggaagggtctgtcttaccctggcgcccaaaatgtgtccctcaccctctgccaccaggacaagtaaattcgagacaccctttcgttaggggctcaagtttatcatgggtctgacctctaaggtcatatctccgccttctcacctgacagacaggaaactcctgaaatgcccctcgcacgtgcaagacgttttccgcggtggcggcgacagggcgcacagtgggaccgcagcacgagctcggagcacccccagagtcggcgactcctgcccccgcccctgccggccggccttcccggggcctaggagggcagcaccgccgggcttcgcgccatgacatcagccctggagtggtgcagtgtgcaaagcccactggttggcgtggcccgggacacgccttccgcggagcggaacaaaacggcgcgcaggccgggcgcacccagccgccacttccgagagcgcctgccgcccctgcgccgccgagccagctgccaggtgagtgcgccctgagtcgcgcggctctgcccgccgcggaggggcgcctgggcacgcactcagcgcctcccggtcttgccagccccgccgcagccccggggctgtcgcaggcggggaactgtgagaagtgaccgcagttagcccgggcagtgctgctcttttctggaggcactaggtccgtccccatcccgggccttcctgggcttcctggacacagttgacttccgcgtgtgcgtgacccagggcgacccggctccccgcaaccgcctgcaagtcgggcagaacaatcggcgattctgcgcgccactgacgctcattgtatggcagagagatgagggcatccgtgccaccccctccctcaccctcctgctggggagaaaatgcccgcgggcggggtggggcaaacatctgggcctgaccttggacatctgtgtccctgagcgcaggtgtgagttttccctcttgtgaaataactgcatggaaacctctccactccaaatcttggtgctaggtggtgatggttactgaaacctgaaagagcctgcagtcagtgttttgtggcctcagtccttgaaagctgggaagtgataaaggggctggtattgagcacatttaaagcaaatcacaatgtgttagctaacaatcagccctctgaggcaggtattgtatctactggtacagactagagaatattttgcatgcttctggttctggtgctgttgtgaactaaccaggacccaggaatcggctggagcaatagtgggctcaggctctgcctagagccctgggctccagccacccaccagctgctccctgagagtgaatgaatgggcaggctctccccacgctgggatactatca

SEQ ID NO: 3611 - DNA, 2300 bp, Homo sapien
gctcctaagacaagtgacctgacagtctttgggtggaaaagaggggtgaccatctgccctggactgcctgagatagtcctgttgccttagtgtagttacgaatactaccacataccacttactatccaaagcattctggtttagatgacacattgtacagccattctgtttataaggtgctttaagatctgggagaaatccaagtgtgactgcagtgactgctcttctttttctggatctaccctaaagccatttcacagcacaggttggcatgtcctcacagggaaatctatcaacagtcccatgactccagagaggacaaacccagaccaaagaaggtaatgtaggagtttgcccttttgtaaaatcctgggcaaaactccgaggctcatctctccaagatactgagaattgaaaggagagggggaaatcccatgggatcgccatctttgggcggaagcccttggtctctgacactgatggtggttctgcagtttaatggacctgtttaactattgcttagtcagtgcagccgtgaccagaaattcttctggtttctcctccttcatcttggttgggtcagatgaagatggcccaatctgcaagaaacactggttgtgtgcttctagacattttaatcttggagggccttgtttataggatggacctggccaaaggaaagatgttacttatggtagaaagcaagaaaaacctagataaacacttttttttttgagaaacactcttgctctgtcgcccaggctggagtgcagtggtgcaatcttggctcactgcaacctctgcctcctgagttcaagtgatccttccacctcagcctctcgagtagcttggattacaggcacacaccaccacgcctggctaatttttttaatttttttgtagaaacagggtttcaccaggtctcgaactcctgggtttaagcaatctgcctgcctcggcctcccaaagtgttgggattacaggcgtgagccacagtgcctggccaaatacttcattttctagatcataagatgcttaactttattcctggcaaaaagttgattcagcaaaccagggctttaagtgaagccggttggggcctgaacccttgacacctgcccagggtggaagacatagcagctgcatctatgggccacctggggtgtagggtgaccagctggaggctgtgagcttctctgctccctgaaatgcctgcacggggcactcaggaagggctggggactgggtgaggaggtgtggacagaatgtcccctggaaactgccccaggggcagcttgagtggcctgagcctgtgtctgtcctactgaaggttggagccccagagaaaagcctctatggaggcacccacttttcagaactgctgcttttgcgggagaacacctttttccaggtgttgtccttagggtagcagggaagactgggaaaaactgaggggcaagagctgttggaggggggagttacatttattgagtgtctattacatgccgggtgctgctgaaggtctgcgggtcctaccggatctccttttagcccctcacatccctgtagattacacgccgttcacagatgaccctgaacccagaagggctgtctaggcccagggcccagctagtgagtggatgggcagaatcagacctgccctggaagggtctgtcttaccctggcgcccaaaatgtgtccctcaccctctgccaccaggacaagtaaattcgagacaccctttcgttaggggctcaagtttatcatgggtctgacctctaaggtcatatctccgccttctcacctgacagacaggaaactcctgaaatgcccctcgcacgtgcaagacgttttccgcggtggcggcgacagggcgcacagtgggaccgcagcacgagctcggagcacccccagagtcggcgactcctgcccccgcccctgccggccggccttcccggggcctaggagggcagcaccgccgggcttcgcgccatgacatcagccctggagtggtgcagtgtgcaaagcccactggttggcgtggcccgggacacgccttccgcggagcggaacaaaacggcgcgcaggccgggcgcacccagccgccacttccgagagcgcctgccgcccctgcgccgccgagccagctgccaggtgagtgcgccctgagtcgcgcggctctgcccgccgcggaggggcgcctgggcacgcactcagcgcctcccggtcttgccagccccgccgcagccccggggctgtcgcaggcggggaactgtgagaagtgaccgcagttagcccgg

SEQ ID NO: 3612 - DNA, 2300 bp, Homo sapien
aataaaagtttcctttgctacagggggctgaggacaatcatgaggttgtgaactctttgaggacaggattagatcttggtcaatatctgtatgctcagtgcctagggtagcatctagttcatgcaaggaaggaaaggagagaggaaggaaggaaggaaggaaggaaggaaggaaggaaggaaggaaggaaggaaggaaggaaggaaggaaagaaaggagggagggggggagagggagggagggaggagagtcagataatacagagaggccataccatgaattcttagtcatacctgacctggccactccaggagcgccagaagagttgctggaagcccacatagacatatggtatatgataacatttttttttaaagagatataattcacatgtcatatgattttcccttttaaagtgtacatttcaatggtttttggtatatttacagttttgcaatcatcgccacagaccattttagaacattttattaacctaataagaaagcctgtacccatttgcaatcactcctgctttttcctgcaacatccctagcaactgaaactgtctttgcaaaaattacagcaatgagaaaattatcacagtgaaagagatccgacctaattgactccatcttgcttctaatctccaagctgcccttgttcattcctgggcagaggctaaactaactttgggaggaattcagcttataacttaactttgaagcaaagatgaaaacagccttttcccttaacacagccccttcttgcttggggaccagactgcttgtgtagcactaacaaattagcctcaagattaatgctgacagtccgggcgcacagtggctcaggcctgtaatcccagcactttgggaggccgaggtgggcagatcacctgaggtcaggagttggagaccagcctgcccaacatggtgaaaccctgtctctactaaaattacaaaaattagctgggagtggtggcgggggcctgtagtcccagctactcgggaggctgaggcaggagaatcgcttgaacccaggaggcggaggctgcagtgagccaagatcgtgccactgcattccagcctgggcgacagagtgagactcagtctcaaaagattaatgcagacaggccacgagattttgaacctcccccattgctccgaaagataacatcactattgtaaaacctaagatcagtgctccagacatttttcacactgcattctgatgcaccagctggccccacccagatcggtaatctggctcaaccagttctgggatctcacccaggaacagaggacaggaagaaaaatcccactttgaccccctatgatttcatcgctgacccagccaatcagcattccccacttcctggccccctacacaccaaattatccttaaaaattccagtctccaaattttccaggagactggtttgagtaataataaagcttctatctctctttcaccaagtttttgtaaattaaactcttcattgcaattcccctgtcttgataaatctgctctgtctgcgtatcaggcaaggagaagccattgggtggttacacaagtacttatccactttatgtttctataaatttgcctgttccctgttccgatttttttttttttttttttttttttgagacagggcctggctctgtcacccaggctggagcacagtggcgcaatcacggctcactgcagcctccacttcctggcctctagcaatcctcctgcctcagtaccctctacccccttgcccagtagctgtgactactacaggtgcaggccaccaagtctggctaatttttatgtattttttgtagagatggggtttcgccttgctgcccaggctggtctcaaactcctgaactcaagtgatcagcccatctaggcctcccaaactgctgggactataggtgtgagccaccgcgcctggcctgaacatttcacataaatgtaaccatacaatatgtggtcttttgtgtctagtttattttatataacttaagggaaagcttcctctttgccctctgaaggatcactgaaaaaacaactgatgaaaggcagattaattggagacaaggcatataaatttatcaacatgcacgcgggggagtactgcagagttaccctaacctcccagtggggtataggagcttacataccatctttttttgttgtttttttgagacagggtctcactctgtcacccaggctggagtgcagtgatgcaatctcggctcactgcaacctccacctcctagattcaagcaatcctcctgcctcagcctcct

SEQ ID NO: 3613 - DNA, 2300 bp, Homo sapien
tgactggtttctcagcagaggagccctggcagtgcacaacaaggcacggggtttctccttcccctccttggggagtggggtccagatctccaagcattgagaccttccttcttttaaagccagaactccatgatgtcctgcagagaagcatatctctgacctgatgacctcgctggcttcccaggaaaggacagtcccctggcctctgctatctggctgccttagaggccagtgctggccaacacgcagtactcaagcccttccccactctggcttcacctgctgacaactttgacctctaatgctttcctctaaatgcccctgctccaggcctgaccccacccctgcacctttgctttgctctgcccttttcctgaatgccttctgttatatgaattcaaatccaattctcccctcaaggcccagcttcagagccacctcctccaggaggccttatgactaccccatcgcacaccgctctgcctttcctacccactgattatagtcaggggctgggtacccacattctgcctacttatatcccacggagatatcctcttctgccagctgaattgttaagtgccctacataggttagttagtaagggctcactgatccttgctgaactgaaagacaggggatcttacagttactaagcacctcctattgccagggaccctcttagacatgtaatgttcatcatttcataaaagcctttgaagcaggggctgtcattatcttcattttatagagacatacacttgcccaagaccacacagcaggctgctggtggaatcagaatttgaatataggtctgtgtgtgttccacatcttcccataacttcatgctattaccatgcagctatttctagagacttgcttaatataataactgcatgtgattccaagacatatagaaccccacagcaggaaagtctgggatcctggcagagaaatggggactgggtattagaagggtgagtgaagaatgggaaggagggccctgactctcctgcctgtcctgctgaggagctcctgtaacccagacatctgctgcacctgaagtctgcatgatctaggactgcagtcacattaagactgccccacagaatcctgggagtgagaatgtggcagaggagaatccttcagacagagctggtggtctgtagcaacaccagtcgcttcatagctcagccccatgacctatgtcctggggtcttggtccacttttagtggacctgacagtcccaacaagtcagggtcttctgaggacttccctaatgtcaagccttgggggttctgggttgtcttcttgatttgctatgtggccttaagagaatatatgcagctggtcatctaagaaattgggtggagggaggagctagagaatctctgctccctctgctcaggggcttctagtagggaaaggcagaagaacacctaatctagggtactctgtctgaaactgtactcatttaaaatcagatccctgtgctcctcaggctaataaagagcccaggataagaagtccagatgtttcccacatgtgcttttcctgtatgttgccatggcaactgtcccatacacaccactggggtggatattgcacactgggcctcagcagagctctgcaccacccaggtacatcgcccttagaccatgacccacccagatcagttgtcatggcaactgcaggccggtgagggaaaactccaggcaggcaaaggaaggagagggtagggtgtgtgcctgtggctgtgcccatgtgttggatggggacaagcaaactccttgtgtgagcatgtgtccttcgggatgggcaaatctagagtttaatttgacctgtccatgaagaattggttgttttaaggtcattaaatcacaacactaagagggaccttggagatagtcttactctgtaataaatcctcttaattcactgtgggccacacaaacccaaaaacctgatgaggaaaagcacaaggcccaaacctgtggtgaccttgtcaacacagtgatgacatcactaccctagaacagaacttcttaatctatgttcacagactggattctggaggtccacagtaccagccatcaaacataagccaaatactgtgaatatgtccatttatctggggggatatattgtaatatcagtcaaattcttaaagagattcctgactctaaaaaagtaaagacaactgcgaaagtaatgagaagcttttacccatcttagtctgaaccagctgggacagatggtttaaagaaacctggccttcttactaccctagagagaaaga

SEQ ID NO: 3614 - DNA, 2300 bp, Homo sapien
ttcctatctggaaccacgaaccctagttccacccctgagtttcctaatgctcgacataagcctctgaagccaatctgcattgtgcattgcagatggtacagaatcctcttgtaaacctgtcctccactcctcttgttattcttataattggaatatatacacccatgtccgtctacctgagatgaatgtgttgatgtgtgtgacattgcttttttcacagggacaggattattattttcccaagtcttgtattgtctaccttgtattccctgccagacaggaaatacaagagtccagagttcctcaaggacagaatcgccacctttttttctatgtctccaagacagccaagagtccatgcttcttaccaaacacttctctgcttgagaactctatattctcgtgccacttatcctttctgctatgatccctgtcacggcagattttatggcatctcaatctggaaggcagagagtcctgagataacaccagaacccaagagtcatgcagggtacaaacccagcgtacagtgctcaggcctccaaatccatttaaccaacagagttgcaacacctgctccatgcaaggtgctgagtgacacagttctacacccggagagatcctgcgctggcgggggagacagatagagacacaaatacatttcacaccaggcagcaggtgatgattagtgttaggagagtgtgtgaaccatgagactcacacacagcgttcttcagattctaggagaaagggaggaaaggagctagagagatggaggttgggtttggggtggggagataatctgatggttagacattctggcaaaaagttcttagggctttataatccctagagtgtggctccacctgggcctacccctcctggagcaagctttgctttcagagaattcccctccactttctcctgagagccttttgctcaggcaacctggctgtgacttgggaggccatttgaggatgggcagtgtcccctctactgaggtacagtcctaggcaaactgcagactactccatctggctcttgttccccctccacctcatccctgtcccctgggtccagttaggaggaaaggaagaagggcttgggaaacatcttttaaaagcactctgctgctctgcttaactctggcaggcaagggacccagtgcaaagcctcctcttgattccctaggtttgacacaggcctttacagttccaaagcccttctacctgtgaagctggtattataaccactataaaagaaaacagaaccagaggggttcaatgactttgacaaggtcacattgctaattggaatagaaacccagtttcctgatctcaagagttactccttcccctacaaagccctcagccccctccccagtcaacgctaggccccttctctccaagccacccgtgtcctacccccatcccctacctcctgggctcaggagggcaaccttgagcctcagagactgaagtagggcgggactgggagtttcctgggggaaaaccaaagacggtttggggttgggggaggggaatgagcaccctggataccattcctccacccctctcccgacatctctctcaggcccacgggcccactttccctcccgcattctgagccgccctccctccgtctcttttacctgcacctccacacctcctcaacagatctttatcctggacacggcagggggtccccgtgccctccgagaatccaagaacccgccccgcttctacgcggaaagctgggagaaaaactgcttttcctttatttccccctaccccccactcatccgcccctggagctccgctcgcagatacctccccctcccgagccagaaatagacacactatctctcccccacctccctccccgtgcgcacactcgctcccctcctcctgtttgctccccgccttccccttccctccttcctctgctcggagctgcagcctgcagcctcgactcgggctggctggctggctgagtgcggccggggcgctgcccggcagtgcggtgtccacgggactgacaggcaggcaggccgcgggctgggatccggacaccaaagcaaaagcaccgctgggcgccggaggagccgcggggcttccatccttcctttgactgatttttaaattttaatttgtattttccccgccgccccgccccttttcctccgaccccgccctatcgctccccggcttccctgctctttcctttttcccggcttccttcctcgcgtttctttcccctgcgccctcggcttgcctctctccctcctccctcgctctctc

SEQ ID NO: 3615 - DNA, 2300 bp, Homo sapien
tgttgcacaggctagagttcagtggtgtaatcagggctcgtggcagcctctacctcctaggctcacatgatcctcccacctcagcctcctgagtagctgggactagaggcacacatcaccacacttggctagtatttaaatttttctgtagaagtccaggcgcagtggctcatgcctgtaatcccagcactttgggaggccgaggcaggtggatcacctgaggtcaggagttcaagaccagcctggccaacatggtgaaaccccgcctctactaaaaatacaaaaaaattagcctggtgtcgtggcaggctcctgtaatcctggctccttgggaggctgaggtaggagaatcacttgtacccagaatgtggagcttgcagtgagctgagatcatgccattacactccagcctgggcaagaagagtgaaactccatcgcaaaacaaaaaaaaaaaaaaaagaaaagaaaagaaaaaaaagacatctgtagagacagagtctcactatgttgcccaggctggtctcaaactcctgggctcaagcaatccccgatcccccctgaacctcccaaagtgctaagattacaggtgtgagccactacacccagcctccttaattcttaaaatagtgggcagcacccctcagtctgtgcagcattaatctggataacagtgtctgttcaaacccagcagggttggtgaaaggttggagtaagccaggtattccagaggggctgctggaggtattctagttgctatgccaactaatgctagctaaggagtgctccttcctctagtgtgtcctagtaacctacaattgagctgctggagttttcacctagtgtgatgacatgcaatttggttgacaatcaagatgggtaaggatcaaggaagctgttgagatgagcttggcttttcccccaccagctctgcccacctgtctacctgtccactgtctcccctctttaattgtcaaccttttccttatgttctgtgataagccagctgagcttgtgtggtgcctggaaattccatgtagtctgatattacagaaagaacacaagtttggaagtatgacaggcctggtgttcagatcccagctctgagtctttggaaaagctgtttatctattttaagcaagaatacgaatacggcaatagtattgttcttagcatgtagtgaaatatagtgtatgtaatacacttggtggccaggcacagtggctcacacctgtaatcccaacactttgggaggccaaggtggatcacttgaggtcgggagttcgagaccagcctggccaacatggtgaaaccccatttctactaaaaatacaaaaattagctgggcgtggtggcaggctcctgtagtcccagctacttgggaggctgaggcacgagaattgcttgaacctgggaggtggaggttgcagtgagcagagatcggactccatcttaaaaaataacacttggtggccaggtgcggtggctcacacctgtaatcccagcacttcgggaggccgaggcgggcagatcatgaggtcaggagatcgagaccatcctggctaacacggtgaaaccccgtctctactaaaaatacaaaaaattagccgggtgtggtggcgggagcctgtagtcccaggtactcgggaggctgaggcaggagaatggcgtgaacccgggaggtggagcttgcagtgagccaagatcgtgccactgcgctccagcctgggcgacagagcaaaactgtcttaaaaaaaaaataaaagaataaaaataacacttggcatgcagcaggtgtcagtaaatgttacctccatcccttctcttggttactcctagaaaaccaaagctataaaggccatcatctatggccaactattccgcctgggtggtgatgtccagttgcccacccatctttgcaaaatcccctccctccagggagcctttcctgattcatcacactggactctgggttgtcctggaacttgtgtgcataattcatactgcaagtaatttgcacttttatgattctctcgcaattgcatagcatgcatggtttgcacacactaatatggcattatcttatttaatgttaacagcactgtgaattagacattcttcccccctccaatttacaagtgaagaaattggaactcagattaactggcttgggaggatcatataactcaaagtggccccaccagaacagaacccaggcctctgcctctgacattctgggcacgttccagtgcacctactgcctcaccatgtgctccttgaagcctttccctctgtgtgcagcc

SEQ ID NO: 3616 - DNA, 2300 bp, Homo sapien
ttgggcgctcttactcgcgctgcactggcaggagggggtgtgagcagcgagccacttctctctggggcacgggtgggtaaggagttggggaggcctgggcagaaccttctccatagagggcttcctcccggcctcctcctggctcctttccaggcttttagaaatttctaaaaatcggagcatgggtcagtgcattgcctaaaacaaggtccgtggagggatgtggtgggaaacgaaggtccgataggggtgcatattaccacaggttggctcacgacccttctgctcacagccgggagccaagtaggatggcgcgaccttccgatgtcctaacaacctcagggggtggggcctaacatctctccagcattcaggagaccacagattaggtgaggtgtgcttgctgggggaagattgtgggagagaaacaacagctcacgccacccaaggatctgtgtctttatccaggatgcattttcaactgaccggttaggaaaaaaacagtgggatccagtagcagggtcctcccattgggttcctcccccctgagggtcctcctggtaacttcactctcctggttccagagaaaggagccctgtggggggaattagcctgctgccctcacccttgcttcctccagttctcactcttggctcctggaaggggctaagtgtctatggttgggtcccaatgccaatgtgaactgggcaaactgggaagcctacattttagagatggacaaattatacctgcagtttctttaagcgacaaaaacaacagtagcatttttttaagccccctaaagtgctgaactaagatgacttgggaccacagagcagtagtctctagtgtttgggcagtttgatgtgactgagccacacatacagatccaggtcacatgtgttctcttaagcctatctttccaggcctcagtttttacagatgttaagggagaggtttgcactcctgaactcctcctcctcgctctcactgcctttaaagaggtctgggtggtgctttgagtcctaggaacaatcctttcccaagccccccagcaatgcaggctgcccctactattttcggcccacaggtcaatgcactttgggtaactgtacagcccctctgcccctactactctggctgcccaatgccactgacctggggctgcagctctagagtgatgaaccacagttcttagaggacagaaaacctcagcagagggacctctgtttctggagaatggaacagtttaagttggaggaagggtctttgtttctgaggttgcacattgtggccaagttttccaaatatgctttgagatcaaaggggagtaaagagctgcagtgatcctagcgccaatccctcagacttccccctagcatggggggcagacagatttttattccctttactctgttctaagaggtttgggtagtaagacttagaaaagatgcaccagctcccaagcagaccagctctgagggggaatcagagcaaggcagacggttctctctcacatattcttccatttcattccaggatgatgtccctggccaagccctatcctggctctcctgttctggtaatgtcctgagcctcccatcctcaccaccacccgaaacggggtgagcacaatgagttctctagggaggctctgtccacgcagctgtgctggagctggcctgggtcatctggggaacagcttacagtgacgtgccataagggattctctttagcctcagccagcatggaatcctgagtaaaatgactttgtctcagccaaaggaatgtcatcagcaggggatgtttttctccagatctagctgtaagctttccataaggtttcctcctttgtggttttctcagcagggagggcctggaaggagggagatctgaggcctgaaaggggtaggcacaggggtttacttggagggacaggggtcttgtgcatggagctgagctgttcctgaacattccctcgcagccccccagagaccatgtggctccatccctcatcctcatacctggaggcctgcccacccttccttccaccctcctccctgtgtgtctcacctcacacagggactggaggagcaaaccataaagagaacaagtctcagccagtagctcagctcaggggagaggctctcagctgagtccccactgaacattctggggtatagggtctctaaatcacctccttcttgggattgattcctgagctgccagaacccaacagaaggcaagtttcctgctataagttcctctttccttcttgatgaggacggtaagtcccacag

SEQ ID NO: 3617 - DNA, 2300 bp, Homo sapien
ataccccagaatgttcagtggggactcagctgagagcctctcccctgagctgagctactggctgagacttgttctctttatggtttgctcctccagtccctgtgtgaggtgagacacacagggaggagggtggaaggaagggtgggcaggcctccaggtatgaggatgagggatggagccacatggtctctggggggctgcgagggaatgttcaggaacagctcagctccatgcacaagacccctgtccctccaagtaaacccctgtgcctacccctttcaggcctcagatctccctccttccaggccctccctgctgagaaaaccacaaaggaggaaaccttatggaaagcttacagctagatctggagaaaaacatcccctgctgatgacattcctttggctgagacaaagtcattttactcaggattccatgctggctgaggctaaagagaatcccttatggcacgtcactgtaagctgttccccagatgacccaggccagctccagcacagctgcgtggacagagcctccctagagaactcattgtgctcaccccgtttcgggtggtggtgaggatgggaggctcaggacattaccagaacaggagagccaggatagggcttggccagggacatcatcctggaatgaaatggaagaatatgtgagagagaaccgtctgccttgctctgattccccctcagagctggtctgcttgggagctggtgcatcttttctaagtcttactacccaaacctcttagaacagagtaaagggaataaaaatctgtctgccccccatgctagggggaagtctgagggattggcgctaggatcactgcagctctttactcccctttgatctcaaagcatatttggaaaacttggccacaatgtgcaacctcagaaacaaagacccttcctccaacttaaactgttccattctccagaaacagaggtccctctgctgaggttttctgtcctctaagaactgtggttcatcactctagagctgcagccccaggtcagtggcattgggcagccagagtagtaggggcagaggggctgtacagttacccaaagtgcattgacctgtgggccgaaaatagtaggggcagcctgcattgctggggggcttgggaaaggattgttcctaggactcaaagcaccacccagacctctttaaaggcagtgagagcgaggaggaggagttcaggagtgcaaacctctcccttaacatctgtaaaaactgaggcctggaaagataggcttaagagaacacatgtgacctggatctgtatgtgtggctcagtcacatcaaactgcccaaacactagagactactgctctgtggtcccaagtcatcttagttcagcactttagggggcttaaaaaaatgctactgttgtttttgtcgcttaaagaaactgcaggtataatttgtccatctctaaaatgtaggcttcccagtttgcccagttcacattggcattgggacccaaccatagacacttagccccttccaggagccaagagtgagaactggaggaagcaagggtgagggcagcaggctaattccccccacagggctcctttctctggaaccaggagagtgaagttaccaggaggaccctcaggggggaggaacccaatgggaggaccctgctactggatcccactgtttttttcctaaccggtcagttgaaaatgcatcctggataaagacacagatccttgggtggcgtgagctgttgtttctctcccacaatcttcccccagcaagcacacctcacctaatctgtggtctcctgaatgctggagagatgttaggccccaccccctgaggttgttaggacatcggaaggtcgcgccatcctacttggctcccggctgtgagcagaagggtcgtgagccaacctgtggtaatatgcacccctatcggaccttcgtttcccaccacatccctccacggaccttgttttaggcaatgcactgacccatgctccgatttttagaaatttctaaaagcctggaaaggagccaggaggaggccgggaggaagccctctatggagaaggttctgcccaggcctccccaactccttacccacccgtgccccagagagaagtggctcgctgctcacaccccctcctgccagtgcagcgcgagtaagagcgcccaagggaccacagctggcatcccaggggttaatttcggagcagcccaggtggaggtcgagcccccagccccgtcggcacctccaggcttccgaggccaccggaacggaggaggcttcggtgg

SEQ ID NO: 3618 - DNA, 2300 bp, Homo sapien
tatggaaagcttacagctagatctggagaaaaacatcccctgctgatgacattcctttggctgagacaaagtcattttactcaggattccatgctggctgaggctaaagagaatcccttatggcacgtcactgtaagctgttccccagatgacccaggccagctccagcacagctgcgtggacagagcctccctagagaactcattgtgctcaccccgtttcgggtggtggtgaggatgggaggctcaggacattaccagaacaggagagccaggatagggcttggccagggacatcatcctggaatgaaatggaagaatatgtgagagagaaccgtctgccttgctctgattccccctcagagctggtctgcttgggagctggtgcatcttttctaagtcttactacccaaacctcttagaacagagtaaagggaataaaaatctgtctgccccccatgctagggggaagtctgagggattggcgctaggatcactgcagctctttactcccctttgatctcaaagcatatttggaaaacttggccacaatgtgcaacctcagaaacaaagacccttcctccaacttaaactgttccattctccagaaacagaggtccctctgctgaggttttctgtcctctaagaactgtggttcatcactctagagctgcagccccaggtcagtggcattgggcagccagagtagtaggggcagaggggctgtacagttacccaaagtgcattgacctgtgggccgaaaatagtaggggcagcctgcattgctggggggcttgggaaaggattgttcctaggactcaaagcaccacccagacctctttaaaggcagtgagagcgaggaggaggagttcaggagtgcaaacctctcccttaacatctgtaaaaactgaggcctggaaagataggcttaagagaacacatgtgacctggatctgtatgtgtggctcagtcacatcaaactgcccaaacactagagactactgctctgtggtcccaagtcatcttagttcagcactttagggggcttaaaaaaatgctactgttgtttttgtcgcttaaagaaactgcaggtataatttgtccatctctaaaatgtaggcttcccagtttgcccagttcacattggcattgggacccaaccatagacacttagccccttccaggagccaagagtgagaactggaggaagcaagggtgagggcagcaggctaattccccccacagggctcctttctctggaaccaggagagtgaagttaccaggaggaccctcaggggggaggaacccaatgggaggaccctgctactggatcccactgtttttttcctaaccggtcagttgaaaatgcatcctggataaagacacagatccttgggtggcgtgagctgttgtttctctcccacaatcttcccccagcaagcacacctcacctaatctgtggtctcctgaatgctggagagatgttaggccccaccccctgaggttgttaggacatcggaaggtcgcgccatcctacttggctcccggctgtgagcagaagggtcgtgagccaacctgtggtaatatgcacccctatcggaccttcgtttcccaccacatccctccacggaccttgttttaggcaatgcactgacccatgctccgatttttagaaatttctaaaagcctggaaaggagccaggaggaggccgggaggaagccctctatggagaaggttctgcccaggcctccccaactccttacccacccgtgccccagagagaagtggctcgctgctcacaccccctcctgccagtgcagcgcgagtaagagcgcccaagggaccacagctggcatcccaggggttaatttcggagcagcccaggtggaggtcgagcccccagccccgtcggcacctccaggcttccgaggccaccggaacggaggaggcttcggtggctctttgtctacctgctctgggtgttaaagagcccgctcgcagcctgcatcgccggggctcgggacagaagtcagcggcggggaaatggggctctgtcactttaagtacagctggagccgtaagtacaagccctggtggtggggagaaaagggagcggagggcaggcgagggttaggtttccgaccctccgcgtggcccacagctcataccttttcgggtgtccccgggtgtcaggcgagagcggtcctggggggcgctgggtgcccacccggtgaatggccgcctgagccggggaagatgcttcatctgcccctgcccagatccggaagaacggtgaattt

SEQ ID NO: 3619 - DNA, 2300 bp, Homo sapien
tttgcttgcttgccaaagatcttatcttgacctggaagagctgataggatcataaaaccagcattgatctttcctcagtattctttctctacaaagtgagggggtatgacatcttagcccaggacaaatgtgaggtttaatatacatcaggaggagaagaggggaagaggttgattgtcattcaataacggctatatttcatagtcataaaatttaaagaactctgtagtgtgttctaatccccatgctttctttgctctttctcaatgtatttggataaatcactacagagcaacaaagccaaaatgtccaaaccacccactttcctattcccagcacatgaattagagggagccagctgagatctgggccaaccacttagatgacttgcatgtctgatttttgttccatgatatgaaactcagaataaatcaaaaagaaaaattttttcagatagcagctaattcacacaaaaaaatcttcagccttttagtccttgcatatatgcaatgctgataaacaaacctactctgcacacagataacaaggatttagaagttaattcctaccggcacaaacaaatactcatgtatagcagtcttactgaacttccgtgttcagttttaggctgtaaaacttgagtgaaatctgaagaactttttaaggtccaaaaggaattgagaaagacttggaaaacaggacctttgaagaaagcttacaggagacagaattcgagcttagaaaacaatgcatgtgatcgaaaagaaatgtgaatagcaaagatagaataagaggaaattaatataaatggtagaggaggctagttttgaggctaagggtaaactttctgactgaaacttgttaaacccaaaaatgaacagccaggccaggcacggtggctcacgcctataatcccagcactttgggaggctgaggcgggcagatcacttgaggtcaggggttcaagaccagcctggccaacatggtgaaaccctgtctctacttaaaaaaaaaaaaaaaatagtagctgggtgtcgtggcgggtgcctgtaatcccagcttcttgagaggctgaagcaggagaattgcttgaacctgggaggcggaggttgcagggagctgtaattgtgccactgcattccagcctggggcaacagagcaggactccgtctcaaaaaaaaaaaaaaaaaaaaaaagaacagccaaatgaatgtttgtagagctcaagctacaaagatatggaggttgtagtaagttcacttagtgcatgaagtagcgtttttggatacagatgtttacagataaagatgtttaacagcagtatctccctaataccacagacctgatattccaagcaattggcagagaaatgaatccattcagcacaaatttggcccctctacatggccacagcaccttagatttggttcacttaacagaagaacagtatgttctgtttagaagcaggacccgatcccaggatagggtgaactgcataaacggaggctcaatgagaaatgataaaagtctaagaggttctagaaaagagaaatctttttctgggcctcattaccagttatagacatttttagaaaaggagggggagaatagatgcagaacgcgtctaaaaatgaacaaagatatgttaattttaagaatggaggttgtttacagggagagtaaattggtttgtataattagattgatccaaaaattaccttgcctttataaaatacctttctgttaagaagatacaacgttttctcttgccagataaaggcagagtctcttccttttgtaaaagaacatcaccaaattacaaggaagtttaagtcacactttgagttgctgacaaacctaggacaaacccccaggttttctccttttggctagcctatatactggtgcagagccattcttgcatcaatgtgaaacatttattttttgcctgggcttctgttttaacgattgaccttcatctctcctgtcctgtagctgggatgaaagcagctccatcagtagtggactcagcgatgcctcagacaatctcagttcagaagaattcaatgccagctcctcactcaactccctcccaagtactcccactgcttctcgcaggaactcaacaatagtggtacgtgagtttgcaaacacccaagctgccatctcaagatgaaccacagggcaaatggcattatctgtgtatggggttgcacgtacacacccactccatgggattggttctcataggcctttggccaggtcattttagagttgcccccaccccctcccaaaaaaag

SEQ ID NO: 3620 - DNA, 2300 bp, Homo sapien
agcagcagttccctcaccacactagttattctctcgattctcttttcccaaaccctcaattcataagttgtaccagtttgtttgaagctcatgttaagcactttttcccactcttgggggacccataagaattgtaacataaacaagaaccatcttttctctcccttgtgccacacccaccaaagcaaatggcctgggtcacgtcctgcacaccccaggaaattcatgtctgggagatgctgggggggagaggcgccagggaggcagagaacattattatgtctgattcatttacactgcaatctgtcagccaccatgctgtcaaggctgggctgaagccaagaaattgaatttagagggtgatttttcttagaacaggaagttccatttggctaagagagaacaaactaaacacccagacacggtgggttctgcatcttaaaggcagatttttgccgagggtcagaaccctgccctcaagcaggagatgggatgctgggactctaggaaggttccacagctctcttcaggattccgtgactccaaaccaaacttttgtcatgttccatggaacttcctagccactaaagctgagggcacaccctagatgtaggggcccagaccactttacccctctcaaatgctagcctttctgcagcaccactgcttagccctgaggtcttacaggtaccctagtctggggttgggattaagggaagggtcaatgtagggagaggaagtgtaggggagagcggggagaaagcccagccagagcaaaagggttcccctggatggggaaaggcagcacagaagagcatacaggggttcttggggcctctcatgagtagtcttccagggactacaaggagtctacaagcagacatgcaggatgtagagaagcaaaccagagaagacctgaggtcaagaagacagatgttgcctgcacagtgggtgaaaggaaactgctcaggttgtgacatattataatctcctcagagcccaggccttgacagatttatagtaaaagtgcaagaggaggctctaactggactaaagggattgcctccagccctggtcctatgaagtaggctccagacatgcggagcagtggatgaaaactagagttgacccaacagggagggagaattgtaagccagtaggagccatgagagtgccgtcgatttcctagagctctgcatgaaggagctgcgcagagtatgcccacttcttgctagggtcaccaacttgctcagatagtctcacgatggctatttctccatccccaagtgctcccctttctagcccccggcctcattccctttaccttgcctatacatcttgcagccagttggccagctagaggtcaaactatgccaaaccaagtggccttagctcctccactgagcacctttccgaactagcctgcctcttatccagagagccctttggtatccttcactcctcatgaaacagacctgacacctagtggccaaacggtggaatgcctctgcagtttccttccagccttgcaaacctggagaatccgggaacaaggagcagctgcaaagcaagaaagggtgaagcagtggagtagcagaggaggaagaaacgcaccaaatagtttctgccaggagattatttggtcccttgggggccggcccactccacaatgcaggagttaaaccaaaataataggaacgaccccagaggctatggcccgcctaccaagttggccacaccaaatatcacatagagcagagggatagtcctacctctggtagttgataggttttagatctcaagtctccaggagcctctggaaacctgccctaccctcaacctggcttcattattcaagaagctggttcccaccagaaaatttctttgatttcccctttgtctgctcaggaaaatcaatatttttttaaccaccaagaggtttgctggcattggtcagctccgagatacaggaaatcagttaaaactatttcccattgtcagttattgcctttcccccagccttatgcaacttagcaatctctttctgtgtttgtttcaggctaatctggtggctgcttttgagcagagcctggtgaatatgacatcccgcctgcgacacctggcagagacggccgaggagaaggtgagaggcctgggaaagggtgggaggggtgggtgcggcgagggggttctcctggacagagaggccgaagctgaccatctgttcttgctcatgaatgccagtttctccccacctcactgtcaccctggattctcaatctgccccccaatacagtgtg

SEQ ID NO: 3621 - DNA, 2300 bp, Homo sapien
gattaagggaagggtcaatgtagggagaggaagtgtaggggagagcggggagaaagcccagccagagcaaaagggttcccctggatggggaaaggcagcacagaagagcatacaggggttcttggggcctctcatgagtagtcttccagggactacaaggagtctacaagcagacatgcaggatgtagagaagcaaaccagagaagacctgaggtcaagaagacagatgttgcctgcacagtgggtgaaaggaaactgctcaggttgtgacatattataatctcctcagagcccaggccttgacagatttatagtaaaagtgcaagaggaggctctaactggactaaagggattgcctccagccctggtcctatgaagtaggctccagacatgcggagcagtggatgaaaactagagttgacccaacagggagggagaattgtaagccagtaggagccatgagagtgccgtcgatttcctagagctctgcatgaaggagctgcgcagagtatgcccacttcttgctagggtcaccaacttgctcagatagtctcacgatggctatttctccatccccaagtgctcccctttctagcccccggcctcattccctttaccttgcctatacatcttgcagccagttggccagctagaggtcaaactatgccaaaccaagtggccttagctcctccactgagcacctttccgaactagcctgcctcttatccagagagccctttggtatccttcactcctcatgaaacagacctgacacctagtggccaaacggtggaatgcctctgcagtttccttccagccttgcaaacctggagaatccgggaacaaggagcagctgcaaagcaagaaagggtgaagcagtggagtagcagaggaggaagaaacgcaccaaatagtttctgccaggagattatttggtcccttgggggccggcccactccacaatgcaggagttaaaccaaaataataggaacgaccccagaggctatggcccgcctaccaagttggccacaccaaatatcacatagagcagagggatagtcctacctctggtagttgataggttttagatctcaagtctccaggagcctctggaaacctgccctaccctcaacctggcttcattattcaagaagctggttcccaccagaaaatttctttgatttcccctttgtctgctcaggaaaatcaatatttttttaaccaccaagaggtttgctggcattggtcagctccgagatacaggaaatcagttaaaactatttcccattgtcagttattgcctttcccccagccttatgcaacttagcaatctctttctgtgtttgtttcaggctaatctggtggctgcttttgagcagagcctggtgaatatgacatcccgcctgcgacacctggcagagacggccgaggagaaggtgagaggcctgggaaagggtgggaggggtgggtgcggcgagggggttctcctggacagagaggccgaagctgaccatctgttcttgctcatgaatgccagtttctccccacctcactgtcaccctggattctcaatctgccccccaatacagtgtgagcatattccttatcccaattccttgcccttctctatcaagttttgcagaattccaatgcctcgcccattgcctgacacatcataagggctcagggctcctgctaatcccaactaatgacgctgttttctttttttgagatggagtttcgttcttgtcacccaggctggagtgcactggcgcgatcttggctaactgcaaactctgcctcccaggttcaagcgattctcctgcttcagcctcccaagtagctgggattacaggtgcccgccaccacgcccagctaatttttgtatttttaatggagaccaggtggccaggctggtcttgaactcctgacctcaggtgatccgcccacctcggcctcccaaagtgctgggattataggtgtgagccaccgtgcccagccaacgctattttcatttctctcttaggacactgagctgctggatttgcgagaaaccatagactttctgaagaaaaagaactctgaggcccaggcagtcattcagggagcccttaatgcctcagaaaccacacccaaaggtaggacatccagccacagattgagagggaacagggagcaggaaagtaagagtattacagatttttatctgggcccatagtattccaagtcctatatcaagtctctagaaggtgagggcctttagataccctttagtgtgatgtctggactggtcagtgagg

SEQ ID NO: 3622 - DNA, 2300 bp, Homo sapien
tcagaggcatcatgaggtggcctctgaggcccacagtgagccaggttctagactgagcggttattgttctgctgcagaaggtgggattggatcactgagctgtataccatgtgacctctgggaccttctctctgtccccatcaggggcacaattccccctatgagcaagagaacacccaggaagttcccatagcctacaacatcagcaagctagaagattctgttctttctcttggtcctaatttcctttctttctttctttcttttgagatggagtctcactctgttgccaggctggagtgcagtggctcgatctcagctcactgcaacctctgcctccacggtcctaatttctaggcaactcttctgtccgtattctatgaatcaagtgaagtgttatagagggtggcttaattaaagtaaatcccccgcctccagctctctctgtctcagaagtctcaatccagtcctcccccatcccagtagtggagtcctaatgtccctctacctggatctgcttttttctagcttcgaagttccttcaacaaagcgttcagtataaaaaaggggcccaagtcagcttcctcatactcggatatagaggagattgctacacccgactcttcagccccctcatcccccaaactacagcatggttctacagagactgcttcaccctccatcaagtcctccacctcgtcctccgtgggcactgatgtcaccgagtaagtgctctttggctccctgccacccagcctgttaccagtgtaagctgtgggctagagttgacaggaggccattagaccttagacaagcagtacttattactgacctctccctgggcatatgagaccaacagatggacctttcttctcatgctgattgaatatcaatgggcaggagaagccaagaccaccaaccatgcctctcaatattctctagtaactctagtgcttcttcatgtagcctggcttgactcttgctatcttacaggggccctgctcacccagccccccacactaggctgttccatgcaaatgaggaggaggagccagagaagaaggaggtatcggagctgcgctctgagctatgggagaaggaaatgaagcttacagacatccgcttggaggccctcaactctgcccaccaactggatcagcttcgggagaccatgcacaacatgcaggtcagtgtctgggcggacagctgcaggaaagggaagaccaaggcttgctgtctgtccagtctgccaccctaccctgtctgttcttgccacagttggaggtggacctgctgaaagcagagaatgaccgactgaaggtagccccaggcccctcatcaggctccactccagggcaggtccctggatcatctgcattatcttccccacgccgctccctaggcctggcactcacccattccttcggccccagtcttgcagacacaggtacctgtgtgggagaagaatctataagggtgaagggaagaaaagggcttatttcactgttacaccattccacttgctttggtcagggcggtaacaatgccgaagccaagcagatgccagtgtcctaagacactgagttgtaatggtccttcaaccttaactacttttgagtttgggacctccattccttctctgtggcaaacagagttattttggaaaggataatgatgggaaagtttaggaaaggctgcgggtactcctaaaaccagttggttcttttcaatccccacagacctgtcacccatggatggcatcagtacttgtggtccaaaggaggaagtgaccctccgggtggtggtgaggatgcccccgcagcacatcatcaaaggggtaaggaacttcagggagagccacagtgggaatgaacaaatactgttacatttatccaagaaaatctggaccctgggtacctccaaaaccaaagaactcaactcctaaggcctttaggaccccggttcatggagtcatctgcagtgaagctcaagagcttttccttccttggccttacaggacttgaagcagcaggaattcttcctgggctgtagcaaggtcagtggaaaagttgactggaagatgctggatgaagctgttttccaagtgttcaaggtaaagggatacctgtactcaaaaaggttgttcatcctctcgtggaatatatatacttttttagagacagggtctcactcttgccacccaggctggagggcagtggcgtgatcacagctcactgcagccttgaactcttgggcttaagtaattctcctgtcgcagcctcctgagtagctgggattac

SEQ ID NO: 3623 - DNA, 2300 bp, Homo sapien
ctgactcccatggttgggggtgggaggaacccctgctcgcacattatggacatagaatccttcaccggatctcaaaacatccagcccaaacatcaaggctccggagtcctccatctgggttgctgcagtgtttgaaaacataccaccctcttgactttgctaaattttcttcttggggtaaaagtgaactgacctattagaagctgttgtaatcaagttcaacttcttttggccacttcaagaaagtaaataggcttactattccccattgcaaaattgaagggtccaagaagcaatcttttccctatgaaattgtagtaacataactcatctctgccctcttaacatgggaggtgacaagtgtgttgagaactctcttcaagccagttgcagtgggtgtacctgtagttctagctactctggatgctgaggtgggaggatcacctgtccagcctgggcaacatagcaagacccccccaactcaaaaataaataattgagaaagctttcttttgaagtaatcttctgatgagatgacttaatccctgattgttaccagtccagcatccacagtcttggaagtgacctaggatttggtaactcgtttcctttgccatgtgagaatgaactcacttgataagggttcctgggaaccattttgaaggcacataacctgaacagctcactaaaaaatacctgtttctgtttgctctagaacctcccattccaacaacattctatcctttctgccactacatgcttgccactctgccctgcattttttttaatttttatttttttttatagacagagtctgtatatcttgcccagactggaatgcagtagctattcataggtgtgatgacagcacactacagcctggaactcctgggctcaagtgatcctcctgccttggcttacatcttgctttttcttctttttctgagacaagatgtcactctgtcgcccaggctggagtgcaatggcgcaatcactgctcactgcagcctcctcctcctgggctcaagtgatcttcccacctccacctcccgaacagccgggactacagggcgtacgccaccacgcctgggcaatttttgtatttttttgtagagacgaagtctcgctatgttgcccaggctgttctcgaaatcctgggctcaagcgatcctcctgcctcggcctcccaaagtgctaggattagaggcgtgagccactgcgcctcgccacaccctgcatttttaacacctcactggagcgctcatcctctccacctgctccgctattcaggagcggctctgcaccgtaggccatttcccacgaccagctgctgacaaccatatcatcaaactgctcttgttctcgcaccccttaaatgtccagccataatttctcagggaaaaaaatttatacattttcaacaaataggattcattctcaaatagtcacatacaacactcactctggaagaaactccctttcacatgccggtgtctcccctgcccagccacttcccagctttgaggttgggctcatctaggctggaaaaccaagggactgggccgtggttttcccacttccacttcccagtttgctttagtttattttcccccctctttggattcctgaggctaagatgaagagagtcacttgagccaactttttttcagtgtttggggggaaaagaatgtggtttaaaataggggctatttgtgacccagacctctctccttaaagccctctacatctattcccatcccgcctcctctctcctaacacctgaaagatgcatgaatataaagtcatatatcatgaactttattccaaatgagattgctaacttactgtgcaactttaggaaagccccttaacctgtctggggctcagttttcacacaaatccagagatccttgcagagaaaggtgcagttctcgttcaggcagcaggaggcgctgtctctggaggcttagattcattccccgccctccgcccgctcccgcccgcctctggtgcgcaggcgcggcttcgcggattggccgcgcgcgggggccgtcattcggtggcgggtcccggccgcggggctggcgggctgaggggagaaaagatggcggcggcggcggcagctggtgcggcctccgggctgccgggtccagtggcacaaggattaaaggaagcgttagtggatacgctcaccgggatcctatccccagtacaggaggtgcgggcggctgctgaagaacagattaaggtgctggaggtgacggagggtgagtgaggcgggaccgtcacgaggatggctca

SEQ ID NO: 3624 - DNA, 2300 bp, Homo sapien
aggctagagtgcagtggtgcaatctcagctcactgcaacgtccgcctcccaggttcaagtgattcttctgcctcagcctcccgagtagctgggactacaggcacgcgccatcatgcccagctaatttttgttttgcagtagagacagggtttcaccatgttggccaggatggtctcaatatcttgacctcgtgatccacccacctcggcctcccaaagtgctgggattacaggcatgagccaccatgcccagcctaatgaatttatatttgtagagacggggtctctccctatgttgcccaggctcatcttgaactccttggctcaagtgatcctcccaccttggcctcccaaagtgctaggattataggtgtgagccaccacacctggcctgattgaattttcaacttgtaaaaagcttagtcttcttttgagtcttacttcttcaaacaccttatcctatatccttttcatagtagtcatcccttagaactttcctactcttttatggccctcttgtgtgaagcaaagctagctgaaaaataccaatccctgtgattcagaagcagttaggaggaaagttggtcttacataatagtttttaagagggctttgatgaagaactgcaagtgctggttaaggaaaaatgaaatcttaggtaacaccttcattgactttatagctattctcttctgatcaggcttggagcctgaagagagctttaggtgcctttcaaatatcagtgtttgatatatatgtgttgaagccatggattaggggtttgtccagtattgactttggtttctgttatcagggtgcagccaaagtcctgatctttcccgtggtacagcagttcacagaggcctttgttcaggccctccagataccagatggccccacatctgacagtgggtttaagatggaggtcctaaaggtaaacacttactaccaatgaaatatttggagtttgaggggctggtctgaaatcatttatttcttatatatcactcataacttgggtccttttctcttaacttcttaggcagtgacagccctagtgaaaaacttcccaaagcacatggtgtcctccatgcagcagattctgcctattgtttggaacaccctaaccgagagtgcagctttatatcctttcttgaaagtttaagggagctactaccacctatagttaggaatctcgcactgggtttcacattcatatggttccactcttcttacacaggcttttttaaggtgtctacttttagtgttggaatatgtaacatttccatgtagattatatgtaaagcagactccaaattctatttctttactcttcatcatacttatgtgaggacagaagtaaattacacagaagaagtagaagatcctgtggattctgatggtatgtagtttatttgatctttatagaaataccagttagtgggaaaagaaaaagaagccagagatgggggcgggaaacagtaacttgagaggcttcactctattaagtgttttctaattcagtttattttcgatgtattcgatgtggggaaatgagaattgacaatctttaatctgttccacataggtagttgcataaatctcataaaatcatagaatttctgcattggaagagatacttttaaggccatttaatctagcctacttctggcattttgttgtgtttcatttgggggtcccagatcatgaatctttcgtttctgttttaacatttctcattatttcagattagaacaatagacatactggaaaatatatccagtgtttctgattcttttacttgaaaaaccaaagaatatttaatatcctcaaaattacgttttgtgacctctgagccctctctcccaattcctcaggaatgatcattagcaagtactttaaatattcagtaatttacaaaggttatgtagttcattttctgcatatatgctttccttttgctttcttgtcattaatttcttctcttctgtatttcctgcaggtgaagtcctgggctttgaaaatctcgtctttagcatttttgaatttgtccatgctctactagaaaatagcaaattcaaaagcactgttaagaaagccttgcctgaattgatttattatattatcctgtacatgcaaatcactgaggagcaggtaaataatatttgagagacagttaccatcttgtatttggaaagtgcaacttgaagaatatgaggtcttggtcaggtgaacactttatttctaaaaatagacacaaaaagaataatttcatgtgaagttctgggaaaggtttgacat

SEQ ID NO: 3625 - DNA, 2300 bp, Homo sapien
aaagtaaaatgtaataatcagaccattagcctgatggtgggtcatcaaaagcagcaaagaacgttcaaaaattagataacgcctcgtttaaaacagcacaagaattgacataattttcacaataaatagtctatcagacttaatctattcagaaaatcgatctatcaaagggtaacagcaggttgacattggcagagagctagtaatcagccagattctaaaagagagcaatagccattgctacctaccttgctacttaatagtatttatttctctacatcaaaaagaaaagatttttttaagctagagtttttgtttcagtttttgttgttgttgttgttttgttttgtttgctttttgggacagggtcttgctgttttgctcaggctggagtgcagtggtgtagacaaagctcacggcagccttgacctcccaggctcaagccatcctcctgcctcagcctcccgagtagctgagaccacaggcatatgccaccatgcccagttgacttttttattttttgtagaggtggggtctcactatgttgcccaggctggtctcaaactcctgggctcaagcagtcctcccaccttggcctcccaaagtgtcaggattacagttgtgagccattgcatccagcaaaaggctagagttttttcaggataataggttgaaatcttcctgtatctgttgatgaaaagctatgaatcagattggcagcatcacaaagacataacttgatcttttcagattaaagtatggacagccaacccccaacaatttgtagaagatgaagatgatgatacattctcctatactgttagaatagcagctcaagacttgttgctggtaagtttaccttgatacttcagccacataatttctatcagtcacttgagcatttcttcttttttgtagacaactaatccaaggtgagcagtgttgttgggtggctttatctcagactttattggggatgcaagagagtttctgaaatgaaattcgagactcagaaattctaaaatcattgctactggttctaacttaaaactaaatattagataaaagaattgtgcagaccatagggccggggtgcgggggagaattgtatagaggataaagtgttccatggagtaagggtagttgaatcaagaacatttcagtttatggctgggcgtggtgactcacacctgtaatcccagcacttggggaggccgaggcgggcagatcacctgaggtccagagttcaagactagcctgaccaacatggagaaaccccatctctactaaacatacaaaattagccgggcgtgatggcgcatgcctgtaatcccagctactcgggaggctgacgcaggagaattgcttgaacccgggaggcggaggttgtggtgagccaagattacaccattgcgctccagcctgggcgacaagagtgaaacttggtctcaaaaaaaaaaaaaaaagccatttcagtttaattcactcttcaacaagaatctatagcacagacaaaaggttggcaaacctagcaaaacaaaacagattgctgaaagattaacatccaaatacctgctcatgttttctttgcctcttctgactagagcatagagttgtctctaggctgaaatactaagaagaaactgccacttgcttcttgttgggtaggagatttgttctctgttgatgaatcacttctcattatcatttagtatttctaaggagctgtgaaagattatattcagttccaattagtagattagacttatttttctatcatcagtctccaagagagcaaatatttggtccattgtcatccaaagctagatctattattgctcacttatgctctgctgaatatagccaaaggagccaactggttagccttacaatgcctaggcactaccgaaatacagatactactttaatttcattagagaccctgacctactggtataacatttttaatacaattaggggtttgcacatgtatgtgaaagagcttgaaccaatcacttctaacagtcatgactgaagcggtttacaattaaaatgcatttaatgggcacaaacagatttattagctcttctctctctataggctgtggccacagatttccagaatgaaagtgcagcagccctggctgctgcagccactcgacatttacaagaagctgagcaaaccaaaaacagtggcactgagcactggtaagagtgagccgctaattggttaagatgcttttgtttaccccttcttaaaaagtcttgaaaggatggatttatttttatcttaatttgaa

SEQ ID NO: 3626 - DNA, 2300 bp, Homo sapien
tatatatataaaatattttgtttgtttgtttgtttcaacaagtttatattacttttataatcagaagaactgtgaagaaaacttttatttttaatgttcatatctcttggaccacatgggtagtggtttaatagttttcttgagagatgtaacagatatctctgtaggatgacaaaagctgtggatatgtgggccagagaaatggacactcatatatgtttacaaaattttatattcattgtcaaacactggattccttgaagcctatctgtggatcccgattaagaactgtcctatgaatggatcattagctatctttctttcagtcaagagtttccctttggtcatttcctatttagtttaccagccaattgcagactggcttatgtccgtgtcacactattggaactatttttcttttttttttttttttttcttttctgagacggagtcttgctgtctgtcgcccaggctggagtgcagtggcgcgatctcggctcaccacaacctctgcctcctgggttcaagcaattctcctgcttcagcctccccagcagctgggattacaggcatgtgccaccacacccagctaattttgtatttttagtagagacagggtttttccatgttggtcaggctggtttcaaactcctgacctcgggtgatccgctcgcccccacctcccaaagtgctgggattacagacatgagccaccgcgcccggcctgcagctgtcttttctaatgtcactagtaaccttttaatgatcagcattccaccgttgcttttctttttttctttagccccagttttaatttattccttcatgtcatagtttatgtatcattgcaaactcccttaaataatctctgaaacaagatactgattgacaaataattatacttgtttcacatttttcaactcaaatttatgtcagactgtattcgcctcatttcaatcaacaaatatttactgaatgttgcttatcatgtccaatatgatacagttgttaaaaatacattgtctaggaccagacacggtggctcacacctgtgatcccagcactttgtggggccaaggcaagtggatcacctgaggtcaggagttcgctccatttcccacttctattctaagggtttatagttactttgcccctctaatgaacttgaaactgtaccgtatggtagattacagagtttgcatcatctatctacatcatgctggatcttaaatgccatgctgaaagaggttggactttattttggaagtcggtgtttctttaacttgtgttactcctaacacctaatcttctctttaccctgaagtctccaggggaaactgatgtcccacgaaaatattatatatatatcctgtggcttcctatactgcctgacataatatgactttcttctgaagtacctctgtctcaagttcgaagagaacaactgggccacctgccttggccccccaaagtgctgggatcacaggtgtgagccaccgtgcctggtcctagacaatgtatttttaacaattgtatcatattggacatgataagcaacattcagtaaatatttgttgattgaaaagaggctaatacagtaaaactatagagggaactttaaatcctacagctaataggctgattttgaaagtgaaacataaaatgtttatataaattaagcttgtttcaggatgcaaaaaaaaaaaacctcaagaaaaaaagcagaagtttttaaagaaaatagcaaaagtcaaagaaataaattacagaacatagaaatggtggtgttgatgtttatataatacatccagaaagaagtagaaacttaaacctaactttagaattagctttataaagctacacatacaaatgctataatatgtgagattgattgggaaaaccaggaattgaattttttttaataattcttgcttatctatctctctctagttattgtgaccaactgaaagtctcagagagtacccacgtgctccagcccttcctccccagcatccttgatggcttaattcacctagcagcccagttcagctcagaggtcctcaacctggtgatggagaccctgtgcatcgtttgtacagtagaccccgaattcacagcaagcatggaaagcaaaatctgccccttcaccatcgccattttcctaaagtacagtaatggtatgctgccagggaggatgtattatgaggggcaccaaagaaaaggtggtggctggtgaatttaaatgaaagattccctaggtctggtcttagctatgaagctatggttttaacatcgtaagc

SEQ ID NO: 3627 - DNA, 2300 bp, Homo sapien
taagttcccccagggctgtgtccttggcccctcctttgatattagtgacagatgactttttttatgccttacccattccacaaaagaatttgaagccatttacacaagagatagtactagtaaattaggagtgctgatcaaatttttagataataagaaacccttaggaaggatgacaatttagaatccaaatttaggatccaaacaaataccattacaaactataaaaatgagcagaatctaaatgtaacatttcaataaatgcagattgataataacatctgtgcagagttgaggactatagagtactgtgctgtcactaacagtattgtgtgctactaagagtttaatggctgggtgtggtggctcacacctgtaatcccaacactttgggaggcctaggtgggtaaatcagctgagatcaggagttcgagaccagcctggccaatgtggtgaaaccccgcctctactaaaaataaaaaaattagctgggcatggtggcacgtgcctgtaatcccagctactcgggaggctgaggcgggagaatcacttgaacctgggagacagaggttgcagtgagtcgagatcacaccattgcactccagcctgggcaacagagcaagattctgtctcaaaaaataaagtttattatgccaggagggccaggtgtggtgccacacccatgtaatcccagcactttaggaggctgaggagggcagatcacttaagcccaagagtttgagaccagtctgggcaatgtggcaataccttgtctcttaaaatttaaaataaaaaaaaagtttattatgccaggaactgttaatgtgtccaaaaaaactccagtgtggttctaggatgagataataaaaacaggttgtctagggtagtgtggaaggtcctttcagtcttcctgtgcctatcagtgatcctcattgccatgttcccttctggtgctcaaccggaggctccctgacagatgagtcctctgccagaggaaggctaagatgtagaggacaaatcgtgtcaaggaaaagaagcttgaaggagctaagaatgcttagcttagagaagacaagaggaaacaggacatggctttgggaagttcaaggatggtccagtgaaatacatactatacttttgcaccccagctaagctgacccatgatcagtaagtaggaaataaaaggccaatttctggctactcttgcccccaaccccatttcagtgaactatgaacctctattagatatgcaaggccggtgctaaatgctggagggctttggccctttccctcaaggagctagtctagtagggggtcagaaatacagatgggcctgaacataatgatggtttgacttccagtttttcaactttaggattgtgcaaaagctatacacattcggtagaaacagtacttcaagtatccatacaatcagtacagtattcaataaattacatgagacattcaacactttattataaaataggctttgtgttagatgagtttgcccaactgtaagctaatgtaagtgatctgagtaggtttaaggtagcctaggtgtattaaatgcatttttcacttaacggtattttcaacttttgttgggtttattgggatgtagccccattataagctgaaaagcatctgtagtataataaatgtggggagtgctgtgagagaaataagtgtactgggtttagttcccactgcccaaaaaaggaactggctaatggtaacctgggggaggaagtcgggtaagttgcatggagaaggcaacccttgaacacttgcaaggagctaacaatacctgcttctggagtatttaaacgccagtgggtatgctaaatacttttacctcagaccacctactaaccttacaaagtagtccactttgctcacccagttttacagattgatgaaactgaagcagacagatattgttaacctatcaaaggtcaccctgcaagtgtgtgattatagtccaagcagcttgtacttgttgcctatttgttttgcctttcctgtgcatttgccaggcagatgagagtggggtaagacattgcagagaaaaagtaagaaaaggccgtcatgaaacaatttcattttcagaccttataagcacgttacaagtactgatatttatgcttaagttcacgggagtcctggccagaaataaagctggaaggacaagtggggggcagattgtgaaggatccttcaagacctgcttcctctagagaatgggagactacccaagataactaaacagggaagtgatcaggttttgtgtcttagaaaagt

SEQ ID NO: 3628 - DNA, 2300 bp, Homo sapien
aaggtaagaagtgccagttctcccagtgcagccagttctcccctctggttggcccacagccccctctcttcactctctgtcctagtctagtcacctcccatcccatgaactgaaacacattcttagaattttgcaattagaaaatcactgatgatgttggtgcgtgctaggtgtcattgcaagctggaagtgtcaactaggggtatacactttgaggagggcgtgtcaactaggggtatacactttgaggaaggctagttggagaaaaaagcaggaaagtagctagagagggatgagttttaggaaggatgtggtttggtttggtttgctttgctttgctttgctttaaataggagagacttgagatttcctagggaaaagaagctggtaaggtgtgagaagctaaagacactaaagagatgggataatgaagagacaaatcagcaggggtcaagggtacacatgggagattcagctctgggcaggaaagacagtcccttatctgaagatgattcaaccaacaatgacaacactgatggctagggctggatggccacattgaacacagccacgtggtccctgcagtcatggagcttttagtgtaggaaagaggagatggatggcaatgggcacactgagtaggtggtgctggattcagaggcgtttctctttgtccctgctgctgcatttatgactgtgtcctgcgtgaggacatactcttgcccatcaggctaccagcaactttctggggcaggagcctatcctctcctattccagctctcttgggtaggtgtgccagcacccacaggggcccaggatggggtagctcctctttcggctgtccttccctaacctactaagattctactgggccttccatggacctgtcctgattctctcaccccagaacacaagaaatactcactgtctacactgtctgctgttgcggctggggatcaaccctgatttagatttgggtcttcctgatgcctctaccatttactggctgtattaccttgaacaagttctttaacctccatgagtcctagtttctcagtctgtgaaatgcgattgataacactgatgaaccttgcttagttcatggagttgtggaaagattccagtgaggtagatgtggaagcccagaagtgtgtgaaagggtgtacatggcaggggattaaggtaggcttttgatgatctccctggcttaatttgcagttcctcggagggtacctcatgtagcatggggcatagtcactggcactcagtataaacctgtgaagactgacctctcccatcctaaaacactgtctccacctggaattaactgttgcccacctgaaattaactgttgccctccctatgctccggtggctattgcagtacaggcttgctctgtgaagggctttcactgtgaagagtgtttaactggatgggccccaggtggccccagcagcctgccttccctgctagtgaggccatgggctggtgcatgccagctctgtccacttgaagggggaagggtccatcgtagggagccagtgcagctggcagggttcaggcctgtgggcaccgctggggacaaagccactctgaatgcctctcaatgagtgcttgtgttctgggaatgggggcggggtgacatccagcctctttccctctccgcccccgacaggatgtcccaggctggacgcggcagaggaggtcccccacaagtgaaggtccagccctgctcctccagggttggcccatgtgtctgggcattcggaggtggcaccaggatcagggcttctggagtccagcatagtgattgggcccaggccgggggcgggtccaggacacagccaggcttccctggccgcagtgcccaactgcccgcagtgcccatggtggctcggatgggaggaaccaccgcggagccggggacagggggagcagggcagtgctctgctgggtgaggggcacccagctccagaggctaggtgggcgtcgctggtgggtggactcctgggcgctgcgcggagccgcgccggctgggttagcgcgggcggggcgcttagtcccacccccagaggaggcggaagaggagcccgagcctggccgcgggctgggccccgccgcagctccagctggccggcttggtcctgcggtcccttctctgggaggcccgaccccggccgcgcccagcccccaccatgccacccgcggggctccgccgggccgcgccgctcaccgcaatcgctctgttggtgctgggggctcccctgggtaaggggatggggagagatgcggcaggagtg

SEQ ID NO: 3629 - DNA, 2300 bp, Homo sapien
agccaggcgtggtggtgggcgcctgtagtcccagctgctcgggaggctgaggcaggagaatggcgtgaacccgggaggcagagcttgcagtgagctgagatcatgccagtgcactccagcctgggcgacagagtgagattccatctcaaaaaaaaaaagaaaaagaaaatcaccacattatttaatgaaacaaaatccatgccctttgagattggcaaaaccgtgatgagatatacttcacacctattgggtgtctataatcaaaaagacagacaataataagtgtggacaaggatgtggagaaattggaccccttgtatgttgctggtaagatataaatagtgcaaccacttgggaaaacagtctggcagttcctcaaaaagttaaacatagagttgccacatgacccagcaattgcatgcctcaatacagacccaagagaattgaaaatatatgtccacaaaaagcttccacacaaatgttcacagcagcattactcctattagcccccaaatggaaagcacccaaagtctattaactgaagaatgactcagcaaaatgtcatacctcattaaaatggtataatattcagccattaaaaggaataaagtaccatgctctatcatggatgaaccttgaaaacataactgaaagaagccagatctgaaagaccacatattttacgattccatgtacacaaaatgtccagaataggcaaatctgtagagacagaaaatggattagcggttgccagtggctggtgggaggagaaatgaagggtcactgatgatagctgtggggtttcttttgggactgatgaaaatattctggaatcaggtagtggtgttgtacaactttgtgaatatactgaatatatattcacactgaatatactgaatataatattgttatatataatataatatatataatacactattatattcagtatatttgccgaatatactgaatactgctttttttctaaaaacactgcattgggtattttaaaggagtgaattttttttttgagatggagtctcactctgtcacccaggctggagtgcagtggcacgatctcggctcactgcaaccttcgcttcctgggttcaagtaattctcctgcctcagcctcacgagtagctgggattacaggtgcgcaccaccatgcccggctaacgtttgtatttttagtagagatagggtttcaccatgttggccaggctggtgtcaaactcttgacctcaggtgatccacccgtctcggcctcccaaagtgctgggattacaggcgtgagccactgcgccaggccaggagtgactcttgacagcccttccccagggtctcccagagggcagcgctggagcatggccagtacccatctcagagtgcagagggtttccagagtgcagcacggtgacaggaaagctgctgctgaaagggccaccaagactgagcaacacccatcctggaatttgacacacagtggatgcttcataactgctgaacaaagagatgcatctcccattcagatggaggcccaaaaagaaggctggagggacagattattttttctattaagttatgcacagtttgttgcaacttgaggtcaaaagaaagtgttcagagccagcacagtggctcaagtctgtaatcccagctactcaggagtctgaggcaggaggatcccttgagaccaggagtttgagatcagcctggacaacatagtgagaccctgtctattgaaaaaaaaattgtttttaattgtagccgggcacagtgtctcatgcctgtaatcccagcactttgagaggccaacggggggcagattgcttgagttcaggagttcgagactagcctgggcaacatggcaaaaccccatctctactaaaaatacaaaacgttagctgaatgtggtgatgcacgcctgtagtcccagttactcaggaggctgaagtgggagaatcatatgaggcctagaagtcgaggtcgccttgagctgtgatcgtgccactgtattctagcctgggtgaccgggagtgtgatgctgtctcaacaagaaagaagaaaaagagagagagagagagagagggagggagagagagagagagagagagagaaagaaagaaaaggaaagaaaggaaagaaaaagaaaaaggaaagaaaagaaagaaaaagaaaagaaagaaagagaaaagaaagaaaaagaaaagaaagagagaggctgggcacagtggctcacgcctgtaatcccagcactttgggaggccgaggcgggcagatcacgaggtcaggagatc

SEQ ID NO: 3630 - DNA, 2300 bp, Homo sapien
accatgtactgggtatatcaatgaaatgttgtcatgtgtaggacctaatttaatattcacaacaattgtataaggttggtataactgttgtccttattttacagatgatgaactcaagtctcagaaaagaaggtagcttgcccaagtcacatggcctgtaagtagcaataccaggaccaaatacaggtctattggcctcaaaggcccaagctcttcactgttaaatcatacttctattcagcctcctcttgttgtgttttcccatagcccctgtgcttgctcgctctttctttctttctttctttctttctttctttcttttttgagatggggtcttactctgttgcccaggctggagtacagtagcgtgatcacagctcactgcagcctcaaccttctggtctcaagcaatcctcccacctcaaccccctgagtagctgggacaacagatgctcaccaccacatcaggctaattttgttttttttttttttttggagagatgggggtctcattatgttgcccagcctgttcttgaactcctggactcaagcaatcctcttgccttggcctcccaaagtgctgggattacagacatgagccactgcacctggcctgattttgtatctttagtgatatctcttgctcttagaacaatgcctgatatataataggcacttgataaatcactcaataaatatatacctacggtttgaccaataagttggctactgactcttaaaatgacaacccccaggtttccctaaagtcttcttccactcttcctatcaagtctgcctgccttccttctgcccttcagtccccccagtggacaccattcccctcttcagccttaacctaaagttggactagtggacattaaatggcacggccaagttttagtcccagacgatccctggactcagcaaatgctgatcaagtgactgtctctctctggcttaggatggaaagatgccaggaaagatcgaagcatctaccctgatgggttacaccagggcttctagaagggattttgtggcaggaggaaggggggcaggggattgaatgtctctgtgacttgtgcagggcagcatgatggatgagcagtggaaagcccttctatgaaacatgccagacctgttgcaatcgtatctctcccgacggcccagaattctgtttccctgaagacatactaaatcgtgctctggatttatatgtgggtggtgacctgcctctgtgctcccaaaggaggtctgtctacagatgcccggcagaggaagaaacagatgacaacagggggaggtttgaaccctcttcccaagagccttggaacttcatggaaagtgacagccctttaagagtttcccgacttctgcagatccttctctctttcccaaacagcctgccagttttcagttttggtacacagtaaggatttattctctctctctctctctctctctctctctctctctctctctctccctctcctgcctagctatctctatctctaagtttgtctttctgtctcctgtctctctcttaagaagtggccaaaggatcctggagcctctgatgctcagccttcaggtcctccttggcagaacctgggtagaaagaaaatgggtaggcagggggttaggagtaacagctcctcatcttgaatctagactttcctggagctgtatacacctgggagccccccagcacattaccaaatactgtagaaggaagtccatgaaccacacattgaccacagtgatacgtccacccggtgatggagtagtaaaatacgctcttgaacgtgccccgggctggcgagttcaccggccctcatggcctcgtccctgcttgtctggctctccgtggctgtgatctgcttctgccagcctacgcatttttgtatctttttctcattgcgtggccccttgtctttaaaaggctaaactgctctgtactaaatttggtcacgcagcgctccaagattccctggaatgtcctcaagtttcaaacagctctgacagcgaggtaggcccgcccccagcttggggattggcttctcctctccgggcctggcagttgtcgggtcttattggccgctgattagaccagccggggtccactagccctgggcttcagggaggctgctgcgtccagtgaacacttcagcacctgtagcacagaagggccaaggagctgcagtcctcgaccagcaggaggtttgctcctcagcccactcgctgcatccagatcagctcacccctctcccttccctgcccaccaggactctgatagcccctgg

SEQ ID NO: 3631 - DNA, 2300 bp, Homo sapien
ttcagaagccaaataagaagaagaagattgcataataaatatggaataagaacaaagggaggtagctagagctagagctaagggatattttatctgggtcctggtgagagtgcaaatctctagttactaaaatatttatacccaccaggtcttcggtgctgactaaatgtcagattcctgccctctgaattcctccatgtcccctctcccacattctctctttggcctgtacaattaaatagagttaactattcttaattacagtcacattctgaacacgtcttctccaccttacacacccaaatcagataactagtatgaaccattctcacgtgcaagacacatttattgataatctttagttccatggagggttcgattcatctgcttactttatttccaagcttttggagagaccctcactcctctttgcagtcttcctttatttatttatttatttgaggtggagtctcgctctgtcacccaggcacaatcttagctcactgcaacttccacctcccacgttcaagccattctcctgcctcagcctcctgactagctgggattacaggcaacacgccaggctaaattttgtatttttagtagagacggggtttcaccatgttggtcaggctggtctcgaactcctgacctcgtgatccgcccgcctcggcctcccaaagtgctgggattacaggcgtgtgccactgcgcccggcctcttccattatttatgacattgacttttccgtaaaataaatatatacatatttttaaagttaattacaaacgtacagaatggagaggagcactttaacagccatcacatgattgggattttgttgacagtaaactaaaagctccatgggtcccaacctttttttttttttttttttgacagtgtctcactctgtcactagagtgcagtggcatgatcacagctccctgcggggtagatctcctgggctcaagctatcttcccgcctcagtctcccgaacagtcagggctacaggcacgtgtcaccacgcccggcctggtccccataagtcccctcttctccgagccaaacatcttcacaccttctggtgatcattagtggagaggcctgtgagaggctctggtgtcaatgtccctgaaatcgagggctccaaattggtcatggctctccagatggcccaaacagttccagttcacaaacatttattgagcatctactacattccaggcactgtggttattataaatcactgagacactgtttgccctaaaggagctacgtgtatttggtaacagcttcacagtaagtgacgaataagatagcattaatccacatttgacagcaaaagtaccaaaaaagaaagaaagaaaaagaagagagagaaaggaaagaaaagaaaagaagagaaagaaagaggccgggtgcggcggctcacgcctgtaattctagcactctgggaggccgaggtgggcggatcacgaggtcaggagttcgagtccagcctgatcaacatggcgaaaccccgtctctactaaaaaaacataaaaattagccggacctggtggcgcccgcctgtagtcccagctactcaggaggctaaggcaggagaatcgcttgaactcgggaggcggaggttgcagtgagccgagatctcgccgctgcactccagcctgggcgacagagccagactctgtctcaaaaaaaaaaagaagaagaaaagaaaaagaaagaaagaaaaaggatggaaggagagaagaaaaggaaagggggaagggaagggggaagggaaggcggaagggaagggaaagaaagaagcgtatttaggcagtatcgcgttgatttcagtccacggaacctctggtgaccgggtagtgtgactccgtcattggtagccccccgcccacacagccgggactcgcggcctttgaggacgtgggcagggccagtctcgccacgccgcggccaatgccccgaccacacgctggccacaggagtcctggctcccattggctgcagcgggaaatggtgaaccaatgctcatagaccttaacgccctcctctcgggatcacttccgcctctggggtcaggctccgcccagcttgcccggcatcactcgcggcattggagtcaagatggaggagtacgcgcgagagccttggtgagcttcaccgctgtctttgcatttctcttgcccccctgcccactgccctccttctcccttgtccaggctcccaaggtgcaagccagactcaaccgcagcctcgtcgacttgggcctggtaactgggcaatgcggtctttc

SEQ ID NO: 3632 - DNA, 2300 bp, Homo sapien
gtgactccgtcattggtagccccccgcccacacagccgggactcgcggcctttgaggacgtgggcagggccagtctcgccacgccgcggccaatgccccgaccacacgctggccacaggagtcctggctcccattggctgcagcgggaaatggtgaaccaatgctcatagaccttaacgccctcctctcgggatcacttccgcctctggggtcaggctccgcccagcttgcccggcatcactcgcggcattggagtcaagatggaggagtacgcgcgagagccttggtgagcttcaccgctgtctttgcatttctcttgcccccctgcccactgccctccttctcccttgtccaggctcccaaggtgcaagccagactcaaccgcagcctcgtcgacttgggcctggtaactgggcaatgcggtctttcgcggccagtcggcttcttagccctgtacttagtacctccccggccgcgtgagcctccctctcccaacccagcacccgtgtgaccttgtgatggatggtaaggaggtccagacttgagtttgatagaacctcggaacctcctcccaacgcagggcgtaatcgactttatgcggggccagttataatcccccctgttcgtcgaggtgaccttgggcgcgtccctccgtctcgccttgctcagttcctgcgttgaggaactgaagaataggcatttgagggagtgtcattcttgaggttttacttgtatcatgatatgtgtccacagagtgaagcattttaaatgaatggaacatagattttagccaaggggtctggataagcttctttattgcgtggggccttgttttccttcttggaattctttcttgagggtagagggggacaaaaattacctgggaaataggaagaggtaatagcatgtgttctctgaaaagccatggacagaaattcattgttacatccagcgtttattgagtatgaataaaccagacacatagataattataaaacgatgtaattgctgtcagaagtctcaggttgccagagtttaaagtttctagggtcataggtaaaaaatcaaatcttgatatttcggttaatcatttgttttattgtgtaagagcaacaaccaagatgtcctcaatttgtgaaagtgcccaggaccttaaattactactctggtatcctagccttgttgcatgttttatgttcccctctcccataaatggcatacaaaatataagttttagggtctcctggctcttcaaacttatcttcttcaaagcagttatcctccattctggattgtgctcagatatgtaggactcagcacactgtaaatagctgtttgatgtactataatgacacaggttagcagagagttaaaatatttaactatgttgagttaaagatcttagaaaaataaggccgggtgtggtggctcacgcctgtaatcccagcactttggaaggccgaggcggatcacgaggtcaggagttcaagaccagcctggccagtatggtgaaaccccgtctctactaaaaatacaaatattagccgggcgtggtggcacgcgcctgtagtcccagctacttgggaggctgaggcaggagaatcacttgaacccaggagacggaggttgcagtgagccaagattgcgccattgcactccagcctgggtgacagagtgagactccatctcaaaaaaaaaaaaaaaaacaacttagaaaaataatgggttttcatttactaaatcattaggtagcccctttgctttctcttagtacgtatgccctgaaacaatataatcagttacctggttatctttgtagtcaaaactgctttgattttttgactgccctgtttgattacagcatttcctcaagtcattttataggccaaatatttattggttgcagtgggccctgcagtataatctgttccattataatccttactgtattggcaaagaagattttatggtttgtgaatgagaaatatggtcttttttttccccctgttcttagcccatggcgaattgtggatgactgtggtggggcctttacgatgggtaccattggtggtggtatctttcaagcaatcaaaggttttcgcaattctccagtggtaagtgggtgaatggtcttattttatcatcacttgcaacttgggtttgatgatattactggtggtcccatcagtggcttagaaatgtacttctaatatattttttgttgcttccttttttttgttatagggagtaaaccacagactacgagggagtttgacagctattaaaaccagggctccaca

SEQ ID NO: 3633 - DNA, 2300 bp, Homo sapien
tcggccgggcacagtggctcacacctgtaatcccagcacttcgggaggctgaggcagtagattacctaaggtcgagagttcgaaaccatcctggccaacatggtgaaacccccgtctctactaaaaatacaccaattagccgggtgtggtggcaggcacctgtaatcctagctactcgggagactgagggagaagaatcgcttgagcccgggaggcagagtttgtagtgagccgagattgtgccattgcactctagcctgggcaacagagcaagactctgtctcaaaaaaaaaaaatagtaatgtgtcaatattgggtcattagttgtgacagatgctccatgctaatgtagatgttggtaatagggaaaaactggaagagtttattttttcttacaaagcacggtgaaatagaggaagagtgagtggtgatatgagtgaattggaattatccatttcaaatcctagaggttagccttttttaggaagctattgagaagtttttatggtattttaaattctaaaaatactaggatgatgattttattaatttggtgagcatttgctaaggtattcagatcaaggtgcagggagggacaggcagtatgggaaaatcatagttgtgttctgaaaggtgttatattttctttctttttttttttgagatagggtcacccaggctggagtgtggtggcacagtcttggctcactgcaacctccgcctcccaggttcaagtgatgctcccacctcagcctcctgagtagctgggattataggcatgcgccaccacagccgggataatttttgtatttttagtaaagacgaggtttcaccatattggtcaggcaggtcttgaactccctacctcaggtgatccgcctacctcagcctcccaaagtgctgagattacaggcatgagccaccacgcccggacttaggtcttatattttcttttttttttttttttgaaacggaatttcgctcttgttgcccaggctagagtgcaatggcgcggtctcggctcacgtcaacttccatctgtccggttcaagcgattgtccatcctcagcctcccaagtagctgggattacaggcgcatgccgccacttctggctaagttttttgtattttagtggagatggggtttcaccatgttgcccaggctggtctcgaactcttgagctcaggcagtccacccgtcttggcctcccaaagtgctaggatcacaggcgtgagccatccggcccagcccaggtcttatattttcatagagaaaataagataggattttgacatgtccctgttactctttgaccactttcttgcattttggaagaagacgtttcaggctcatcttgtacttttcatgccctagctgtgggcagggcagcttttcctgttgtagccatttctccaaagagccccagttccttttagttgagaatggtatttagggccagaagtggtagctcacacctgtaatcccagcactttgggaggccaaggcaggagaatggcttgagcccaggagttcaacacccttgacaacttagagagaatgcctctctacaaaaaaattttttaaaagaaaaatcaagaatggtatacaatctatatttctgtatatctatacatactgaaaatcacaagtttatattgatatctcgtatttccagttcatcccacaggattcattattttcttccttttcatatgtatacctgccttcttaacctgcttgggctatggtaccccacaacaggctgccctttgtcagagtatactctgacactccatgccaggctgccttccttgagaatctctctcttgcttaggctctaaaaccttgttctcgggtgtccaggtgtatagacgttcgcctcatctggctctggatcctcacaccaggctaccctttatggatctcctcctcatcctgcttagactcaaattctccattctcattagtagccaacacttattctggcaatgattctcaggggaagggtctcctgagattttaggctcatgaggaaatgggagggtcttgtcagaaaattttagtgaggtaattctaatatacctagacgtcatagctctctcccagggcatagaattactgagttagaagaaataactggtttgtttttacataggatgtgatgtctaatattgtactaaaaatgaggatgcttatgctatactccactggtactatccactggatttatttattttttttattttttgagacggagtctcgctctgtcgcccaggctggagcacagtggtgcaaactt

SEQ ID NO: 3634 - DNA, 2300 bp, Homo sapien
tcataatgttggccaggctgatcttgaactcctgagttcaaatgattcaccagcctcagcctcccaaagtgctgggattacaggcataagccactgcactcggccctgtaacttttaaatctatagaatcaggaatggaaaatttgtggccattattttgaaatgtccaacatatgttgcattctaagcattcacaaataaataataaataatgaaaatgaactgggggagaggtgggctgtgcccacagtgtcccctttctacaatcctgaattctctgaattcctgaatctctccactgtaagttattacaggccatctacaggccagttctgaggcaaactagacagtgtgggagccatgcagggaggcggaagtggaaatgaggttcctggtattcccaggaagaagtaaggctataaggggaaataatataattcctaaaatcttttttttttttttttttgagacagggtctttctctgttgccccagctggagtgcagtggtatgatcatggttcactgcagccttgacctcctgggcccaagcaatacccctacctcatcctctgagtagccaggaccacaggtgtgcatcaccacacccagctaattttttaaaatgtttttgtagagagggggtctccctctgttgcgtagcctcatcttgaactcctgggctcaagcgatcctcctgcctcagcttcccaaagtgttgggattacaggcgtgagccaccacacccagcctaaaatcttttaccctttagctaaggatgacatcctcttcctctgtcaatatttaactagaaggatcaggctaggcatctcttcgttgtgctccccagcatccttttcttcccgtatcaagcgcagcacgtggaagtgtcgtgacctgttttcttgtgcgtctgctaaaatgtgagttaggctatgaacaccataggaagaggaattgtgccggacttattcaaactgtaccccaggcacttagcttaacaactggtgtctagcagatactcagcaaaagtgcattgcatcgaagactgaataatttcaagataggagtattcaacgtctaatatgtaccaagcgctgttctcaatgctacagaaaagcaggtttctaaggtttctggagttaaacaaaaaaccctgacattgaacttacatggaatattaaagtcattatctaccataagcattatttcatgaaataaaataatttcaactctacaaaactaggaagcacagaacggaatactatttcccttaatgaaaaactccctacattgttctttttaaaaatctcatttcctagctgaacggtaaaaacatcatcattgattagctcctattcatagaaggcccattgcaacccactggtacagaagagaaacaaagtattcagcggagaataccctagctcaataagcggtacaatacagtaagggaaatagaagtgacatgcgatggacagccaggccttaaattgcgcggtgctgattcctgtcccttaacccaacaatagaaagataggcgtgcctggagttgctgggggacgaggctcgatccagtgtgaattccgtgaagttgtgcagggtttcactgtttgctgagtgtgttagacaggttacctggtagagttctcacattacttcgtgagatacacagatattatgactctattatactggtgcagaaaaaggctcgggaagattcatgtttcttgtgcgacttgcccaaggtgacacacagttctaacaactggcctatcgcagggtgtgagatctggaactcagaccttcccagccagggctcagtccacgccactgcctagatgaggcagcaggaagggtcagcagagaagggtgccccaccgggacgactggaacacctcagtaggatatgggtgggcaaacgtgggccacacgatcccaccggcctcttttgtcctaagtcccgaggcacgggtgcagctagaagagtgggcggtaaagcgcagggaggggatgcggtcgggagcagatttcgggggcggggcccgcgcggcgggggcgggcccgcggcgctcggggcggggctcccctcgggttcgcggcccggccggtgagcaacggctctgcggccatggcgagcggcgagcattcccccggcagcggcgcggcccggcggccgctgcactccgcgcaggctgtggacgtggcctcggcctccaacttccgggcctttgagctgctgcacttgcacctggacctgcgggctgagttcgggcctccagggcccggcgcagggagccgg

SEQ ID NO: 3635 - DNA, 2300 bp, Homo sapien
gaaggatcaggctaggcatctcttcgttgtgctccccagcatccttttcttcccgtatcaagcgcagcacgtggaagtgtcgtgacctgttttcttgtgcgtctgctaaaatgtgagttaggctatgaacaccataggaagaggaattgtgccggacttattcaaactgtaccccaggcacttagcttaacaactggtgtctagcagatactcagcaaaagtgcattgcatcgaagactgaataatttcaagataggagtattcaacgtctaatatgtaccaagcgctgttctcaatgctacagaaaagcaggtttctaaggtttctggagttaaacaaaaaaccctgacattgaacttacatggaatattaaagtcattatctaccataagcattatttcatgaaataaaataatttcaactctacaaaactaggaagcacagaacggaatactatttcccttaatgaaaaactccctacattgttctttttaaaaatctcatttcctagctgaacggtaaaaacatcatcattgattagctcctattcatagaaggcccattgcaacccactggtacagaagagaaacaaagtattcagcggagaataccctagctcaataagcggtacaatacagtaagggaaatagaagtgacatgcgatggacagccaggccttaaattgcgcggtgctgattcctgtcccttaacccaacaatagaaagataggcgtgcctggagttgctgggggacgaggctcgatccagtgtgaattccgtgaagttgtgcagggtttcactgtttgctgagtgtgttagacaggttacctggtagagttctcacattacttcgtgagatacacagatattatgactctattatactggtgcagaaaaaggctcgggaagattcatgtttcttgtgcgacttgcccaaggtgacacacagttctaacaactggcctatcgcagggtgtgagatctggaactcagaccttcccagccagggctcagtccacgccactgcctagatgaggcagcaggaagggtcagcagagaagggtgccccaccgggacgactggaacacctcagtaggatatgggtgggcaaacgtgggccacacgatcccaccggcctcttttgtcctaagtcccgaggcacgggtgcagctagaagagtgggcggtaaagcgcagggaggggatgcggtcgggagcagatttcgggggcggggcccgcgcggcgggggcgggcccgcggcgctcggggcggggctcccctcgggttcgcggcccggccggtgagcaacggctctgcggccatggcgagcggcgagcattcccccggcagcggcgcggcccggcggccgctgcactccgcgcaggctgtggacgtggcctcggcctccaacttccgggcctttgagctgctgcacttgcacctggacctgcgggctgagttcgggcctccagggcccggcgcagggagccgggggctgagcggcaccgcggtcctggacctgcgctgcctggagcccgagggcgccgccgagctgcggctggactcgcacccgtgcctggaggtgacggcggcggcgctgcggcgggagcggcccggctcggaggagccgcctgcggagcccgtgagcttctacacgcagcccttctcgcactatggccaggccctgtgcgtgtccttcccgcagccctgccgcgccgccgagcgcctccaggtgctgctcacctaccgcgtcggggagggacccggggtgagtgcgccccagactgcgcccgccgctgcctgcctgcccttccggcccccagccgccctgcaccctcacctaccccacccgggaggagggacagggaggacccttccagagcgtccctagaggggcctactccccgcgcgccgcctctaggcctcctccccttgcttcctcttttcctcccgggctgcctggtttccttctggacttcctccagccactgggcggtgcatccttcaccctttccgtccttccgcgtctcctccctggccctggaggcttgtccagattgcgccgcattcccgctcatcgcacactgccgtttctaacattttccgtggctttctagatgacctgttgttcatgcacttcacttagtgccctcttggacttttgggccgaggtacctgattatcagccaccttatctctgctttatggtggctctagaattagccagatgttgatctagctctttgttctgtgttgccttctagttccacggttaaagctcttatctttgtttttgtttcc

SEQ ID NO: 3636 - DNA, 2300 bp, Homo sapien
ctcctctggcttctgtgacaccacccatgctggtcatcaggcctcctggttagtccttttctcatctccttccctgactcctctgcccagctccttgtgtgtcgatgttgcccaaggctctgtctttgacctgttcttttcttctacatgctttccttggagagctcacccattcttgtagtttaacatattttctgtgttctgcagccaggatgatatcttaaaactaaatctgataatgtcacttgttggcttaaaatgctcccatggctctgaaggtccggttctgtaacagtgcacctgaggctcttcatgacccgaccctcttgggcatctcatgtcccacctcctgccactgcctccctcattgcaatctgatcctgtcctcaagtaatcccagactctcggtgcttcctcacatgcatatgcagtgttccatggctacgtctttgcttttgatatttgggaagtacctgatactggtttccctgtatcttttcttcctgttagaatagttcctatgcttcagcaaacgcagaggaagttttccctcatccgggcctggacccatcccactttgccatcagtctcttttttttttttttttgaaacagagtcttactctgtcacccaggctggagtgcgatggtgcaatcttggctccccgcaacctctgccacccaggttcaagcgattctcctgcctcagcctctcaggtagctgggattacaggcatacactaccatgtcctgctaattttttttttttttttttttttttttagtagaaacagcctttcaccatgttggtcaggctggtctggtactcttgacctcaggtgaaccacccacttcggcctaccgaagtactgggattacagacatgagccaccaggcccagccagtctcattcatatgtctgtgtggaaaagcagttctaagcgcagccaggggctcttggtcaagcagagcctttggctgcaggatccctgagtccattgcatctttccattagactggatcttcttgttttgtttttgtttttgtttttgtttcctccaagccacctttgtttccctatctttttattaagaaaatttcaaatatttagaaaattgaaaggatgatgcattgaacacctatagaaccatctactttgtcatattagttttatgagtggatttgtttttatttttgctagaccatttaaaagcaagtaaatctgtgtgcctctctgaagaatagaggcattctcccttataaccacaatcccattattgtacctaaggcagttaacaaatttctattaacattagtaggtttgggtcggacacagtggctcatgcctataatcccagcactttgagaggctgaggcaggtgaatcacttgagcccaggagttcaagaccagccagggcaacatagcgaaaccctacctctacaaaaataaaaaaattagccaggcatgatgatgtgcaactgtagtcctagctactggggttggggagctgagatggaaggatcacttgagccccaggaggtggaggttggatcacaccactgtactctagcctgggcaacagagcaagaacctgtcttaaaaaaaaaataaaaaaggtttgtctcttaaggttttattcaattccagattctactattagaacgctttcttatctctcctctaagtagggagaagaaaactaacatttactgtataaatgtttgaagggcttttgtgtgttgtcttatttaatcttcactcattttacagatgaggaaactgaggctcacagaggttaaatcacttttgcaagatcgcattcagtagtgaagccataactgcgtagcacggttccacctccatgaggctgtcttgggttcttgtttctcaggtgtggtgagcggtctcttggatctgtgtggtgatccgatcttgcactccgtcactgtggctgactgcattgtcacattcacttggcggaggccaatttcctacaggtgctttcaggatcaggtcactgcgatggtctctaaacaccattctgctttctctgctctcttgtctttaggagccgggtgtgggctgagccctgcctgattgatgctgccaaggaggagtacaacggggtgatagaagaatttttggcaacaggagagaagctttttggaccttatgtttggggaaggtgtggtatcacattgactctagtgtctcctgttaaactgagtcactggcttccattcttcctcttcgtgtggcttttccacctcctgcctcccagagcaaagtttccctgatc

SEQ ID NO: 3637 - DNA, 2300 bp, Homo sapien
tgaacccaagccattgcagccagataggagttctgtccagtctgtgcggttcgtgatgacttcaccattgctttgcatttgcacaagtccatatcgttttaccaggctctttcgcattccttcatgatcatcagggcagatctgtggattctgtagaataaaagcattagccttattttacagaggatgggactgagtgccagacaagttaagtgtcttgtccaggtcatgtacctaatcagtgcatgactgcaactgagatccgggtcctctctccaaattcagatctttttacttcctaacattttccttcattccatgtgtgactaatctgaaacctttttatgcaattgaagctcatgttccttgatgccgttaagtttgcagatgaatttcttagagacgggtaattagttttagcctggaacagctgtaaaaacaacacattggctgggcatggtggttcacgcctgtaatcccaggtcaaagcgggtggatcatgaggtcaagagttcgagaccagcctagccaatatggagaaccctgtctctactaaaaatacaaaaattagctgggtgtggtgatgcacacctgtaatcccagctactggggaggctgaggcaggagaatcgctcgaccccaggaggcagaggttgcagtgagctgagatcgtgccactgcactccagcctgggtgatagagcaagactccgtcttaaaaaaaaaaaaaaaaaaacattgatctgggagggtaggttgagtatttaggtggtgaccaatagggatggaaaagacacagcttggtgctcagtgggaaatgctgatggaacctacccacacaaagtgtatcctgggactaaggaaatgtgtccgctcctctggaaggctggtttctctgtcttcatattagatccacagtgaatggccctctgagatcttggaagtaccttgagagaggccaatatctggagagagatcttggccttgagatagagatcttaagagagagagtcttggccttgagagagtccaagatctggagagaggccaggatctggacaccttcttggccttgctgtccctggggaagctgaattctgatctcttccatcgctagtctttgactgtggagctagagaagaacgttacgggtgacaggctacaaaagctcaaatcttgtctgctttctcctctgccaggcgttgacccggacgacacctataatgagaccccctacgagaaaggtttctgctttgtttcatacctggcccacttggtgggtgatcaggatcagtttgacagttttctcaaggtatagtcacatgaggggagaaggaagaggagcggataaagccactgggcctgatcaagggtagaggcagggggcgaaagatgtaaggggttggaggaggacccaggacacagagggacaccactccccacggggccagagagggtctaaagagctttccctcctcacaggcctatgtgcatgaattcaaattccgaagcatcttagccgatgactttctggacttctacttggaatatttccctgagcttaagaaaaagagagtggatatcattccaggtaagcagaggaactggcccacaggcttctaaaaaatagtagagaatgagatctcattgacactcggaaagatggtggtggatgggaaaacactgggtcagagtcagctaggtaggggcgttttgggaagcaaacccagaatcctgggatttattccacaagaatgacttcttttcactcctctctgcctcattttctcccagtctgtttccttactctctcctctcacctggacacacagtcagacccttaacttgcctggagagctgccactgctgccgcaccactgccccaagctaaaactcacagggcaggagcggaggcagcacccctcctacagccttctgagtgaaggcaaccccagtggccctccttatttctttctttcttttcttttctttttttttttttttgagatggagtttcgctcttgttgcccaggctggagtgcaatggcacgatctcggctcaccgcaacctccgcctgccgggttcaagcgattctcctgcctcagcctcccgagtagctgggattacaggcacgcgccaccacgcccggctattttgtatttttagtagagacggggtttctccatgttggtcaggctggtctcgaactcctgacctcaggtgatccacctgcctcggcctcccaaagtgctgggattacaggcgtgagccgctgtgcccagccgccagtttctgcctgg

SEQ ID NO: 3638 - DNA, 2300 bp, Homo sapien
cttaggtatctgtgactcttgggcctctgctctggtgggaacttacttctctatagcccactgagccccgagacagagaacctgcccacagctctccccgctacaggctgcaggcactgcagggcagcgggtattctcctccccacctaagtctctgggaagaagtggagaggactgatgctcttcttttttctctttctgtcctttttcttgctgattttatgcaaagggctggcattctgattgttcttttttcaggtttaatccttattttaataaagttttcaagcaaaaattaagttacggattgagtgactattaaatttcttccaccagaggtcctcactgtgtttgttcaggaaaggtcactgggggaggcccagagaatgacagtattttcctgtcctcagggaacagccagggtgaaggaggtgggtgtcctacacatgcatatgaaaaaaaatatggcaaaatggcacagctggtgcaggaaaatgaaaaaggaatagcattccagttctccgtgaagcagctgaattctctatctgcagcagcattcccattatcttttccatcactaagaaaaaaaaatgggctgggcacggtggctcatgcctgtaatcccagcactttgggaggctgaggcgagaggatcgcttgagcccaggagtttgagaccaccctggccaacatagcaggacttcatctctaccaaaaaaaaaaaaaaaaaaaaaaaaaagccaggcgtggtggctcacgcctgtaatctcaacactttgggaggctgaggcaggcaaatcacttgaggtcagaagtttgagaccagcatggccaacatggtgaaaccccatctctactgaaaaaaaagatagatgcaaaaattagccaggcatggtggctcacacctgtagttccagttacttgggaggctgaagcaggagaaacacttgaacctgggaggtggaggttgcagtaaactgagatcatgccactgcactccagcctgggtgacagagtaagacttctcaaaaaaaaaaaaaaaaagctgggcgtggtggtgcattcctgtggtttcagctactcaggaggctgaggcaggaggatcacttgagcccaagaggtcaaggccacagtgagtcttgattgtgccactgaactccagcctgagtgacagagtgagaccctgtctcaaaaataaaaataaagtgtcttatgactttttatctacccttctgcccatgcccaaggcttcactgggcctcacctgtctttgatcctagataactatttgaatggtaatcagtaaagtctttagaacttagcactaaattctgatttcctggcctcaacatggggacctaaacagttagcaatctgggtttgggagtgggatgaggggagggttggaagaaatatttagtgtgtttcatttgcctttcttaaatacagggcacccctgaaacaggctttgttcgcagctctgctctgtcctcggatttaggttatcgaacaggcttcctccctcccctgcacaagggttgggaatgagtcgatttgctttcactcagcaagagcaagggactagtggtgaccaagtggtagactggagaggcctctgccccgtggcacacagctccaccatcagagagggtgatgtgggtcataggtgagggatctggaggcccggtatcggaagagcttctccaggcactggcattttgacagcaaactgcttccgtggctctttcaggactgttcctggcaatatgttattggcaaggactattttagggctatccagttgtctccccctctccccaaccttttatctagcttatcagtagctatctttccttgctctgtacaaaaacctatagcaccaataggcccagtaatcatgaagggtcagtgcaaggaaaggctggaagcccttcctctaacagccgtgctgtgactccactaactttgtggggtctcccattacatagcgtgggtatcctgagctgtgcagcctgcctcactcaccaccttggtacctgacaggactactggatgtgcctgtccttttgtaggacattctcccatcccaaagatgaggctgtgctgccgtgtgggcaagctctgtggggagaggggaggccagtgggttgtttttgccatcacagaatactgggaagcccctggcatcctgctccatagctctcttcaccactatcctggaaccttctccccacccccatccccatgcctccaaggcactgacctcaaatccaagtctttctcacttatctcaagctgcc

SEQ ID NO: 3639 - DNA, 2300 bp, Homo sapien
tctctcctaggcacctgggagcttcagagaggaagaaggtaaggtaagaagcagattctctgcgcaggactttcttagtcctcaggctatagagttaaagaaagaagtatctgtagaaggtggagtcaccttttgtttgagtaaccgtttcacccaccctggctgagggtggccaggaactccccaagttgtgcattaatggaggggggtcacacagatcctacatttttttgtttttgtttttttttttttgagacgcagtgattacaggtgtgagccaccggatcctacatttcaaatgcataaaaatctagatatgggctgggcgcagtagctcatgcctgtaatcccagcactttgggaggctgaggcaggcagatcatgaggtcaggagatcgagtccatcctggctaacatggtgaaaccccgtctctactaaaaatacagaaagccgggcatggcagcgggcgcctgtaatcccagctactcggaaagctgaggcaggagaatcgcttgaacccaggagtcagaggttgcagtgagcagagatcacgccactgcactccaacctgggcgacagagcgagactccacctcaaaacaaaataaacaaaatactagatctggaagagatcttagggattattaaattcagacaacctcattttttatagatggggaaacaagcacagactccaagggtctcatccaagatcacacagttgcagatgctggctacaagtctcctgcctcaaccacctgtattaccccattcagggtctcaagaagggtctataagacactatccattgtgtttcgggctgagtccatagagacaaccacagacatgggggactctgcccacagggaaggcaagggctctggccatggagctggatgggaagactctgaagcccgaagacattgaatcctgtgcagggaaagagcgagggttttgtgtacaacacacctgcatacctggatgtgaatctcagctccaccccttcaccaactctgtgtggcctgggcaagccattctaagggaaccctccacactgcaactttcatgtctataaaatgggaataaccatgcattccttacaggacttttttggtgtgaggattaaatgagagaatatgttgaaaagtgcttggtaaatatattaatactatgcattccctcttctttgaatgacgtgacccaggtagtcaggcttctgaccactagagggcagcagaaggtactggaaaactgggccgagtgaaccagagattagatggggtccagagagcagggatgaacttacccgtgtggattctggcaactccggcagggagggctccagcaggcgctgagggaagaactttcaagcagagccgggtctcttcaggagcgactgcagcaaccctgatgcttggatggagtccaggcaggtgatggtagtgaagaccttgccaacagagtgggcgctggagaaggagccctttagtggggaccctggggccacgactaggctggcaggcccagccagcaccaattaatccatgagtattgcccagcattgagcctggagcaccttccagcccctggccagagtcctgggtgttctgggaaaaacccctaaacctagtaactcctctccctactaggcctctttgttgctgaatctctggaatttaggggccagcagctttctgactcaggtcagccaggggttcatgttccctcacttgccctccccctgcctggcccatctctggcctggcccctgggaggaatttcctgggccagagggcagccgaaagcacagatgcccaccccagcaacgttcccgccacctgcccaggccagtgccccgtgcccaaccccagagggtgcgggatgacagactctgacaatcattaaaccagccgggcctgatttcccagcactgcctgctaagatccgggccaagtggcactgaatatgcaaatcacctggggccaggagcccagtctaaaggccaggaaatcccctccatccaatgagacaccagctcaggttactgcaggggacacactataaagccctgagctcagggaggagctccctccaggctctatttagagccgggtaggggagcgcagcggccagatacctcagcgctacctggcggaactggatttctctcccgcctgccggcctgcctgccacagccggactccgccactccggtaggattccccgcctgtcattccctagcccagctcttgggaaactgcagaggggtccagaggatttgcagttctgaacctgcacac

SEQ ID NO: 3640 - DNA, 2300 bp, Homo sapien
tttagtagagacgggggtttcaccatgttggtcaggctggtcttgaactcctgaccttgtgatctgcccacctcagcctcccaaagtgctgggattacacacatgagccactgcgtctggccctttttttttttttttttttttttgagacagagtcttgctctgttgcccaggctggagtgcagtggcatgatctcggatcactgcaacctctgcctcctgggttcaagtgattctgatgccctagcctcccgagtagctgggattacaggtgtgcactgccacatctgtccaatttttgtatttttagtagagatggggtttcaccatgttgtctgggctggtgaaggtggtaggtttcaatgacagcagcataatgccgtgggagttgggaggagggaatgatctgactcactctggggcaggtcttcgagttaattctccagtggattctcctaggcatcgtgtggtccgtcctcagaactgtgcctccctaatgtggctgagtggattcactacccaccccatgcttgggctctgcctcgacctctccctcccatgcacagccaaagccgctcaaagctgctggttttccttgactctgggcttctctccatcacccactgcctcccaacagaacccccggtctctgcatcctcctgttccagattgctaggaccccagctgcccatcagggacccctctaaaataacttagttgagtcattgtttgcctacttaacaacctgtgatattctccattgcttatgggataaaatctaaactccttggcttggcatacaaagtcctttacagtccagttcctcctctgctgatatttccaagctctttgtcccaagtgcccatgctctctccccacctcccttgcactctagtcccctcgacagacttgctctcttgcgggaacatcacccacttccacatcacccagcctttgtgtgtgctgtgtcttctgcctagagcaccctcccttcccgtagtctgtcaggcaagctcacagccatttctcgggatccattcaaatgtcacctcgcttgggaggccttccagatcccccccagattttcttgggttccctcagcatcatgacctttgcctttcatagcatctatcatgctgaacttacacatttacttccttctctggactgaaagctcattggtggcagagatcctttacatttttgtattctgagtgtctggaacacaacacgtagtcagtaaagacgtgttattgcaaatgtccacacatcttgtgtctggctcagaatatggtgttttaggccgggtgcggtggctcccagcactttgggaggctgaggcaggcggatcacctgaggttaggagtttgagaccagcctggtcaacacggtgaaaccctgtctctactaaaaatacaaaaattagccgggtatggtggcgggcactacagtaactgtaatcccagttactcagggggctgaggcaggagaatcacttgaacccaggaggcggaggctgcagtgagccaagaccgcgccattgcactccagcctgggcaaccgaaaaaaaaaaaaaaattagaaatctctggagtcagatctgggttgtgggccttgctctgccttgtatcaactatgtggcaagtgactgacctctacaaacctcagatttgtgatctgagattaatcaagggttaattgagaaaccagctgagtgctagcacctagtaagtgttcagtaagtgacagtgatggttattgctgagttttgaatggaggagctgccttagaatcaggagacctgcgccccagttcccattctgccccacctccctgtgtcaccctaggcaggccacatttcctccctagtttcaggggcctgaagcagatgccctcttagggccccacagcctgacatgctgtagggcctgagaagcggcgtcgtggaggacgagatgtgtgagggcagcaaagagtgctatgtgtccagcagagggccctgcccggcctgtggccggaggctgggagggagggcaggcgagtgatgccagacgcctgactggaggcggatccagccggccagctgcctctctggagcccagctcttgggccccctgcactcacctgctcttcctgggctggctgtctcctgctcatccagccatgcggtggctgtggcccctggctgtctctcttgctgtgattttggctgtggggctaagcagggtctctgggggtgcccccctgcacctgggcaggcacagagccgagacccaggagcagcagagccgatccaagag

SEQ ID NO: 3641 - DNA, 2300 bp, Homo sapien
cctggactcatgcatcatgaaaccctcagccagcctgcccgagtccctgtattcactggtgatgacctaccagaacgcccgcatgtggtggtactttggctgctacttctgcctgcccatcctcttcacagtcacctgccagctggtgacatggcgggtgcgaggccctccagggaggaagtcagagtgcagggccagcaagcacgagcagtgtgagagccagctcaacagcaccgtggtgggcctgaccgtggtctacgccttctgcaccctcccagagaacgtctgcaacatcgtggtggcctacctctccaccgagctgacccgccagaccctggacctcctgggcctcatcaaccagttctccaccttcttcaagggcgccatcaccccagtgctgctcctttgcatctgcaggccgctgggccaggccttcctggactgctgctgctgctgctgctgtgaggagtgcggcggggcttcggaggcctctgctgccaatgggtcggacaacaagctcaagaccgaggtgtcctcttccatctacttccacaagcccagggagtcacccccactcctgcccctgggcacaccttgctgaggccccagtaggggtggggagggagggagaggccgccacccccgccggtgtctgctgttctttccccataggtcttgctttgttgcctgtcttgctgtctagggatggacttggttcctcttgtcaaggtttgggaatgtcaaagccccctccccacacagggcctttcctgtcccttgtggggccttccaaccctgtcctttccactggtgggcggtgatgcttctaggtccttagaactgcccagaaactctgagtcccagcagctgggagccagaactttgcctgccctcccttggttccagtctctcttctctctctctgccttggaacctgaccatactttagttgtgcccttcccaggcatcatcctcctaccaccaacctggggccccatcttggaatgggggctccttggggccagcccagtgtggctcaccacactcttctttttttttttttttttttttgagatggagtcttgctctgttgcccaggctggagtacatttgcctgatgtcagctccctgcaacctccgcctcctgggttcaagcgattctcctgcctcagcctcctgagtagctgggattacaggtgtgcaccaacacacccggctaatttttgtatttgtagaagaggcggggtttcaccatgttggccaggctggtgttgaactcctgacctcaagtgatctgcctgccttggcctcccaaagtgctgggattacaggtgtgagctgccacgcccagccccagtacactcttctctggaccagatctgtcccagtcctggatgcctcctcctactggtgccttcttttcttccagaggatttctctctccttcctcctcctttctttgggatccctgggttgccctgtcccaacctccttgttaggtgctttcccataggaggcccttcttgagaaacaataaactaggtagaactacccctatgcccatccactttcttgtgccacattctggcagggcccagatgcagctgggccttcctggcctggcagtgcctaggagaatttctcctgacctggcctggcctgtggctgatgttcagaacagccttgtggccgatgttcagaacagccttgtggccctggcgactccaagggttttatggcttttgagggacagagaggatggagggcttggggagccggaggacctaagtcctcatcctggcctaaaccccatgctccttgggaagtcaaaagcctggaaaatatctcctctggagccttcatctctgctatgccctctctccacaaagccccccttggagggagtccagtggtctttcctctgtgagccccagggcttcccagcctttgtcactctgagagctgctcttgttcagtttcttagaatggactgttttgcctgtagacggcccagctgcctgccctggcctgcccccacccagcccccactgcaccacccttcccgccagagctcccactgcccccggcagacccttcatgcagcttctcctgtggggtcttgcccttgaagtgccacttcccccagccccacctctggtcccttccagagggcacccttagccttgtaggtccctgggaagctggcacagcatcaaccagaagtgatgcctcagccaggccaccagtcgctccccgcctgggagctcagctttcctcagaaccaccccccctgtctgaag

SEQ ID NO: 3642 - DNA, 2300 bp, Homo sapien
gggtggaccctcatagcctacccaggcagctgtaacaattcacactaccgtaaaccatgtggcttctaaacaacagaaatgtattgctggcctggcgtggtggctcatgcctgtaatcccagcactttgggaggccgaggcaggcggatcacgaggtcaggagatccagctaacacagtgaaacgctgtctctactaaaaatacaaaaaattagccggacgtggtagcacacacctgtagtcagctattcgggaggctgaggcagaagaattgtttgaaccctggaggtggagggtgcagtgagctatcatgccactgcactccagcctggatgacagagcaagactccatctcaaaaaaaaaagaaaaaagaaaaaaagaaatgtgttgctcacagttctggaagctgggaagtctaggatcaagacccttgcagactcagtgtctggctattaggcagagccttctttctgtccttgcatggtgaaaaggttgtgggctggtattcttccccctaatcccaccggccccctttataaggctctaccctcatgacttaatcacctcctaataccatcactttagggattaggacttcaacctatgaatttggggggacacaaacattcagtccatagcctttatcttaggagctagaggaggacttataaagggcagaggttagaaagatggtgcttaataaaccagaatattggccaggctcatgcctgtaatcccagcactttgggaggctgaggcaggcagatggcttgagctcagggcttcgagaccagcctggacaacatggcaaaaccccgtctctaccaaatatacaaaaattaggctggcatggtggcgcatgcctgtagtcccagctactcgggaggctgaggtagaagaatcacctgagcccgaggaggtggaggctgcagtgagtcgagatcccaccgctgcactccagcctgggccacacagtgagaccccatcaaaaaaaaaaaaaaaaacaatattatgctagccgaaaccttgtgattcttctactttggtaactgtttgactatttggggtcatctaactccagttgattggacagatatggttgatattgatagtttacccacttttgactaaaacaatagactacatatgactacatttgaaaaccaaaccccaacgggcagccagcataggctggggactgcccgaagcctgagcctacccgggactgccagctgaggttgtcagcctgcctgagcaggtcctatgggtgggtcttgcaaggagaggggcaggagtaaggcatctttgcaggcactccagacccacttcaagaggagaactatcacttctcctcctgaagaatactctgcttttcaccaaaacagggcaacattttcctttgtcacagacgttcctcactgaaaaccccctgccaggactgtatctgtttgggtatcttggggatgctggtaaaaatccggagcaagttcaagcgtccgtttcacttggggccagaggcttcctaacaagtggtcggggtaaattgtggtgaacaaaacaagatggagtattaaaagacccgaatacggttgtccctctgcactgggtgcattttgagaggatgggactgtacccaggaatgctcagaggcaagggttcagggacaaaaaagcctccatctgcctccctgtcgtagagatctcatctccgtgtcctgggaagtgggtgacccactctccttcaacctgaaaaggctcctgcttaaccggaacctcacccacctcgagcccaccaccctttaagaaagggggtgccagtcagggcgcggcagtcggggacagggtctaaaataaattagaccccatttcccaagcgcctctcgacgccagctgccggtcaacccccgccgctgaagcctgcggattccctgctcaccccacctgcggattccctgctcaccccacctgcgggtgcggcccctggccccccggctccagcgagggaggagcgcgcgctcgggtgcgagcaggacacggcccggccgcgagggagggcggcggcggcggcggaggaggagggcgcggaagccacacccatcggcgagccgattccggggcagcgagtcgtcggcagccgcgctcgagcctccgcccgcaccgagccgcgggacccgggccgtaccggggaggggccgctccgggccgcagcgcgagggcagcgaggggcggcggggacctggcaccgggcggggccggcggcagcgaccatgatcgctttgttcaacaagctgctggactggt

SEQ ID NO: 3643 - DNA, 2300 bp, Homo sapien
gggtgaggcagaggccagtctccaggtcactgctcgcaagcatgttagggattcccaggttcctgcttccctccagtctgtcctgagcacgggaaccaacccctttcccagccctaatcggcctcctcctcagggaaacccacccactccggagaggaacgcaggctgcagggaaggaggtgccaggatcagctggccatggaggggctcaaaaaagagccagcccctgtccccactgccaagagcaagggcgggtgctgggaggccttctgagcctctgggggctgttcttgttcttcgtctcaaccctcctcctcaaggggccagcagaaggccagccccctcccgaccaccccctccggcatgcctaccccctgtgcctagggtacctcatttcttttttgctgtcaccatttgacagctgaatcagggaagtgggaggaagaaagaggacgtggattgtgcatgttgggggccgggaagggaagggcgtttgaaatgttacaaggtaaaaggaggcgtgcagcgagcatgaaccggctgggctgctggcccgcaaggagcctgccaaggtcaggcaggggcagtgggcagaggagtcttggacttgggggccacccttcaggtcccaggcatccaggcaccccagcagcgaagaggacatgggagtcccctggtgtgagggccagagactgtccactgtctgtaagtcttctaagtagatgtcagggttctgggaggaggcctgcagggggctgagggcccaggggaagcccctcggactccctcccacaagtggactctgctatctgcttcctgctgggctggcctacactcaggccgtgggctgtggagagctgggccgtggcacaggcgtggagacgacctttttggcctggccccggccctttccttcacattgtgaggcatggattcttgcttcttctttttccccaccccgagtctgtgccacatctgctctgggaagatgtggtctgtgcttggccatgaattcccaaggcttgaagcagcaagggctttgagggagagggccttgagggagagggccttgagggagagggctgtggggcagaagcagagaaggagaaataagcctccggccaaggtcaggttgagcaggagagccttgggttctttgtgggacagcacagagctgggggtcaggcgagctgtgcccagcaagtaggcagcggctggatgtgacaaagacccagaggagaaacacagaagaggggagagggtctggaagctggggaaagcaggatggtcgggaaggcctggcccctcacccattcccagggaacggggccttgggccccagaagggcacaggcgggaggcagccgacccctggtggcagcggcagcaggcacaggagggcagaatgcagctggggtgtgcgtgggtggcagcaaggaggggcggagggaggaagctggcttcctggagccttctcagccctcaaagacagaccgacagacagacagacagctggcaagaggcagcctgggggccacagctgcttcagtaagtatctgaaggggggactgggagtcctgtggccccggggggtgcgaactccggggatataagagggcatctctaggagggagtgcgggagggcgagtggggcgccacagtgcctggctggggtatgggtgctcacagacctgatgtccccaagacgggggtgagcagggaagccacagggagctacaaggagagcagaggctgaagggaccttttctgctaccagagaccctcgctctaccactcacacctgtgccaggcccattctgtcccctcacctccgtccctgctgccttggtgattcaacacccccgccacctcgcccactgtgaccctggctctgggagatagggactgcccccaagaggagatggtcccaccacctccatgcctcctgtcttgcccccagctgtcgcctcaccatgcgctgtcgttcaagggcttggtgaggccatttcctgtgacggttacagaggcgggagacggggggatgggcaggaggaggaaggaaacacctccagcctacctccctggacagagaccccagaagccagaaacagacctgggagtggaacagcagcagttaggagaggaccctgctggggtccaggagcccgcctgcctggctgcccaaccagctccaacactgctggaggcctccattctctgttcaggggaaggcccactggttagctcagagatggcttctgcgtgctttctcccttccgtcctagagaacacatattttct

SEQ ID NO: 3644 - DNA, 2300 bp, Homo sapien
gagtccactccagagagggcagagaggggcgtcccaagtcaccaggccaggctggggagggggaggtgcagggcgatgacgcatgtcttgtgccatctgaggttgcagttggcatcctcagccctcatgagctctggccacacacctccatggatgtccaggtatccctaagcacaggggaagaaggagtgggcaggagccaaggagtgactgtcccctctaccccacatccacccagagggaacaggggatctttgagaggtcttgcctaatgctcagccactacccccacccccaaccccaactatcttccccatcgcctggctcccagcttccttgctgtgaagctcagcttccaactgtccagccactgctaggcctcagtctgtgggggaaaggggtgggctcacagccaacagggctcagaccctggaaacttggggggaccaggcagacctgtgtggggagggctttgccgcttcctcctcccacccctgtggtgtcctagcttcctgttcttgataacaatcagcataggctcagagccgggccctctttccaacccccacctgccccctcctgtgtccccagggcccccactacccaccagtggaaacactgactggtgtggggggtgaggcagaggccagtctccaggtcactgctcgcaagcatgttagggattcccaggttcctgcttccctccagtctgtcctgagcacgggaaccaacccctttcccagccctaatcggcctcctcctcagggaaacccacccactccggagaggaacgcaggctgcagggaaggaggtgccaggatcagctggccatggaggggctcaaaaaagagccagcccctgtccccactgccaagagcaagggcgggtgctgggaggccttctgagcctctgggggctgttcttgttcttcgtctcaaccctcctcctcaaggggccagcagaaggccagccccctcccgaccaccccctccggcatgcctaccccctgtgcctagggtacctcatttcttttttgctgtcaccatttgacagctgaatcagggaagtgggaggaagaaagaggacgtggattgtgcatgttgggggccgggaagggaagggcgtttgaaatgttacaaggtaaaaggaggcgtgcagcgagcatgaaccggctgggctgctggcccgcaaggagcctgccaaggtcaggcaggggcagtgggcagaggagtcttggacttgggggccacccttcaggtcccaggcatccaggcaccccagcagcgaagaggacatgggagtcccctggtgtgagggccagagactgtccactgtctgtaagtcttctaagtagatgtcagggttctgggaggaggcctgcagggggctgagggcccaggggaagcccctcggactccctcccacaagtggactctgctatctgcttcctgctgggctggcctacactcaggccgtgggctgtggagagctgggccgtggcacaggcgtggagacgacctttttggcctggccccggccctttccttcacattgtgaggcatggattcttgcttcttctttttccccaccccgagtctgtgccacatctgctctgggaagatgtggtctgtgcttggccatgaattcccaaggcttgaagcagcaagggctttgagggagagggccttgagggagagggccttgagggagagggctgtggggcagaagcagagaaggagaaataagcctccggccaaggtcaggttgagcaggagagccttgggttctttgtgggacagcacagagctgggggtcaggcgagctgtgcccagcaagtaggcagcggctggatgtgacaaagacccagaggagaaacacagaagaggggagagggtctggaagctggggaaagcaggatggtcgggaaggcctggcccctcacccattcccagggaacggggccttgggccccagaagggcacaggcgggaggcagccgacccctggtggcagcggcagcaggcacaggagggcagaatgcagctggggtgtgcgtgggtggcagcaaggaggggcggagggaggaagctggcttcctggagccttctcagccctcaaagacagaccgacagacagacagacagctggcaagaggcagcctgggggccacagctgcttcagtaagtatctgaaggggggactgggagtcctgtggccccggggggtgcgaactccggggatataagagggcatctctaggagggagtgcgggagggcgagtggggcgccacagtgcctggc

SEQ ID NO: 3645 - DNA, 2300 bp, Homo sapien
cctctgggggccaactgctccccagcaaggagctccctactccctaggggctggcaaagagcaacgacttctgggaattccagatgtaatgtccgcctttccccgggcctgggctagggaggggggcgcttctgacacttggggcagggagctgcggctcacagccctggaactgggaatcactagaggggaaaacaagagagtcaagacgtgtgtggccagagcttgggagggctgagggcacccaccacagcctcagatgggacaaggctgactctcaagatgcatcatgccctgcaccagtccctccccagcctggcctggtggcttgggacacccctctttgtcctccctggagtggactctgtcccacccgggatgctgggagacccctgggagtgactccttcctgcacttcctcagtgctcggctggaagtgccccggcagcccgggttcagggagaaagtcagcagtgaggaggaagagggaggctggtgagaggtgagacccggcagccatgacctcctcaccctgtgctgctcccagacccacttccccagccagctcctcccagctcctcggtcctctggctgctgactcccaacctctcctccgtgagcaaagcacaccatgggctgacaagggaggtgctatgatcatcccccagtggagggaggaagctgaggaggagcctgagactcagcaatttgcccaaggtcacacagttaataagctacgtttagactcattatgcatagatctttctgatttccaactattactatactttctctggagtcgagggtggctagaacctaaatctcaacccaggaacacaaatcgattcgagtgatggaagtttgagagctgctgtgaccttttggccccaggggtgggaaggttctggaggggagagggagtcacgcccaggagccttccaacagcccggatgggacagagtccactccagagagggcagagaggggcgtcccaagtcaccaggccaggctggggagggggaggtgcagggcgatgacgcatgtcttgtgccatctgaggttgcagttggcatcctcagccctcatgagctctggccacacacctccatggatgtccaggtatccctaagcacaggggaagaaggagtgggcaggagccaaggagtgactgtcccctctaccccacatccacccagagggaacaggggatctttgagaggtcttgcctaatgctcagccactacccccacccccaaccccaactatcttccccatcgcctggctcccagcttccttgctgtgaagctcagcttccaactgtccagccactgctaggcctcagtctgtgggggaaaggggtgggctcacagccaacagggctcagaccctggaaacttggggggaccaggcagacctgtgtggggagggctttgccgcttcctcctcccacccctgtggtgtcctagcttcctgttcttgataacaatcagcataggctcagagccgggccctctttccaacccccacctgccccctcctgtgtccccagggcccccactacccaccagtggaaacactgactggtgtggggggtgaggcagaggccagtctccaggtcactgctcgcaagcatgttagggattcccaggttcctgcttccctccagtctgtcctgagcacgggaaccaacccctttcccagccctaatcggcctcctcctcagggaaacccacccactccggagaggaacgcaggctgcagggaaggaggtgccaggatcagctggccatggaggggctcaaaaaagagccagcccctgtccccactgccaagagcaagggcgggtgctgggaggccttctgagcctctgggggctgttcttgttcttcgtctcaaccctcctcctcaaggggccagcagaaggccagccccctcccgaccaccccctccggcatgcctaccccctgtgcctagggtacctcatttcttttttgctgtcaccatttgacagctgaatcagggaagtgggaggaagaaagaggacgtggattgtgcatgttgggggccgggaagggaagggcgtttgaaatgttacaaggtaaaaggaggcgtgcagcgagcatgaaccggctgggctgctggcccgcaaggagcctgccaaggtcaggcaggggcagtgggcagaggagtcttggacttgggggccacccttcaggtcccaggcatccaggcaccccagcagcgaagaggacatgggagtcccctggtgtgagggccagagactgtccactgtctgtaag

SEQ ID NO: 3646 - DNA, 2300 bp, Homo sapien
gcttgtcctccctgctggggcaggcccaggagaatccagctaccacagaggctgcgttggtgttcagacttctatacctgtgtgttttccacacatcccctctccccactacctgagtttgttctgagtcctgggcttcactcccagggcccaaagccttttcttccattctcactcctcatcctcagctgtctgtaggtgggagcacctgggtgagcagctcggggtgactcaagggctctagtcaggagtaaagcaaagccccaagttcattatctttgaggccaggcctcaggcaggcttgcctgggttccagcagtgcccaaagccaggtgggggttgggaggggcaggggaaccaggatggacgctgctgattcggggaaaagaagtgggggaaggcaagcaaaagtcccaggtacttgaattgctcctcagaggattcccagctgagaggaccccaatttgggaggtttggagcagggtctgccatctctgttctatggagtccgaggtcccaggttcaagcccagcttttctgttcagacacttgggctcttcccctctctggttatcagcttcctcatctggcagtgatgaggtgggaccagaggaggcccaagggccaggtgggctctagatctacaattgctgtgactcagcagccaaagtatgtgcttctgtccacaagagcgtggtaccacatggatatacaaaaggagacacacactcagctggccatccacctaggacacaggaacacacatccacatggtgtcaccaagaccacacgcacccccacagaaacactatctatctcgcactcggtgatggagtcaacagacactgtgcccctcctccagagccaaggagtgggacagccagctgcaaatgtgtccatttgcagagccacctctcctcttggtcttccccaagagcacaggacactttcctccctggagagctgagggctgggagtgggctacaggtaggggaggcattaaggaaggagaccactactacttctgctgccctccctcctccccctcaccttgcctagttcacaagacaggaggaaagagagaaagcaaaaagttggaaagaaacagaagttaagtagccagacaaccttagcaccaccacccggccctaggagttaaaaaagtaataataataatatcaacccctgacctaaactacttgtgttatctgtgaattccagacattgtatgaaaaagcactgcaaaactttctgttccgttagctgatacatgtagcccccagtcacgttccccacgcttgctcaatttatcacgaccctttcacgtggaccccttagagttgtaagcctttaaaaaggccaagaatttctttttcagggagctcggctcttaagacgcaagtcggctgacgctcccggctgaataaacctcttctttcttttttttttgttttgagacagagtctcactctatcacccaggctggagtgcggtggcacgatctcggctcactgcaagctccgcctcccgggttcacgccattctcctgcctcagcctccctagtagctgggattacaggcacctaccaccatgcctggctaatttttgtatttttagtagagacggggtttcaccataatagccaggatggtctcggtctcctgacctcgtgacccgcccgcctcgggctcccaaagtgctgggattacaggcgtgagccactgtgcccggcctcttccttctttaatctggtgtctgaggagttttgtctgtggctcgtcctgctacagcatcaggaagaggtgggcttgtctgcagcctgagagtcacaatccctttccaccttctgggcctggagccagcctccgcctctctcccttcaagagccttgccaaggctggagagagcgggggtcaggctctggggctaagaggcagccccttgcttttgctgcctgctgcctgctgcctgcttgtgcttgaaactctgcccttcccacccatgcccgccttccttgcctgccagcaagcaaggcaaggtgggctaggggactggctcctccccttgctgcctcccaactttactctgcagctatcaggatgaggctcccaatcctgttcgctgccctgctctggttccggggttttctggcagaggtaaggtgggcatgggggagcaggccagcgggtggggtccccgctctccagggcacatccagatctcccagcgctcctcgggaccccacagctggtctgcattaggcgaggagaggccactccctttccaccagggccagcac

SEQ ID NO: 3647 - DNA, 2300 bp, Homo sapien
cagccgggcagagacgctcctcacttcctagatgggatggcggccgggaagaggtgctcctcacttcctagatgggatggcggctgggcagagacgctcctcactttccagactgggcagccaggcagaggggctcctcacatcccagacgatgggcggccaggcagagacgctcctcacttcccagacggggtggcggccgggcagaggctgcaatctcggcactttgggaggccaaggcaggctgctgggaggtggatgttgtagcgagccgagatcacgccactgcactccagcctgggcaccattgagcactgagtgaaggagactccgtctgcaatcccggcacctcgggaggccgaggctggcggatcactcgcagttaggagctggagaccagcctggccaacacagcgaaaccccgtctccacccaaaaaatacgaaaaccagtcaggcgtggcggcatgcgcctgcaattgcaggcactcggcaggctgaggcaggagaatcaggcagggaggttgcagtgagccgagatggcagcagtacagtccagcttcggctcggcatcagagggagaccgtggaaagaggggagagggagagggagagcgagagcggaggctcgtcttctactttcagcgccatggcaccaactggaggcctagggtcaaggtctgctcatttcttggtccagctatgcagcccctctagccctgggaggttattgggagagtggagaggtgttgatgagaggatcctggcatgtggaaagacagggtggaagaaatcctggatgcctctgaggtcccaggtttctagtataccctctggctggaccatggggagatagggcaaaaaaaggaaggaggggggcccacagcctgctctagctctgcgcgggggcttggctcagcatgggagagaccagagagagcaagaggctgcatgaaggaagcacagccagctcactatggtctaaggagagaacagggattgacctcagttttaaccaccatgccctttgctctccagggctctggggccggcccaggtcagccacttggtgggattccagcctcagggtggctgagctgcaggtgcagcacccggcctccaggtggcaccaatccgcttactttgaggtgggctctgacaaccagctgagctgcccacagtccctcagactcccgaggtcctgggagcagggatcaaggtggtccccaggccgtaaacctgacagaggctgcaggagtgcatttccacccagggtgcactcagcgggtgtaactccacacccgtttctttggagtcaaggcccggcctctcagtgaggagactgctcctggttgcccaccgtcgggtcatcccagcctgcagtggaaccctccgcagcctggcctcttccagggtagcccctcactcccctctctcctgtcctagcagacaggccagggagggtggacgagttccagctctggggatgtcccatcagctgtgtcaccttgaacaaatcattttgcctcttgggtctcagtttcctgcagtgtgaaacgtggtggaggcatgaggggcaatgggagccccaaggcctctttcagagacctcctctgggtcccatgtgacctcgtggctgtccccaaaggcaagagggtccccagccctgcggccaaggccctgggacaccctatccaaacaaatgcaggtctctgacgggctgagctttgctcgcttgggtttctttgctttcttccttttttttttttctttcctggatgaaattcctgccagctccgaaggaaggagggaagaggagcgagccgcagtgtagaaagtttccttgactcctcctccggctgggtctccctcccttgccaagcccagcctgtgaaactgaataacgaagatcactcaacaatgcctgcccctctctgactgcaccgtcccggcgctcccaccgccgccgccgccgcccaatagagcccctggggcggtccccaccgacggtgcagcccgccgggaccgggaggaagcagctgcggccatcgcgccgtgcgtccgcgcccggccgccaggtgccccagtagcccgaccgccgagatgcccagcccgccggggctccgggcgctatggctttgcgccgcgctgtgcgcttcccggagggccggcggcgccccccagcccggcccggggcccaccgcctgcccggccccctgccactgccaggaggacggcatcatgctgtctgccgactgctctgagctcgggctgtccgccgttccgggggacctggaccccct

SEQ ID NO: 3648 - DNA, 2300 bp, Homo sapien
aagggaatgagcaggactctggctgcgtcaaaatctcaggccaagcaccctctcaaagcctagttacagttcctgtctttctgggggaaggatcagtggtttgccccatttccctcccatccaccagcagtggtttctgggagcccatctatgggggctacttggaggggaaggtattggggctcagcacagaaattggggactctggggagggtaagacggaatccttgagtgtggagattatcatcagcgttgatgttgaggacctactgtctgctggatcctctgggaggcagtcagggtgatgactgtcagtgagagaccagccaggtgcacgtgagaagtgaactcactgtatcagataatcctgggagcatccagggaggaccagaggtgaggtccacaggcattcaagggagaaagaggaccgaggtggccagggaaggcccaggggagagagaagaggcttgagtcctgaagaccagaaggacttaactcagggccaggagaaggggaagccatgagcccaggttagaatgaggaaccacattggggcttttgtacttcatctccacgacctgttctgtcccactccctggggcagcatgttctagagcagggttttctgccctttttccctcagggcacacattttaaaaacacagacacacacatacacaaacacacaaacgcaatccaaggtattcagtgtcctgggttaaaccaacaaggcctctcaggcgaaaggcacccagtcaaccctgggcagcatccagccatcccaagggataggagaccccatctgggcacacacctggaagcgctgctatagaagaaagagtgcatgtttgcagccaagcagacatgggttcgaggctaagttccagctctaaccagctatggctatatgtttcttcacctctctcagcttctgttttcttgctttcaaaatgggcatacggaaagatgtttataattagacacagtgcttggcacatagcaaatgcccaatctatgggagctatggttattatctatctagtctccccttgagaggaggcacttgggaggagcggtggaggcaggcctgcagtggcccttcatttcacctatttgactctgcctgcctagagcttgccgagaatgagacccagagggtcggtcctaggacacaattcctctcaccctctgcttctgccaccatcctttcccctttgcccttggaggtgctggaggaggtgggagtgtccccgagagtgtccagactgcataaggtggcagaaaggtgctgagtgtcttccattgcaccagtgtcagggacttggatgtggtccccaggcccaaagccaaggcagatggactcatggagggggaggagcagaggagcagtgcggagtcactctctccatgtagcacccccagctcagtgcattgctggggttcttgcagggcagatgaagtgcttctttgtataggggaatatgtgggtgaaccaggaaaatgggagcctagtacatggaggtttattccaactccctgtgtgattggcaagttagaattgcccccctacctgagttattattggctcctgagaaacaggccaaaggcagcccccactaagaagcttttagcacctcctataggaaggaagccttcccagtgaatccagtgtgaggattcttttctccaggtctctggacctctcccaacatgctccatgttcctttgcacgaagaagaacagcgcagttcggtagagtgtatgtaagccccggttgccatcagcacactgtgtggattctggcaatacctgtcatccccactggtgctgcggtgcccctcatgccccttgttaataaccaatgatagtgccacttgaactcccaggctgttgtgaggagcaagcattcattcattcattcattcaatcactcatttgttcatgtgacaaatgtggattgaatgcttgccctctttcctctcccctggagccttggagagagagataagacaagcgcaaataactgtgacctgttgtaggaagtgagaaatacacccaggcagggccagatactgcgtagcaggcggggcacagaggagggaacgcttgtgtctaactgatgctcctaatgcggaagcccctgaaaggcggttgtggtgcaaaggaaaacccacaggccaaggaatgggaagaccaaggttgacacttgtttgtcaagtgtcaataatcatctctgcccggtgagttgttgcatgaagcaagatcctccttggggggtgtttagcacagagggggtgcga

SEQ ID NO: 3649 - DNA, 2300 bp, Homo sapien
acgcattccactgtcgatgggcaaccagacatgttctagttgggagtatcatggctaccaccgctatgagcagtttcgtacggttgtctagtgagcatatggatgtgtgtctgttggttaagtccccagcaatggaattgctggatcagagtagatccaagggagtctcaagggggtgagaatgactttcctaggtggagaagtgtgggatgggtcactggcttgggccagtgatggagggcgagcagagggaaggacaggaggaagccacagtgggaagaggggcttgaggaccagcagcacactgaggctctgctgattgttccccgcttacctgggttagtttccagtggctgccgtgacaaagtaccgcaaactgggtggcctaaaacaacagaagtttattctttcacagttctggaggccagaaacccaatatcaagatgtcagcagggccacattcctgtcaatggctctaggggagaacccactgcgtgcctcttccagcttctcgtggttaccacatcactccaatctctgcctctgtcttcacctcaccttcttctctgtgtgtgagctctgcgtgtctacacaagggcaattgacattggatttagagcccactcagataatccaggaggatctcctcatctcaagatctcttacttagctacatctgcaaaggccgttttttcaagtaagatcatattcacaggttccagggattatgaggtagacacacctttagggaggccaccattcatccaccacactttccctcactcccatgctaacacccccagctcatttcccccctttgcacagctctgaggcaggccactttctgatggcaaatcatgtctctcttggccagctcaggccaagcttcctccaggaagccctccctgacccacaggtacttgagattcctccagcactaatgtataaggctctgtccagcagtatctgtgggtctgaatctctcctcagaccgaagtttcctgagggcagggaacacacactgttcacaggggcacacacactttctccagtgctcatccagggctctgcataaactggttctggcaataaggaacttgggctgaagtcacctttccagcagtgtctggtccagccagggcatcatgcccagtaacagccccgatgtccaacacttccccatgtcctcttctccccctagacactgccaccttaggggtcctggctgttacttcgtcccagggcctgactggtagtcttagttacacacacaacacaggggagggaggaaggagcttggggcaaagggagggagtccagccctttgcctttccttggagaaggcaagggagacaggaatgcctttggctgggagaccctggccagagatcagaagatcaaaggatgagaagatcaggggcgaggcaggtggcactcacttggaggcaccagagagaagcggcagctgctgcctcctaagggcagggctgacccagaacgccctcctctacccacagcctccccagcctatctttcctaactttatagccctgcttctccaccaggaggggctctgttggttacatgcaggtgaggagagggatgtccactgacattcatgctacacccatgggttctcccatttaaacctcacaacattatcttatggggaatattagatactattttatagatgcagaaactgaggcacagagaggaaaggaactagtccaatatcaaacaactgctaagtgttagggccaagatacaaactctggcagtctgaccccagagccactgaggattacattataagggcaggcagagaactctattcagtccaactgcagcatgagggagtgaggctaggtatcaggaaggacttcttgttgggcaggtattttagatccagatcttggatctagtctttctatagctctgatgaaccaaatagttcgggagttagggaagagggcagatgggtggggcgctatccagagggaagggcatacgagagaagcggcagaacgagagaggatcagcgcggagggtggcgggcactggaccgcagaactggcactcgaggtcccaggggccggaatgcgcttggagggagagggccgctcagcgagggcgggacagaacctctcccgggctgggagtgcacggcgcggtgcgcccaggtaggcttgggggaagggtgccgagctccggaaagttccacaggtcctccgcagccctggggagcaggacccagaaaccgacgcgacgggtggggcgctacccgggccggccctaat

SEQ ID NO: 3650 - DNA, 2300 bp, Homo sapien
gtgtccgaacaaaggcctctcatattctcagactttggcgctgttcagtctgtggatgtggaagtcagacaacttctgacttctccttgggtggaaggagaaatgaggtgggaaaaggtgactttccttctcatgactgatatttaggccccattccaccttacacagagggccagctgtgggggtcctggctagcagctgtgccacaccccccgtggtgagggctttcctctcctactccttccctgggtgccctctaccctcctgcctctgtgtctggtccctggcacccctcagctgctcgatcgatcggccccagtggcagaacctgcctccctgcactctctcagcttctgcccccccttcccaatgagtgctgggcgtctggccccagccctctcctctccctccatccagcctcacccctggacagggccaggcaacccagtgtgcccctagaggccaacgtcggaagaccagaggccaggcaagcctgtgcttgctccccacccgcaggggcagactaaacatttgcctagggcaccagcgcagcagggacagccaaaaataagggaggaggagtgaggagaatttgacatttcatccacagcctcaaagaggacttcataggggaaaaaaattagactttcactggacttcttcacacttttaaggttgttaattaagtttacttttttaaaaaaaatcgtgaatcacatattctgagttcttggggcttctaaaggtcttgctttcggactaggcatggagcttttgggcaatgcagacaattttccctacactttctgggaagtgggcagcccttgtggctgggagaaccagaccattagcttccactttcagccccattattctcctttgcctgggtataacagggcaggggacagaggtcaagtcccccactcccccagttataaggcagatgagaagattttgctttttgcaatcctgcaagaagagcactggcctgtgtgacagaaaatgtggcttcaagtcctggctctgatcgtgactactgtgtcatttgccctctctgcacctcagtttctctatcttcaaggtggggataattatcttccctgcctcacagggtgttgggaagatcaaatatatagtcaatgtgagggggatttgcaaaaaaaaaaaaaaagacttcacacagctataatgtatgatgatgttattgtgagatcgttcatctaaccagtcattgatcctccgccgtttttttgttttgttttgtttttgtttttgtttttgttttttgagaaagggtctggctctgtcacccaggctggagtgcagtgacctgatcgcaactcactgcaacctccacctcctaggctcaagccacccctcaccttagcctcctgagtagctgggactataggtgtgcactaccacgccaactaatttttgtatttttttgtagagatggggttttggttttgccatgttgtccaggctggtctcgaactcctgagccaaagcaatccacctaccttggtctcccctcccacagttctgggattacaggagtaagccactgtgcccagcctgatccttttttttttttttttttttttttttaagacagagtttttttgctctgtcgcccaggctggagtgcagtggtgcgatctcagctcactgcaacctccgcctcctgggttcaagagattctcctgcctcagcctcccaagtagctgggactacaggcgtgggctaccacgcccgtctaatttttatattttcagtagagacgggggtttcaccatattggccaggctggtctcgaactcctgacctcgtgattcacctgcgtcggcctcccaaagtgctgggattacaggcgtgagccatggggcccagctctattttttttttttttaaacaaaattttttgaggtggcagaaccagagttgagccttgaaagactagtatgaatcaggtgaagaggcggggaataacgtttcagacagagggaacagcacacgctgcaaaggcacaaagttaagaaggaacctgaaaggttcttgtatcggttggaatcccgagagctccccaacagctaacacgaagcggtgcgttttaacaagagcctgggtgccggcgggctgaggcgtaaaatggcgtcagcccccaaaatggcgtcagccccaagtgaggacggggcaggggttttattgtctcctataaacagggggcgtctcggtctgacgtaactgctacgcggtacccggatggcctctttctccatcttcaggggtaggtgtct

SEQ ID NO: 3651 - DNA, 2300 bp, Homo sapien
ttagaatgctccatttttaaaaacaatgacacctgtaaaaagtttatgaaaatcttttagcctggcctctattcccaccagttaacataccccctctggtggacaaatggaaactgtacatttagtgtatggggttcttttttttctttctctttgttttcttcctccctctctacctccttttcttccttcctcttttgtcttctatccttttttctttcctctctgttgccaaaattatagggatttacttattttatcaaaccatctctcttttccaccggactcaatacagttcttgcttttttaagagacatttttaagacctatttctcagagaaccacccaaggaagtaatcaatttcagttctgaagacagaactgtaattgagatacaattacaattggggcaggaagaaaataaagacaggtattgaaaggactaaaacaaaacatcagtagtaaaataagcaggaactcaattatgacagaaaacacttcactaaatgctgagtaaatgctaacaataaatgcaaacccccaacagcaaactggaattagactggacaagaatgggattccttatgtttgtttcacaactttataataattaataaactactgtagttggtttattcctacaactaaggtgaggaaccccaggggagcatcacagagtcctagtgaacatgtggtgcccttgagagaaaacaccccacacaatggctatggggaaccatttgccacttaacaccagttttgactagatgtagacatcactgcagtggccaaaattatactgatttacaagtttagaaagagactgattattactctgttaccaataatagtaataaatagtataatagtaataaataatagtaataataataaattactattagtattaccatcgttgttccaaagctacacagtgagctgagagcagtcagatgagggttggctttttgcttgttttgtttttccacccacagcatttccaaaggctagtcaagttccagccatgtgctttagattaagtcaggtctgtgccatctttcagcgctcatgaagcattggcctctggcagaggcagctctgagaagttaaggttggcttaactataaacaggttcttccttgttcagaaagtaccatgcatctagcgttggaagatggtttaaaagtcatctattccagctgggcacagtggctcacgcctgtaatcccagcactttgggaggctgagaaggatggatcacctgaggtcaggagttcaagaccagcctggccaacacggtgaaaccccgtctctactaaaaatacaaaaattagctgggcgtggtggcgcttgcctgtaatcccagctattcgggaggctgaggcaggagaactgcttgaacccgggaggcagaggttgcagtgagccgagattgcaccattgcactccagcctgggtgacagagcgagactccgtctcaaaaaaaaaaaaaaaaaaaaaaagtcatctattccaaactgccacccagtgcaaggatcctttctgcactatccctaacaagtgatgacctaacttccacttgaacatttccagtgatgaaggaattcactaccctacctactttgttcttcagagttctaattgatagaatgctttattgaactaagttctgcatctcttagactttcatccgttgtccttaaatgtgtcctctgaataaacgtgtcctctgaagtagtaaaatctcccatgtgaaaaaaaataaaggaagacagctatcacgtattctcttttccagattaaatatttctggtttctttcattgttcttgctaagaaacgatttccagctccttccttggtctggcagagccgactttgtaaccgaatttggactgccggatgacgtctcagggttcagccgcagggtgtaggaagctgaatggctgcgcccagcgcgcgctctcatttgaatgcgtgagcgttcagagcactggccaatagagaggagcggtggctgcgcttctttcccggtggattactgtgggccaatcacaatcttccccagacagggggcggagccacgccaacagtcagaggtcgcgcaggcgctggtaccccgttggtccgcgcgttgctgcgttgtgaggggtgtcagctcaggtaagcaaggagagtattccggttccccatctgaaagaaggtacactggagaaggtcactgagtcttggggggaaggagtcctgtttccgcctaatatgggagttttcgtctcctctgaaaggagagccttagaaaag

SEQ ID NO: 3652 - DNA, 2300 bp, Homo sapien
cataaataaatgcatgtagcaaggaaaatgaggttacataatgtatacattattataccttgattttccttatgtacattgttattgatagtacacagatttgacatgaggtttaattagtatttataatgtatttaagaatatcctactaaagcatatggtgtttagacacagtattattaaacataatattttttacatttatatgtcacttttcatttgaggctttcaattcaataattaattgtttccttaatgtatgatttccacttcatttcaggggaaattgaggaacaggcaaattttcacatgacagaatataataaagtttccctttacaataccccaatcattttgcaacattttttaaatgaaaaattttaaacatacagaaacgtttaaagaatctaacatttgcatatgtactctttcattatgggtaacacatttaattgtattttgttcagggctagagcactggaggttatacttattaaatcaatcggactggccggatgcggtggctcatgcctgtaataccaacactttgggagactgaggtgggtggaacacttgagcccaggagctcaagactagcctgagcaacatggcaaaaccctgtctctacaaaaaatacaaaagttagccaggcatagtgacacaggcctgtagtcccagctacttggggggctgaggtgggaggatcgcttcagcctgggaggttgaggctacagtgatccacgaccatgccactgccctccagcctgggtgacagagcgagaccctgtctcaaacaaaacaaaacaaaacaaaacaatcggacagatacatgttttataacccagtcttggtgaatataaaaatgttctatttgctaccttaggaatttagtatgatttagtatgcttgatagtatctttctctagctttgaaaaaaaaaatcatgggacaggtacagtggctcagggctgtaataccaacactttgggaggctgaggcaggaggatcgcttgtgtctaagagttccagaccagcctgggcaacatggtgagaccttgtctctacaaaaaaataaaaaaatagtgggtgtggtggtgggcacctgtagtcctagctactggggagactgaggtgggaggatcgcttgagcccaggaggttgagtctgcagtgagccgtgattgcgccattgcactcagcctgggtgacagagtgagactctgtctcaaaagaaaagaaataaaaatcatggaagacatctattctgtcttgtaaaaatttaaggtatatgaaaagagtagaggaggaggaggagggagaaggaagagaaattatttattgggatccaatatgtgccaaagatagtattaggcatccttgcatgtattatttcatttgatccacatgactaccctgtgagatgttattcccattttacacataagaaaactggctaagagaagtcaagtaatttgtctgcggctgtgaattcaatttaaattcacagcttaaactcttttcactacatctgaatgcatcattttcaagatcttttctgggcctggagtaagttgacagtatttatgtaaaacatgtaatactgtatctgtatgtatgctcctcttccccacgctcattcacatttaccgtgattaatacacatgttaataaaaccctagacttagaactaggatatagaatccagtcgtttaggtacttaatgtttagttctctcctccagaaaacaggaataattaccgccttttttccactccaaagaattgatgtgataattagggagataagattagttactagtcataacaagaataaactacaactcccaaaatgcccagaggaagaggctgacgccagtccaggagacagttccagctttagggcaaaggtgaccccactgggtcccgtggcgaaagagagagccgccggtcctcgccttttttctgatgcatccagggatttgtagttcccttacggccaccaagtgcacttagggcaggcctcttactacgagtcccgtgatgacccgaggccgggcagcgcctgcgtattgaagccgagggagcgtgcgggcggtactactggcgggaggagtaaagatggcggcgcgagggtctccgccctctgctccgggctgaagcgctctgagagaggcggcagcggcaactcgagccccaacagtaatttagtgttggtagttttggcagcagctgccgaggccggagcaatggcggaactggagcacctaggagggaagcgggcagagtcggcgcgaatgcggcg

SEQ ID NO: 3653 - DNA, 2300 bp, Homo sapien
actgatagaaataagctctctcttcctaagtatgaatattgaacaagaagagagtgaaacatatgtagcagtgggtacattttctactatattacaattctggaggtctctggattgcttatagaattaggattatgctgtgggactctgaacaattctggaatagaaagaaaaaaggtgattcttttagtgctttggccctaatccttaggtagcaaaatgacaagaggcttcaccaggctgaatatgccttacaaacaaactgctttcagtgtcatatggcacctctatgtaattttttttcagaatatgtctctttgaaataatagtgatgatatgttgctgcctgagagatgaggctacccctagataactgtgaatggctagacttagtgggaaatgcacaggattgatttaagagttccagttcaaatggggcatggtggctgacacctgtaatcccagctacttgagaggctgaggcagaaggatcacttgatgccaggagctcaagaccagcctgggcaatatagtgagatccccatctctttaaaaaaaaaaaaaaaagaatagtccagttcggccttttatatgtgtgattttggttaaataaatcaagttccgtttctgactctttcctcatatgtaaaaaagggataatgcttaccttgtttgcatgtatttgaggattagaaataatttacgagtaacctagattttcccaaatctatctcatggagctattgtgaggatcaaatgagacagactatgtgaaagtgttttgcaaactacaaaacaatttagagatatatatgacaattatttatgtcattaccagtgaaatgcttttttgactttcattaagatccattcctagcttttccagagctaatacatttggaaataagatccaccctaaaatgctaaatattaataccattttagattttagggatgtttaatttttaaaccctacatgctatagggattccatatctcaagtttaggagacttaatttttaaatttaagctcacttgtcctgcctctgatgtccttaccaattatttataatgttatacattattttctgcagccctaagggaaaatctccattgtggtgacaaagtaagtggcagccatacacaggtaccttcttatgccttttctcccctcaccaagcagtgtccaggaatctaagcatttgaacatttatatgaggcaagagctagtgagctgaatgtgataatggtagcagttgacccttgcaggaaagtttgagcctgggcctcctatcccagtgatattctttatgctaaaaatattagtaattccctcccacagattcctttcctgcctaagtgaggtcaatttctgttgttttgcaaacaagtacactcaatactatgcagtagtggatatttttgatactaaggtgagcatgttttaaaatcggttatagtgacgattgcataaatctgaatatactaaaaatctttaaatggtacacctaatgggcatgtgaattatgtctcaataaagctgtttaaaaataacattagtactgttaatctccaccaaacagttctgggaagggaggcctagatggtgtctactaagagttaaagcaatgagatttagagccttgaataaaagagtctattttcttttttccgtatttctgttgctaaacacggctgttgccaacaccatctcacttcattttccagagataagggcatttgtcatgcgtttctcagcccaccacttaacagttcaggagtggaagcttaaagtgtttccccctccccctcaggacacgtgcatttagaagaaaggacaagaatccatttccttatgtagcagaacctctgatagttctatcccagttcccagccacttcagagtgaagacagtcacccaacacctgctactaaaagcccttatcagccatgtttttgcggttaatctccttctgataaagtggttcatttttcagagctgtgaatattggtgacatgtaggagggaccaaaattttcagccctcattcaaccctcccttgttttttatcagttgattttcccatgttagaaaaggacagttgctggtacaatctcataaaatgggctccagtgtttagagaaggacagtcagaggagtggccacctgtttgttgaaaattgggcttctgggaaagttgctgcacaagtgtgtggcaaggtgtgtctgagatagcttgacctgctttcacctggaatgatttgatctggcaatagagttccttgccattcctggtttta

SEQ ID NO: 3654 - DNA, 2300 bp, Homo sapien
ttctctttttaaagaccaacttccctttgatggctgtgtgaggagagtcccctaagaggtgaaagagaagcctggctctgttcacggtcccaggagctgtccttgctgcatgccctgtcacagttccctcgactctttcaaagcttcacatctgcctcaccccaagcgaggctctctactggcacaaacttgcagcagttcctgttttttgagccttctggaccaacaaaatggcagcacatcctgcttcctgacagggaaggcatcacagtggccaatgatcgtgtgtgtgtgtgtgtgtgtgtgtgtgtatgtgtgtgtgtgtgtgtgtgtgtgtgtgtgtgtgtgtgtctttgagcatttctcttcattcctggaatgtgtgtgtgtgtgtgtctctttgagcatctctcttcattcctggaatgagccatggacagtaaagttgtgtgggaaaagaaggctctttggggaccctgacatgaagaagtccactaagtgggagatcttctctcatctatggcaaagtctcaggatcctgttcagatatcggggctttcatactcctgttggtggctatttgggaggcagcaagatgtgaagactggatgtgttcagaactaggaccaaacgatgccatcaaatacttcctcctgccagtcatggtttccccagaagtgtagttcctgggacattcatggatatgagctattcactagttgggtcagactaacagggactctcagtcccaaaatctcactcttattgacaataaatatcaaactatgaagaaacagaagtcccattaccagaaagaccaaaattaaactcctggatcttcaccccatccagtgggaaacacagatgctttctccctttccagaatataagcagccaagttcatttgcatttattccccattgtgcttttgcttctgtttctcttttaagtggagcaacactgtctgaagacacgttatctgtgcagagccagagaactttaaaaggaaagtttaaatgttcttagttctcctgaggtccaggtaagaagggggtggtaagaagaggatgggggacagatggctgagatcccttgggaggagatataggggagcactggaattcccccgactcccactccttgctcccttggccctctgccctccatgctggagagctgataggtagctggagtggcccagggagacctatgggaaggacccgtcctaccattagggggcttctctctatgaatgctaagaaacaaagggcatccattccaaatgagtagcagaggtgaccttctagggtttctacccatgctcagttgtatcccattccctgttcaccttttgtccccagcactgatataaaagccatatatatgttagtcaggtttgcactgagtcttcttccaatccttcagcctggacaacagagtgaggtccccttgtggccagaggccagccctccttgcctgccttcctttgacctctcttttccatccatgaagccctcaggcccttgccattttttcaccacagaaaactcatggcttctccagaagcctgagtatctctctttcccagcacaaatggcagcatctctatcctgccccatctgggccacttcagcttcctgtagacacccaagacagatggacagtgttggagggaatcaggctttgaggatccagtgtgaagaagttgcagagtgtctttttattttattttaaaaagggggaaggggcttttggttttgctttgttttttggatgaaggagtgagggaaatgagggaatacccccaccagaaacagactggaaagcctgcctgtctcttggagatccttctttgtcttgttagtggtacatgggaagttatgtttttactggtgtgtgtgtgtgtgtgtgtgtgtgtacttaatgatgggaaggtaagactctgatcaggattatgaactgcggtccttgggaccaaaggtgtggtcatggtagagagttgtaggacaatagggtgttttcagaatctgggtggccacagagtgggatttcctggtatggacatcagaagtcactggactcttctcccaaccccagagttatgggattttggtgctttctcagggtctctccccagactcactcttctcacccatatcccacagactcactcatggagacccccttgtcaatatcccctctacctttactcctttgccctttcccaattcatcttctaccacctggattcttttccattcatgaacttcattcagcccttccaaagcccaagatttgca

SEQ ID NO: 3655 - DNA, 2300 bp, Homo sapien
tgttttcctggaatcctcttccttcttttctcctcctagagaaattctcagacttcatgtcccagtcacctcttctgtgaagccttttctgattggccccaggactgtcacctcctctaagtttccacagtaccttgtgcccatctctctagcataacctttatcaattcatgttgtaagttttcagttacatgtctgctgatctcattgaggaagtgaaattcatcttttcacttttccttccctcttctccccctccaagtgcttaacagggtctagagcacagtacatcctcaataaatgcccagtggtagaaacaaaggctgccaaaggcgtggcctctgcctccatgtcaattcagtcttcactggagcagagatgaaaccaaggagccccaggaggccttaccttcccaatcattgggagtagaggttgatggaggataaatttggtcatgggatcccacgtctctgtctgccaactccctccctcgttttccttgcagaaagtccaggtagtggtcaccgtgctggactatgacaagctgggcaagaacgaagccataggcaagatcttcgtgggcagcaatgccacgggcacagagctgcggcactggtccgacatgctggccaacccccggaggcccatcgcccagtggcactcgctcaagcctgaggaggaggtggatgcactcctgggcaagaacaagtagacagcagcggctgggaccccacacctttcacggacactgacaagatccagagctatcaatacctcagttatgcaaccttagaggttttcttttttctttcatttgttgggtggttgtgtccttgtttttccttgtttttctctttttaaagaccaacttccctttgatggctgtgtgaggagagtcccctaagaggtgaaagagaagcctggctctgttcacggtcccaggagctgtccttgctgcatgccctgtcacagttccctcgactctttcaaagcttcacatctgcctcaccccaagcgaggctctctactggcacaaacttgcagcagttcctgttttttgagccttctggaccaacaaaatggcagcacatcctgcttcctgacagggaaggcatcacagtggccaatgatcgtgtgtgtgtgtgtgtgtgtgtgtgtgtatgtgtgtgtgtgtgtgtgtgtgtgtgtgtgtgtgtgtgtctttgagcatttctcttcattcctggaatgtgtgtgtgtgtgtgtctctttgagcatctctcttcattcctggaatgagccatggacagtaaagttgtgtgggaaaagaaggctctttggggaccctgacatgaagaagtccactaagtgggagatcttctctcatctatggcaaagtctcaggatcctgttcagatatcggggctttcatactcctgttggtggctatttgggaggcagcaagatgtgaagactggatgtgttcagaactaggaccaaacgatgccatcaaatacttcctcctgccagtcatggtttccccagaagtgtagttcctgggacattcatggatatgagctattcactagttgggtcagactaacagggactctcagtcccaaaatctcactcttattgacaataaatatcaaactatgaagaaacagaagtcccattaccagaaagaccaaaattaaactcctggatcttcaccccatccagtgggaaacacagatgctttctccctttccagaatataagcagccaagttcatttgcatttattccccattgtgcttttgcttctgtttctcttttaagtggagcaacactgtctgaagacacgttatctgtgcagagccagagaactttaaaaggaaagtttaaatgttcttagttctcctgaggtccaggtaagaagggggtggtaagaagaggatgggggacagatggctgagatcccttgggaggagatataggggagcactggaattcccccgactcccactccttgctcccttggccctctgccctccatgctggagagctgataggtagctggagtggcccagggagacctatgggaaggacccgtcctaccattagggggcttctctctatgaatgctaagaaacaaagggcatccattccaaatgagtagcagaggtgaccttctagggtttctacccatgctcagttgtatcccattccctgttcaccttttgtccccagcactgatataaaagccatatatatgttagtcaggtttgcactgagtcttcttccaatccttcagcctggacaacagagtgaggtcccctt

SEQ ID NO: 3656 - DNA, 2300 bp, Homo sapien
tatcaggctcagcaatcaggctgctcctctgggagctggcaggaaatgcagtcgtaaacaaggcacgttcccacctcacagccctagtggtcccctgggagctgagctgcttatacaagtacctttgacaccaggaagaagtgacgcagtctctgcaagaggaacacacagagccagggaagagaattctgggccttaggctccccagccgcacaacctctgcagcaacccttgccctcctggacagagcctggactggctcagagtccctgacttggcgagcactgcacccctcgttgtgggtaacacaaggtctgtccttgagttcgtggtcagcatggactcagcctagccccgctgagaggagaactgaggaaaggaaatgagtatttagggtccactttgtgccagcacatgtggcctcttcaatcctcataacatccctgtgagacaggcacctgatcctcggtttgtagctaagaaatgatcccagggaaatgaactcatctcccagggctgcagagctgctaagtgtcaggttggaaagcagccctggctgttctaaagcccacgttctctcatgaccccaccaccctttctgccgcttgccttcagaggtagaactctccaagcatctcggaaggctgggttctaaaagctgagaggctatctaggctgcatgcggtggctcaggcctgtaatctcaggactttgggaggctgaggcaggtgaattgcttgagcccaggagtttgagaccatcctgggcaacatagtgagaccccttctctacaaaaaagagccgggcatggtggtacgcctgtagtcccagctactcgtgggggtcgaggctgcagtgagctgtgattgtgccactgctctccagcctgggtgacagagtgagaccctgtctcaaaaaaaaaaaaaaaaaaaaaaaaaaaagctgagaggctgtcttgggagatgcaaagccactttccaaaggatggaaagaagtgaagagaaaccaggtctcttgatgcctctttcaggtcccagccctcttgccacctttggagacagagggtctggcaagagatgccactgcagagggagggtgggggctggtgaccctgtggtctcttccaaccccgaggctgtaaggtgacccgcatcgtagtccaccccctcccattacccacgtacagggcctgtagctatcaccccagcttcctggacaagtggtgtggcccgagacccccagcgttcccttccctggagcttctcacatttctacatatggcagtgtaatgcacctgcacacaatgtttgcatatgtgttcacagtgctggttcatgcatgtttatacattcatacatggtgttcatacacatggcgttcacgtgcacacacatacacatacacagcctttctggcattctctgctatgttcttgcactggctgctgtcacccatttcagctgggcctgagagatggagacaggaccccctccccggtgctgccggctagcagatgccacagtgctgatgttctgctccattactgagttaatggagcctccttctgcctccggcctcccaccggttgcccacctcctcctttccagggtgtgagcgttgactgggggcctgggagggagcctggcgggggtgcggctgtgtgcggagggcgtgggcctggcttgggtggagatggggctggaggcaggcggcagcctcctggacggacagcagggggcaccgctaggtctcctcaacgggccgcagggaagaagtgggctggggaggaggccgcggtctctccagctactctcctgcagcttgaacgggggcacctgccacccagcccgggctcctgcccctgcccccttccccctccccgcacactggcaacaccccctccccttacactcccagtccacgccacacacacaccctactacacaccacacacactacacacacacaccacacaccacaaacatcacacacacaccctactacatgccacacacaccacacacacaccacacagacacagcacacaccacaaacatcacacacacaccctactacatgccacacacaccacacacacaccacacagacacagcacacaccacaaacatcacacacacaccctactacatgccacacacacgacacacacaccacacagacacaccacacaccctattacacgccacacacacgacacacataccacacacaccacacacataccacacacaaaccacacacacaccctactacacaccacacaccctactagacaccac

SEQ ID NO: 3657 - DNA, 2300 bp, Homo sapien
tcatccatcccttttcatctaagcagcactacattccaatcgtgaaggcataagctttccctgtcaagcaggatgctgccccagacccttagcatcaggaaaccccaaagtcgaacctgaatccagcctgctgaatgaaatttgagtcccatcctccctcgtcctagcaaaagaaggtttgggggagatttcaaaacagaagcacttttctccccagggagaaaccgaagaggagcagcaggtactgctcttcagcccgcacacccatctcaggtgacaggtcccctcctcagtgtgggatgacgaggtgggggtaggttacgggagtgtagcagagtggggggaaacccctggtgccctcctgctgagcatctgaccttgagccctttaccccaggtccccctttccatctgaagaacagtgaggggtcagcagacctgactagaggggctcaggcatgtgtcctctcccccagcccacacatgaacacacgcacacacccttcccaacacccaggtatgcagatgcacactcccccacaggaggagccgcccggaaatccctgaatcagcttttctgcagtccagggtctgtgacaagcgagctgctgcccttctgaagagaggctccagcccggccaggagcagcgggtgctgcagcacttcagtccccggcttcttcgggagtgaggtctatgtcctggggcaggggatgcctggaggaggggaagaagggggattcactgcgggtattgggaatttcccggttccccagactctgtggggatgagaagccctggaaagccctgagtgactgccccccccaacacacatgcacactggatttttgtgtgtgtgggttgggggatgaggaatgtcacttcctgggtcaaaccccaaactcgagtcctggtcctgagtgtgcagagtggaaggcaaacagaaagcagctgcatggagggtgaaggagaggctgaggggagagggcgaggatggggtggagctgggaaggtcaggggtggttaatggccggacagcagcagaaattccacctggcgagctgtggccccgaggtcttatcgggtgaggttgggggttgagggtgaggcccaagggtgacactgaggcacaggagtgctgcccaggctctcggtcctccctgcccctcctggtgctcaccgtgggtgtcagcctcgcttttcccaagtgggagaaagcagagttgtggaggtgggaggtgtcgggtccgtggcagagcccttctgctgggttcctgtctgggagcaggcaaggggtcctgtgccagcagacgctcttcctcctctcccccacacccgtacccctccatcgccctttctcccctccccaagtggcccgtgaagagccctggcaccagcctttacctcaccctccaggacagactgagggtggggaccgcgggctgccggagccctcggggcgaactccccagctccccttcccctccagcatctgccttttgttccatctctcttctccctcccttctctcccttgactcaggaaaaccttcatccttatctcccgaagcaaatcgtttccctcccacccctgcccgcaggccattccctacagccagggggtcccctcccccagctaatcccccgaaccgagaggctgtaaactcggagctggcgggtggggtggggagtgttgcaggagtgcacggagctggcggggactcctcggcagaatcgggggagtcccgtagggctccgggggctcggagccggccccgccctcctcaaacttctgtaggaccgcgccagtttaaacccctctcccccagcctagtccctcccgcacacacctccccttctcctgtcgcccattttcccctccgctggcagtccggactggagaagggaggcgtgggcgcgcggaggcagcctccccagcagcggggattgcctggggcgggggccctgcgtcgtggtttgcggggatcgccctcggaggggccgcacgcgctgtgtgcaggcgaatgtgaggagcatatcaataggcgggcgggggaagcgggatcaggttgttactactgcagagagagagagaggaagagaatagagagagggagagactcgagagcgagcgagcgcgggagcgagggccgcagcggcagggccggcggggaagtgggaagagggacctggacttcgggaccccagctgtccccgcccccgcccccgcccccgccctctccaccagctcaggctgaacgcgcccggaacgtcccagggtaagagggaaccccaggcggggc

SEQ ID NO: 3658 - DNA, 2300 bp, Homo sapien
ccacatttttcatttaaccaaattgattacagctctgactctcctaatagcctgggaaggcaggctggcttcctctgacgtgcttaggagaagaagctggggcaccagattgacacaaggctttgatcagaacagtaggcagctgagtctgctgccgtggaaaagttgaagcgcatcaggccagttcgcttggcttgattctgtgcgagggggctgcagccctctttctggctggagtcctgcagatactggttgttggcatggggagcaggaaggaatgaatagagtagagccagcccctttggggaagcaacaagtcctggaacacacctggctaagggtgggggtggtgggtaacctctttgaatgtaaaggtctcattagtccattgtaacttggctccccatttcctccactgcccttgttctggctgctccacaggtgaagggggagggcctctgtgcctcaggggctgtgagcacagcttcagcctgattgaggactccccagaggtcttcccccacctttttcgtaacatccactgagtcggcagccacttgccgccttgctctgaggcaagccaaactggggatagtctccaactggggatggtctgccagtaacacctggtattattggcacagtgatctgaaaagtgccctccactgcctcttctctccccaaagcctgaatcccacttgttctttgcatctcctcatattgcattcattccacctctcactcactcacctagtacgtattgaagactgacctcaggccatgtacggttttgtacccaaaagcgaggcaggatgctacagtcctattataaaagttaactccaggccaagcgcagtggctcatgcttgtaatcccagcactttgagaggctgaagtgggtggatcccttgaggtcaggagttcgagactagcctggccaacatggcaaaaccccatctctactaagaatacaaaaattagccgggtgtggtggcgcacgtctgtaatcccagctgctcgggaggctgaggcgggagaatcccttcaacccaggaggcagaggtggcagtgagccaagatcgcgccactgcacactgcactgcaggttgggtaacagagtgagacttgtctaaaaaaaaaagaaaaaaaaaagttaactccaaaagagttaaagcggatattcaaattgtgctgtaaggaagttctggtgctgccctggcagctcctgggtaggttaggaagggctctgttttgcccttgccacccttctctttctcccaggctcttccgaaatgccaccacttaactgtctgcagctccttggtccaacgcaccattcagggactgtttccccacctgcaaactgcccacgcaaaatgcccaccttaaagggatgtcttacgtattaagcaaactaacatgtgtgaacaccctgtctttaataaccagtagcgtcctccttttctttctaccgtcttccagctcctctctccttgtcaccctgcagttcttactctcccctccgctgttctatttccataggcctcaggcaccgctgtcttctctcaagcatcctcctctctctcacccaacctttaggctcagaagcccccaccatccaggtggccaatataggtagcggtgacctaagcggagaggggaggaggggaggctaggggctcagggatcccaaaatggccatggggatgggggctcctgagcccaataatttagccttgagctgcagtgggttcgggaagttggagagaaggagctggctagaaaggagaccagccttctggggtggggagtatagagctcctttccagtccgccttcctgctggggaagcagcctccttgaccttgagcaggaggcgggggcgccgagcgcctggggggctgcgcagaaagaacccgtcccggggggcaggcccgccctccgcctcctccgggcctcctccgcctcggtccccgccctcccacgccgcttggtctcctcccctcactgcagcgctcgccgcgcgcgcccatcgatcaggccccctccctctgccgcctcggcgcagactgctaagctcagcaagtcttgcggcaaaggcacttcggagccgagttggggcagcggtggagcggggacttcgcgcccccaggggaacgggcgcccctgcgaaaccgtcgccagccacgcgtccttgccgtccgacgccccctcacattggagaccccggatctctcccgcctccttcgggtcgctctccggtaagtccatacccccgccggtgggggcacggacctccct

SEQ ID NO: 3659 - DNA, 2300 bp, Homo sapien
ttagatgcaggcacttgtcaatgatagttggtattgtagtaattagttttagttatggtcctcctttttactccatgattgctagcagccagaaggtgaagtcatggcagtaaggagaggctgacatataaaatcagaaagcaagggcatgcttctggatgagtttatttccttcatattttatatgtatatgctacttactatgtttgtaacagtgccattaagggcaaaaggcaagttttttgcttcattcctgaaaaagtagcctaccttttttttgcatcatatatttaaggactgctacacatgactaacaacaaggaactacttcctatttagtggattatttaaatgttatgcagtattctgctttacacataggaagcactcggatttctaaattaaatatcataggaatagcattaatttatgagtcacattcttaagtgtccatcagaacatttatgccctaacagatttaattctgtaagaataaatatcaaaggcagcaaaatatcaacctacccagtcttccctagttgtcccaaaaatgtcccttatggctgtttgtctaacccagaaacacatgttgcacctaattgtcatctctttaagtttcttttaatcttgtagcgttttcctccccaccccactttttctcatgtcactgactagacagttatcccatggtatgctccaccttctggatttgtttgattgtttctttgtggagtgttctgttctctgtatttcctataaattggaagttagttttaaagccctggtgcatccaagttaaacatttttttaatataatgcattaaaatgtcaggtaatactgtatattctatattgcatcacaacaggagatatatctggatgacctaccattagtgatgctaagttttacattgtattggagcaacaccaatgcatttcatcctccataaccttaatgcttttactctcctagtttggctatctctttctaaaaatacagttcccagaccagcagtattagcatcggcaacagcagctttacctgggaacttgttagaagtgcaaatttatggaccttcctctgacccactgaattagaatatttggggataggactaaggaaactgtgtttaaacaagccttccagatgattcttatacatggtaaagttagagaaccactgggctgtctcaacttatattttagtttcctgaataatttatattgagttgctttaattaatcattggtgagtggattggggtaaaatattgttttgttgccttttatttgtgtaattcagtatgaaagtcttgagttactacaaaccttcatttctgttgaaatttttttcaaactgttaataggaaccaatgagatgaatgaatttagaagggtataaatagaacaaagggaccacagtatatgccatgttcacatttgtatccttagagcctagcacaaactaggttctctaggcccagcacagtggctcactgtaatcccagcactttgggaggccaaggtgggaggattgcttgaggccaggagtttgagaccagcctggccaacatggtgaaacaccatctctactaaaaatataaaaattagttgggcgtggtgatgggtgcctgtaatcccagctacccgggaggctgaggcaggagaattgcttgaacccaggaggtagaggttgcagtgagctgagattgcaccactgcattgcagcccaggcaagagtgatactccgtcttaaaaaaagaaaaaaaaaacaacactaccaccaccaccaccaacaaaagacccaaactaggttctctgtttgtgtaatgaaggaacaaatgtcacttctacccccaatatcattggtcagctggcaggttagtcagcgtttgtgaatttagcatgttgagatcatggagtaatctgaagtactcaatggaccaatctgaattaagcttttcctgtttttcatagaagtgttcttttctctaaactgctgtaatttttcttgacttattaggctggaggacgtgtgccagtgttagacacactcatagaacttgttacacgaggccgatctatccccgtacatctgaattctttgccaagactggaaaccctagtagctgaggttcaggcttggaaagaatgtgctgttaatacattcttgactgagaattctccatattctctcttagaggtaagtttacaaccagctcatctgcaagaccttagatctcctagtttggtaaaacatgcagttcatcacatacaaagatgacatcacagattaatcta

SEQ ID NO: 3660 - DNA, 2300 bp, Homo sapien
gttttaatcttctgcatatggctagctgttattccagcaccatttattgaatagggaatcctttctccattgcttgtttttgttagattagttgaagatcagatagttgtaggtgtgcctttttatttctgggttctctattctgttctgttagtctgtgtgtctgtttttgtaccagtccatttctctttcagagtgttttcacttgcttccatttctgtagcccaacacgtaactccacccgcttttatttaggggaaaggagcaatatcattgtctctgagtctcctgtgctctagtaactgagcacactagttactcactaactgcagaataaaatgcaggaggaagaagtggttcaagccacaataagatttatatttactttgctttcataagtcagttgttttcttctttttgtctattttaaacatgccaggtgttttttttttttttttttttttttttttgagacaaggtcttgctctgtcatctcaactggagtgcagtggcatggtcgtggctcaccgcagccttgaaatcctgggtttaagtaatcctcctgctttagtttgtcaaatagttgggactacagttgtgtgccaccatggctggctaagttctttaattttgtagagaggagatcttgcttgtgttgaccaggctggtgttaaactcctggcctcaagtgatcttcctgccttggccttgcaaattgctgggatttacaggcgtgagccactgtacccgccctaaaacatgtcaggtcttagcatttttatatttaagttcaactctaggcacttgtttaaaaaactccgtgttcagccaccaccctgcaaaaatcaaatcaacaaatttgttaataatttaaagcattgcaaacatttgtaagttacatttctagacaagaactgacaaaaccagtctcctctgaatttcataccagtagtaataaacataatgattacagaaaatatgacttttttcttcattcctaggccttgtcagcttcaaggctttaattgaagaatctgaaatgaagaaattcccagacaatgatcttttgcgacaccttcgcctagtcacacaggatgcagagaagtgtgcctctgttgcgcagcagttgcttaatggcaaaaggcaaactaggtatgcgcttctgactgcgtgagtttggattctttggcacctatgtttggaaacctgttgtgactcctgtcttgaatttctgtgaccacctgggtgtggtggacatgtatgtattcttatatggcttccttgggcctttgtctttacagatatcgatctggtggagggaaatcccaaaatcagttgacagtgaatgagctccggcagtttgtaacacagctgtatgctcttccatgtgtcctcagtcagacaccattactaaaggtaaccatagagggatgtgtgggagaatactttggtaatcctgtattttgtatataaactctattgatattactaagtaatcttctttgatgattaatatgtacatttatttgcagatgcttttaataacctattgagtggtatatgtatataaagagattatagtagatccacagaggggaaataaagttggaaatttttactttgaaagtgaccttggctgggcatggtggctcacacctgtaaccccagcactttgggaggctgaggaggtggatcatgaggtcaggagttcaagaccagcctgaccaatatggtgaaaccccatctctactaaaaatagaaaaattagccgggcatggtggtgcatgcctgtagtcccagctacttgggaggctgaagcaggagaatcgcttgaacccaagaggcggaggttgcagaaaaaaaaaaaaagagaaagtgacctcagctagtttaagctgggataaggtgtctgttatagtcacttagtatttgctgttagttggcttatgtgttatcttatttacctatattattactaaaattaaatgggatctcattgaatatgaatttaagattctaagtttgaaagaagccaattactgaaattactgttttaatgcaacaacctgtgtatttttttttaggatctcttgaatcgtgtagaagattttcaacagcatagtcagaaactactctctgaggaaacgcctagtgctgcggagctgcaggacttgctagatgtcagctttgaatttgatgttgaacttccacagcttgctgagatgcgtatccgtttggaacaagcccgttggctagaagaggtgcagcaagcttgcctagaccccagctcccttacttta

SEQ ID NO: 3661 - DNA, 2300 bp, Homo sapien
gacttgatagcagaaacagctgttttgctgcagtactgtacatttactcagtaggactggatccttagataccacaaaaactaatttgttgcagctgataactagattgctaaacagccttcctttgcaagtaataattgcaattcattggttttagtgtatttataagtgaaaatctatttcaaggtcttgagcttgtattttagggtgcccagtctgactgaaaagtctagaggttgctaaatgaagtgacaactatacagtcatgggaaacctaacaacagggatatgttctgagaaatgcgttgctaggtgattttgttgtcatgtgaacttcatggagtgtacttacacaaacctagatggtatagccaactacacacctaggctgtatggtgtaggctattgctgctgggctacaaatttgtacagcatgttactgtactgaataccttagatagctgtaacacaatagtaaggatttgtgtatttaaatgtatctaaacagaaaaggtacagtgaaaatatggtattataatcttacagatcaccattgatatgtggtctgtctgtgaccaaaatgttgttacatggtgcacaactatactggcttccttttggagaatactctgaagacatttgggaagccatattgaaatgtatgaagagtccatcttagctaaataaaatgtaaatgatacatttacagtgttaaagtgaacttgttgtgacctaaagtttatgcttttgggttcataggctagtcaatggagacaacagaaaggactttcatttgaggcattataaattatgcatggaccatagcttagaaagtaatcaccagtaagcaccacaatctcaccatctcctcatagttggtatttcttctcataatatttttctttcctcatgttgactgttttttccaatttgttaagagtagattgctttaattgagacctgaccctggttctttaataattgagcaaactttctggagttagattctggacctacagagatagatgaatgaactccttgtgcatttagggattcattatctgaagtaaaagataatgtttatacagataatacaagggtggtgtggtttgacagtggtgacaactatgagactgatctaataactctattgagaatcagaaagggctcttaaatgagatgacatctgtagtaggagctggaactctgataaattatcacatgtttggcagagtcagggaaggaggaagtattccaagtagaagatatggtgttcctgtgatgggtagtagtctttacacagaaccctgaaggccgtattactacacagatggctggtctccacccctagaatttctgatcctgttattttgttagtctgagtggggcttcaggatttgcatttccaacaagctcctagtggatgttgatgcttttgttctgggggaccgtacactaggtaagcattggtgtagaaatgtagatgcttgaaaaggaatctaatattattatataataataagctcagtataaggatttgtgtgcctagagcaatataggtacttttggggtgagggtggtggtaggaagaagggaatgatgggaggtaagtttgagttccaaatgaggaggacctctgtatgttatgagattcttgaaatagagtgggattgctttaattggtggtagaagatgctacttgaggggtaataataatatattaggatattcttaattgcagctgtttttaaaagttataccttgaaccttaatatgggcacatttttgttttgtgttcagatactaatcaactttggtagtctgggatactgctccatcttgtgacataaattagtatctctaggtgatattctactataataatttgttttttctggctcaatttcagaaagctgcctttttttgaaaattatctaatagactgtgtccagattgtctttagtaacaatgtcactctttaagaaactcaaaaatcttcaatttctgtctctttaggtttaccgaactaatcagtgtgctggggagtttgtgattacatttccaagagcctaccacagtggttttaaccagggttttaattttgctgaggctgttaacttctgcactgttgattgggtatgtaattacaatgtagttaaccttttcaaatttattgtttttcctgaggaaatggaatataatgttttaaagtgtcatgtgggctgggtgcggtagctcatgcctataatcccagcgctttcggaagccaaggtgggcagatcacctgaggtcaggagttc

SEQ ID NO: 3662 - DNA, 2300 bp, Homo sapien
gtaaaataaacaaattaaagccttgttttttatctgccagcttgatgattgaccaagtatacttgatgttttcagtgtcacctagaacgtaattttctttattttcaggaatgtagtaagccacaagaagcatttggctttgaacaagcagccagggactataccctccgtacttttggggaaatggcagatgcgttcaaatctgattacttcaacatgccagtccatgtatgtacatatatactgctttgatttaggattttaatagcttttggagaaaagtgtacctgaagacccatttttagttgaggcctcactctagtaggcattgtcacacagaaagcagaatgaaactttaatttgttttgtggtatttaaaatttcacaatactttaaaaagcattctaattttttattttagaatttctctaaagatacctcttccacacagattatacagcaccagtaatagaacactaataaagaaaatcatcagcaatcattttggcccaacaaatataaagaatacttcacaaaatgtattaaatgactgctgtgtgccaaggtgtactatgcattgggaacacatttgttgtatattgttatgtaatcataagttagtattataaatttcaggatgagtccatttttaattcccctttatgcactttgaagcataagcattttccattcagcatttaatactccatcaaatgagtacaccaaaatgtaatgctttaattctggatatttaagctatgatttttgtcactactaataaagcactgcagcaaaccctttatgcatgtagtactctttaattggatgattttcttgggatgattattgaggtcagatgagagtcattctccctcattccatcccagttgctgtatcaatttatggatcccagcaatatatgagtgaatttgtttttccccagcacctctaacatcagctattagttacttaaaatgtttgcttatttaatggacttaaatttatactccatttgaattttcagttctcttgacttccttatgtgttataatatttgccaatatgtttgcttaaccaatcctgatgacttgcatgtaacctcttctatttgtggttaactgtatattttgacagaatattagatgaggacattgagggatagacatttaaatgttacctgcctctggatttacaccagattaacaacagattgacatttagtctggtgactctttattctaagggcgtgctgctacaagttgctccttttgttatatcatatatactggaagtccccaaccaccctttcccaacctggccattgaccaataccagtcggtggcctgttaggaacagggccacacagcaggaggtgatcagtgggcaaacattacacccgagctctgcgtcctgtcagatcagtggctgcattagagtctcataggagggcaaaccctattgtgaactgcctatgcaaaggatctaggttgcatgttccttatgagaatctaatcccccccccacctcccagcccttgcgccctgcccttccccatccatggaaaaattgccttccatgaaacccatccctggtgccaaaaacacagggacactggcgaccactgctatatactgtgttttttgtgttggttgcctacattgctctcagacaggtccagtgaaaagaatgaaaggatggactcaggtaatgtatttgaaagcatctcaaagtataaagcatcattgaaacaacaaaccttattactgtgctgttgtcaactgtacagtgctatacgtcattcagacacaactaaccattattactatacagtttatgttacattttttgaaacacagaaatatctcccggtcataaataattgctttccttggctcccttttacagttgtggcctggctggtgatagaggaacataaattccttttagacagtagaggtttcctgaattgcctaagatcaattatagaacattatagacacaatttttccttaggatgctgttctttgattcccatcactgagcttaattggtcacagacagtttgtgaggaaactcattttttctattccttgtatttccagatggtccccacagagcttgttgagaaagaattttggagactagtaagcactattgaggaggatgtcacagtggaatatggagctgacattgcctcaaaggaatttggcagtggctttcctgtccgagatgggaaaatcaaactctcacctgaggaagaggtaggcatataagtggcttggaaattgaggtatttattg

SEQ ID NO: 3663 - DNA, 2300 bp, Homo sapien
gtccagaaatgaacacagtatcttcttcccttgagtaactcgccttctgtatataattggggtgaatgttccagcaatgccaacgggctagcatctactcaggcaggtacgccagacatctgaatcttaatacctcgtcgtcccccctcaatctgtcactatgtcctaattttatttcctacctttgcatcccttcctcataattatcagcaccactgccttaatttagatcctatcattccttgtctggattatttcaagtctttcgcccctctcaagtctgacctcgtcatagactgtttgtggatgattattttccctgcaacatctccacctcccaatagtctccatcacttattagccatgtgaattatggcaaattgcttaacctacctatgcctcactttccttattgtaaagtggaaataagagtacctatctcatagggttgtgtgattaatcatgcgatgcaattagaacagtgcctaggatatgaaagtgccccaaaatgttacgttattattattattactactattgccttctcatgaacatgctatgtgtatgttcaagctgttatctctactggaaaatccttctccgtttccaatactctttccaaaaccccctcctgggttttactgcacctaccattgtgtactgacgtgattgaatgattggcttatgggactgatcctttctaccagacttaacttcttcagggcaggaactctgatacatagtaaatggtcaataaaagttggctcaactgaaaccctaaggataaactccatccacagcggaaggcgcggccccgcccgattcgggggcggggcggggagccgcgcgcggagggtgggtcgatgggggtggggtgggactctttttcctcgccgtggcggcggaggcgcacggcgtgggcttgcggcgagacgtcgtcgtcggaggctgaaaaagcccaaggtgctgccgttgcccgtacaactcggacttgctgttgctcgagccgcgtctgcacgggtctcggaccgagcggagctcgcagcctcggtcccggagcccaccttcgcctcgcccttgcccagcctgcggtgatggaggcggccaccacactgcacccaggcccgcgcccggcgctgcccctcgggggcccgggcccgctgggcgagttcctgcctccacccgagtgcccggtcttcgaacccagctgggaagagttcgcggaccccttcgctttcatccacaagatccggcccatagccgagcagactggcatctgtaaggtgcggccgccgccggtgagtcacgccagcaccccggatccagctcgtggctgggggagggagcggggacgcgcgggtccggggaggcccgaggcgcggggggcggggagccggtcgccccgccggcctcgtcaagtttggggctgcctagaaggtcggagttgaggccgggggaggaagacgggggcttctccagggtgggagatgaggagcgtgggagaaccgggggcttcggcggtgccatgggagggccgggtcgccgcggggctcgggcggccgggtgcggaggttcgggttcggttccggatggagtgatggcaggagccgggggtggtcgcgggggagtttcctcacggagcctggcggaggcgcgggctggagggaggactgtgggcccggcgaggctcggcaggctggtcctcgcctccgctcccggggtgcgggggtgtgtgatggggtggggtgggggtgggggacttgcgagttgtcgtgcgaggaggaaagttttcaatatggcggcgggagcccctggtcctttgtgtggtggcggcgtcggcccggagcggccctcacctgggcgccccaccctccagaccagggcacccctccaccgcctggtccccgggcctccaggtgtcccccgggccggggtcaagaagggggcggccagcgctggctgggggcggggaggagccgcgggtccagccccggagcggatgtttgtggggggcgttagtgtctgggggacacttttggggcggcgggggcaggacgggcggcggtgggccccgatgcccgcccgcgctcccgaacgcgcacactcccggcttcttctggctcagccgctcggctccccggggaggcctgggctgtgctggtggggatggggtccgggcgaggccgtgtttgtaggggaacgtcagacggagagacctccgaagatttcgtgctcgtttcccccggccctcaggctccgggcactgaaaggcagtcacccaccgcagcccttccagccct

SEQ ID NO: 3664 - DNA, 2300 bp, Homo sapien
gaattgggaaagattttcttaggcttgttcttcctgtccatctcagttaaataataatcataactcatgtaagtctagaatttgtctcaaagttatgcctacctggctcgtaggatgccaacgttaggagtgaaaatagtcaacgctctcccgagagagcacatgacactacatgagcttcatcaagaccctcggaggcccagaatgcgcaccaaagagccatcgacgataattcttctacccaacttttatttagtattattaaatattcagtaaagttaaaagaaatttgcatcaaattcctctatacccactacctagattctattataacttgccacatcgcatatctatcttgcactgataattcttttaatagtgtattagctgtcccctgggcttgactctccattgcagtagggagcaggaaaagactccaggtcccaaagccctggagagctaagaaaaggaatacgttctcccaggaccactgtgaactctttcctgggcccggtacctctgggaaaaatttgttgaagggaaggcggttttcttctccccccacgcccatccccccttttaattgaagacttcttaagcataagagatttccttccactaggtgaatctgaaagcgaactaagatcttgacaaacattccttgcatacgtttggcagctttctggatgaaagaggtcatttcaatgttgacgttctactttttgagcttcctccttttttctgaggctgctggacactacccccccacccccgtcccccgtctcccgccaaaagaaaaaaggcgcctcaaaagtgttcgtatctcttaaagttcgttaacctctttgcctccgttgcctgctctgcaaaatgaggataatatcgtacctactcaatatggtggttgtgaagactcagtgagctaatacatgcagagcgtttagagcagtgctttacacacagtagcattaaatagcggctatcacccataagcacataactcccagatttatatctccaattctgatctcgccccttcagatttatacccttcagtctgttgaaggataccccgttgtgtatttctacctgtatgtaccagagacacctcaaattcaaaatgtccagaaatgaacacagtatcttcttcccttgagtaactcgccttctgtatataattggggtgaatgttccagcaatgccaacgggctagcatctactcaggcaggtacgccagacatctgaatcttaatacctcgtcgtcccccctcaatctgtcactatgtcctaattttatttcctacctttgcatcccttcctcataattatcagcaccactgccttaatttagatcctatcattccttgtctggattatttcaagtctttcgcccctctcaagtctgacctcgtcatagactgtttgtggatgattattttccctgcaacatctccacctcccaatagtctccatcacttattagccatgtgaattatggcaaattgcttaacctacctatgcctcactttccttattgtaaagtggaaataagagtacctatctcatagggttgtgtgattaatcatgcgatgcaattagaacagtgcctaggatatgaaagtgccccaaaatgttacgttattattattattactactattgccttctcatgaacatgctatgtgtatgttcaagctgttatctctactggaaaatccttctccgtttccaatactctttccaaaaccccctcctgggttttactgcacctaccattgtgtactgacgtgattgaatgattggcttatgggactgatcctttctaccagacttaacttcttcagggcaggaactctgatacatagtaaatggtcaataaaagttggctcaactgaaaccctaaggataaactccatccacagcggaaggcgcggccccgcccgattcgggggcggggcggggagccgcgcgcggagggtgggtcgatgggggtggggtgggactctttttcctcgccgtggcggcggaggcgcacggcgtgggcttgcggcgagacgtcgtcgtcggaggctgaaaaagcccaaggtgctgccgttgcccgtacaactcggacttgctgttgctcgagccgcgtctgcacgggtctcggaccgagcggagctcgcagcctcggtcccggagcccaccttcgcctcgcccttgcccagcctgcggtgatggaggcggccaccacactgcacccaggcccgcgcccggcgctgcccctcgggggcccgggcccgctgggcgagttcctgcct

SEQ ID NO: 3665 - DNA, 2300 bp, Homo sapien
aaagttgtcagaggcggcgagggggtggggagcggaccctacacgtgcgctacgtgctgcgccggccgctggggagcccggtctgcccccctcatcccagaacccggtcccagggcagttgcacggcgcccagggggaggggagggaggaagtccccccaagtttgcaacccggcagcgtggtcttcgcaacgcggttaccggaaggaacgcgaggagcgcctcatcaccaggcgggtgtatctaggggcgaaggctgcagatctggggcgcaggctggaaagtggggtgcagccggttgacgtgaggtctgggagttggatggaccgaatgaggatggagacacctagggatgtgtccgaaggatctggcgctgcacaaatgagggcggtttgggggacggaggcccgggcgggggcggagtgttgtccaagagtaaggagggggttcctggagacgtggcactcggagcggggctgggttccgctccggccgcctgggctgcagctccgctatggcctaggaacccgaacctgaccccgcctaggcctcgcacccagccctctgggagctccggccccggcacctccaggctggggttgcccaggtccggcctctggggcgtccagccggccctagacgagacaatgcggcccgggccccgcccccggaggatgacgcgcccggctgccggccagtcagcgcccgtggctaggctctttaaaaaaagaagggccggcgcggtgtggctgtcagctgggagggatccctccgcccatgtaaacatcataaagggcaaggggagcgtctgttgtgggcgggggagcggctgccttcccggagagtcctctcggtccctaggttcccctcaagacgccggcaaccgccccgtcccttaacgtcacaccgggtctgctgggagccaaacagctgcggcctgatctgggagcgatagaatctcatcacttagggtcactaccggaaatggaggaagccggactgggagaccttgagagttgggagcgagagggaatcgtaggacgcagctgagaattgggaaagattttcttaggcttgttcttcctgtccatctcagttaaataataatcataactcatgtaagtctagaatttgtctcaaagttatgcctacctggctcgtaggatgccaacgttaggagtgaaaatagtcaacgctctcccgagagagcacatgacactacatgagcttcatcaagaccctcggaggcccagaatgcgcaccaaagagccatcgacgataattcttctacccaacttttatttagtattattaaatattcagtaaagttaaaagaaatttgcatcaaattcctctatacccactacctagattctattataacttgccacatcgcatatctatcttgcactgataattcttttaatagtgtattagctgtcccctgggcttgactctccattgcagtagggagcaggaaaagactccaggtcccaaagccctggagagctaagaaaaggaatacgttctcccaggaccactgtgaactctttcctgggcccggtacctctgggaaaaatttgttgaagggaaggcggttttcttctccccccacgcccatccccccttttaattgaagacttcttaagcataagagatttccttccactaggtgaatctgaaagcgaactaagatcttgacaaacattccttgcatacgtttggcagctttctggatgaaagaggtcatttcaatgttgacgttctactttttgagcttcctccttttttctgaggctgctggacactacccccccacccccgtcccccgtctcccgccaaaagaaaaaaggcgcctcaaaagtgttcgtatctcttaaagttcgttaacctctttgcctccgttgcctgctctgcaaaatgaggataatatcgtacctactcaatatggtggttgtgaagactcagtgagctaatacatgcagagcgtttagagcagtgctttacacacagtagcattaaatagcggctatcacccataagcacataactcccagatttatatctccaattctgatctcgccccttcagatttatacccttcagtctgttgaaggataccccgttgtgtatttctacctgtatgtaccagagacacctcaaattcaaaatgtccagaaatgaacacagtatcttcttcccttgagtaactcgccttctgtatataattggggtgaatgttccagcaatgccaacgggctagcatctactcaggcaggtacgccagacatctgaatctta

SEQ ID NO: 3666 - DNA, 2300 bp, Homo sapien
ccagctactcaggaggctgaggcaggagaatggcatgaacccgggaggcagagcttgcagtgagcggagatcatgccactgcactccagcctgggcgacagagcgagactctgtctcaaaaaaaaaaaaaaaaaaaagcaacaacaaaaaacagcaacaaaaaaaccaaacactagatcaggtgaaagcctgcacaccatgggtaggaatttgggtttcatcttatttgcagtgggaaggcactggggaattgtaggcagggagtgggtatcacttgatttacaatttgaaaaggtctgtctgactgccatgtggacaacagattgcagaagaatcaaggtagaggtgagagatcaattaggaggtggttgcagtagttcagaagatgattttgaaaagtggtcatattctgggtaaattttggaggaaaaggtagcaggattaaatagactgtggagtattaaggagaaagaaggctgggtgtggtggctcacacctataattccagcactttgggggccaaggcaggaggatcacttgaggccaggagttcaagacaagcctgtccaacatagcgagaccctgtctctatataaaaatcaagagtaaaagaaaaaacaaggagagaggcaccaagtataactccctgattttttttttttctctaactgggtgagtggtggtgctgtatactggggtagaaaaagcttggggaggaaatgatttgggaggtaggaggaatctgtagtcttattttggttctgttaaagttgagatatcttatcatccaatggaagatgttgaatagtcaggtaatctggagctcaggatagggatcaagataagagtcagggctagagataagatttgggagttacctgataacatacatacacacattcatgtatatgtgtgtgtgtgtgtgtgtgtgtgtgtatctatattacagccatgggactcggataaaatcacccagggaaactgtgtaggaagagaagagagccctatgtgactgctacatatacaaggtgggaagagagtgagccaagaaaggaaactgagagggaccaatcagcgtggcaagagagatgccagagcagaaagtctttttttttttttgagacggagtctcgatctgtcacccaggctggagtgcagtggtgcaatctcggctcactgcaacttccacttcccaggtttaagcgatgctacagtagctgggactacaggcgcgcaccactgcgcccagctaatttttgtttttttttttgagacgaggtttcaccatgttggccaggctgctctgaaactcctgacctcgtgatctgcctgcctcggcctcccaaagtgctgggattacaggtgtgagccgccgcaccaggctgcacccccagaaagtctttcaaggaggcagtagcggtcaactgagtcaaagttgcagaaaggttgagtaagataagaagggagaatgtgaaatgaagcgaggctaattaacaaagacaacactttcaaggggctttgctgtgtgcagttgtagaaaaatggcacagaactggaaaagaacacgaattcagggaggcattttgctttttgccttcttcctgctggaagataataaacctccttttcctagtgatgagaatcgtccagtagaaagggagaagtggatcacgcagaagagaaaggaagtggatcatgcagaagagaaagaggataactgcaggggtgaagaacttgggaaggcgagagggagtaggagtccgagcctaagcgtcagtggaaccaacaggagggaaggagagaatgtaggagatacataaggaagtaggggacacggtgcgggtggggaggtgagtgctcagtatctaaaaagatactgatgctggtctttagggtgaatgcgaagtcatagctcccaatgatgaagcacaaacaggtcacatgtaagtcctgcatgtgcattcctctgacaatggggagtaggtggctaggacacaacagtaacatcacagagggagcttagctcaaggatagaaaactggggagacctttgtttgctgtgcctggcctcaccctctgttcattactcctagagtgactggtccttatcaccccagctcctttttgtttttctgtctcctgccttttccagaagtctgttgaactcaaagggctgaatgacagcagtcttccctccgtgactgggaaactacacgggaggtaccaaaggggaacagagctatgcctgtggtggtgaaaccctttaactgcaattagagccttattccctgcctaaagcc

SEQ ID NO: 3667 - DNA, 2300 bp, Homo sapien
ggttatgcctaggtctctggggcaggaactagagaaagccaaaaccaaatagccaaatcccactgcacagtgtcctccctgctgtttggggtgccttgggaaagctcagagtcctgtattccaagacaggcccaccaagagcttctagattcaagcactggggcctagaagaggaggtctcccatgggcagcaactgtctcccccacatcccaaaagggcagaagactaagttcagacctgtggatcaactgaggaagcagccttggagttagagctagccttctgaaagctcacccacaaactccccttttggggggacaggcacctactctagacacctgtccctgccaactgcagtacaggcaagctaatccaagtcagtactcctaaattaagcgtcgcagcggagaccagaagacccaccctacctttcgactcttttcactcaggtaactcctatgatggataaacccttcctcccttcttctggtccttcacccaacccacggtctagggggtcaatttaaaagggccgagcacctcccagatgtagaagggatcttctagggtgacagtaggcaacagtttaacagtcttaggaactaccctctaagacagcctcagagcctttaagggggctcagagcacaggcagggatcaagaggtttccggggggtacagggacctctgtgtacccaccccaagttctcaggcttttttttttttttttttttgctttgatttctttgagaccgagtttcgctcttgttgcccaggctagagtgcaatggcgggatttccgctcaacgcaaccccagcctcccaggttcaagcgattctcctgcctcagcctcccgagtagctgggactacaggcatgcgccaccacggctggccaattttgtatttttagtagagacgggtttctccatgttggtcaggctggtctcgaactcccgacctcaggtggtccgcccgcttcggcctcccaaagtgctgggattataggcgtgagccaccgcgcctggccagtcaagttctcagttttaacagagggacctcaagtccttgggcaccaaacaggagaaaagtggagtcaagaacattcttttcaaggccccaagagcttacaggaatccctagtcaagtatggggccaaagggcgaggacctctacctctggccagagtcgggcgcccaagacaaagacattcaggggaacaggttttgaactggagaaacctgttagagcttcccaatcatcctggaccttgcctcctgcgcggcaatgtgatctcagagggaggcggggaccgcagctacaagcgggcacctctttgtccaggaccgcagcgggagaaatacggggcgggccctagatcccctccaggctccagagcgcgctctgccgcagagccgactccgctgcccgaccttgagcgcagcgcacaaacgaccccaccatgttctcgcccacgctttaccgctcgccagcctccctagtccctcagcgcttctggggcgctcagaacgtttctagctcgcaccgcctcccgtaggggaagcagggtagaaaagtggtgccgggactcctcgggcgtccccgggctttctgcagagcccaccttcgccctgaacgcccaaacacccctggcatccccgcgcagcccaccccacaccctggactgccggggcgcccttccgttttgcgctgcgggcccttcccaccgaccccccgtgcgcccccggcatcctccccatcgtgcgacaccctcccccgcacagcatccttcaccatggttgatccagtagttgaagttggagggtcgctgactgcagacaccatacgggtctccagcaacaccacgaatcccaacgcgcggttgctggcgggaccttataaatccccggagagccgccggttgtgtctcctggcggggactcccattgggtcgcagctggacagagatcggatcgtcccccgcgcgactctcactgggccaggcccccaccgaggcccgcccctctctccgctattggccagccgcttacgaaacagccccgccgcagcggtcattgggcagttggtaaagccaaagggaggcagagtcgggcgtccgcgtcctcccggccagctcgaccgtcttctctattggggtgagtgctgggtctacgaggtggaatctttgggggaaacaccctcattctgttttagttttaggactttgcaccagtgacaccgctgacctgattcgaaaagtgtgtcggccttggagaagggtgcatacttaagttcagcaa

SEQ ID NO: 3668 - DNA, 2300 bp, Homo sapien
gcgtgagatccaagaaccctctcttggggtctggattggacccctttttccagcaacaatgagactctttgaattttggaatattttaaattcctgaagaggtatgtgaaaatggtgtgcctgtaatggcaaaggagttaagtagggtgatatagagtagaggaggaggaaaagttagaaataaaactctaagatagaaggcagtctggataatagaaataactccaaacagcttataagaggattagttttcatcagtttgatgtaaagaagtgcactgccaatggcggggatgggggattgtgcagcttccataaataacactgaatgtcactgtttcaaatgtatttataatccctgggttagagtcaactcaggaatggaaagacatttttaactggctgactctaccagcaggtggaatgagtgcttcatgaggtgaggcaagcaagagatgatagtgttgagtttatgatgttttgagtttattactaggtagctttattttaatcattgataggcctgccttcagtcgaaggcaacaactcaaatgcaacatttgagttgttttgctaggggtagtgacagccaatgaatagccgtgtcttaactctatatacatgaggtttcaaagcacttatttggatgtttgcccacattctctcaccttatcccctaaccagaggcgtctactttagagctggcagcctcatgaagcccattaacaaggattgagaccaaagaatactttacagactttgaagttaacctctgcactctggacttaaaccttcttgagtcacctgaccaagcatttcgtttcaaaacatttcaggaaagttttgaatgacatggctagagtcttgtgtaaaaatgggtgcaggcatccaggggacagctggtctgatgtcacaatggccagtgacagggtcttcctgagttctatcagcagaaagtcatatcagctgcagattttcctcaggtaattcaagtctccaagcctgattctatacaaactggatgcaatcacctgtccactgggaagtggggatgaagaggagatggcgatgctttgggttcctccggaatgtgcctcacaaatactaagggtaatcactgggcggggtggccaatcatttgataaaccaaacaccaattaaccctcccaaaaagaaaggagctaatttgttacacttagatatttcgaagtaaaacgtctcagctaaggaaaagtttggaaaaagggaaaagtatgtgaatgctctttagcatggaacaatatgaaaccaccactggaaaaaaataatgcacaagtaacatctaagtactgctcagaatgctgcagtgatcacatcactcctctgctcaaaacccctcgatggtttgaaattatatgccagggaaattatatgcaagctctccagcctagcattgaaggccccacgcctccttttcacctccaccctacaggccctcctcagtctgctttggccagcccggaccccttgctcttgcaggaacccgagtcacctgaacctgagcagttgctccggtcaaaagggaagtaaacgtcaactaccggcgcctgcaatgtcctttcccatgcctgtttgcctatcctacccaccccagccgcattttgtcccgctctggaaactcccagcagtcggttctcatcacagcatctttccttctgcagtggttgctgaacttaagtatgcacccttctccaaggccgacacacttttcgaatcaggtcagcggtgtcactggtgcaaagtcctaaaactaaaacagaatgagggtgtttcccccaaagattccacctcgtagacccagcactcaccccaatagagaagacggtcgagctggccgggaggacgcggacgcccgactctgcctccctttggctttaccaactgcccaatgaccgctgcggcggggctgtttcgtaagcggctggccaatagcggagagaggggcgggcctcggtgggggcctggcccagtgagagtcgcgcgggggacgatccgatctctgtccagctgcgacccaatgggagtccccgccaggagacacaaccggcggctctccggggatttataaggtcccgccagcaaccgcgcgttgggattcgtggtgttgctggagacccgtatggtgtctgcagtcagcgaccctccaacttcaactactggatcaaccatggtgaaggatgctgtgcgggggagggtgtcgcacgatggggaggatgccgggggcgcacggggggtcggtgggaagggcccgcagcgcaaaac

SEQ ID NO: 3669 - DNA, 2300 bp, Homo sapien
atccttttgttagtttcagtacctcagctatcaacatttctgagctaccattcaatgttcctctgtgtcatggagtgaaattcttgttttgtgggtattaggagtgtgggaatgtgataacctaaacaacctttgctctgaaattccatttttccctctttccctgagttgtattgacctacagagttaatttcctttgtatttttttaagaaaatattaaaaatcaacggtctcaaatgccgagagtttgtggctaaccaacattgcctttagtagatatttgggagggaaagatgtagggatcagccgtagctcctgtctcttcaagctgttcatcttgtgtgtttgccaactagttccgctatttctatgttagacacaggtaagaggtagccactttacactttggagattctcatcagtaaaatatttacctgatttgccatattcattagcccctctgacgcttggagttacttgaaaaaggaatacagaaaagatcttgaattcacttagcacgcgcttgaatttcagggtttcagtcacaccagtccttttttccatttgctttgaattgtggcatgtgatataaacagctatgcggaaggcctgcaaaactgaaacagtcctgatgcttccagagcaaaaggaaggaggagccacatgaggaagttattttccttaaaagatgcctaccaactttggcagatggattgtgcatgctaattaaaccaaagcctataaaacgtgacttttcctatctcaggaagagatccaggggagggtgaaggactgatggctcctatgctgtcttcagtgctgactaatgagtttcagaccaacttcacaaatagttcatacactgaagccacaatggtatgttctacagaaaaatcaacacgtaaaacagctcctttttcactcttcacaatcgtacacactttcatgtgctcacatacatacacagagatacccctaatttggtggttcatcttatttttttaagctcccataactggcaaccagctacttagttatctaacctgggaaaaccagcagttgctttgtgtcacccccatcacaatacagacatccagctagtttctaagttctgtacaattttaattgtttcaagtccattcccatatctttgttccctctgctagcttcagggcctttctgagctagactgatgaggtaatagctacctgataccttacctctactctttttcctctcttcaatctagcccctctatttattcataggttatctttctgaagcacagataggatcattacagtgcttaacatacagcagacagtaaatatcgaacagttatttctggcctaaaattccacagattcccattgttcatgttattaatgttaaattccttagcatgacattaaagccatggagctctgggcccactctgccttacctacctctactaccacttctccccacgtgtaatgtgggtcagccacagtggtctactaaccattcctaaatttgttctcacccttgttcatatataatactgttctgtctgaaataatcttgctttcctgacaatcctagttaattaagagcagtggctttagagttgtgctgcaacctttctgatctttacctttctcattttgtgcacaagcgtgccgaccccgtaaggaaactgatgatttagtaagtttctaaaggcgctttgacacattttgccgcatagtaaatggtcacaatgagtagaagagaccagcaattaaagtttccacgcatctttttccaataccgaaaagatacatgcccctctaagtagtttcctatagaagaagctaatgtggctaaaacttgatgggaagtccgacccagattcccttcatattgcccccaataatgtccccatttattcaggagactaaattcagatcccagaaaactaaacagtaaggtcaacctaatgatttgtctaggttttaagtgaagcccagtggccaggtgggtatggagatgtgtcactggtgccaagaagtgtccctgtcacaaagcctgccgacacctagccacttaggttaggcaatgaatgaaggcgcttgcgcagtagagtccagagcggggaagcgggcgcctgcgcagagacatagtgaccgtccgctcgccgccccgcctctgccaagccgcgccagcgcagtgaataacgagccagcagagacagcgtctgcgcagccgtggctgaggagcctgtggcggcagcggcgatggaaccagcggagcagccgagcgagttagtgtcagccga

SEQ ID NO: 3670 - DNA, 2300 bp, Homo sapien
ggaggtaggctggatgtgcagggcaattatttccatcttactgtggctggaccagggtttttaacctctcctgttgtctggcaggagcatgaaatacggagaaaaaattaaggtcaaatgttattattatttgagacagggtctctctctgttgcccaggctggagtgcagtggtgtgatcacggctcactgcagcctcaacctccccaagctcaagcgatcctcccacctcagcttcctgagtagctgggactacaggcatgcaccaccatgcccagctatatttttgtatttttagtagagatggggtttcgccatgttgcccaggctgatctctaactcctgagctcaagtgattgacccacctcggcctcccaaggtgctgggattacaggtgtgagccactgtgcccagccgacaaatactcctttttgctttcagaaatatcagtgtaatagaagctgttcaatattcatggatgtttcattattgactacaaagttggcaaatcaagttccaatgtgctgggtggggaactggcactagttgtgtttttgcaaactcctaggtggtctttgaatgcttttaaggattttgttttaccccattctttttagatgtcttccttgtctataaaacttaattgacttatctcatttaaaaatactttgtttttgctctcagacttttaaaggacccttggaaaatttgtagaggaaagagttcttagaaatctctcattctctaatagtctgtaatttgtttattctgagcagatatgatctatgtctctggaggctttgatggaagcaggcgtcacaccagtatggagcgctatgatccaaacattgaccagtggagcatgctgggagatatgcagacagcccgggaaggtgccggactcgtagtggccagtggagtgatctactgtctaggtattgagtctgggatgcaggaatgggagggaactcaatgggtaatgggctgtgggtaaggattcctttttaccaaaatgacgttcatagacttcccttcaactaaaaccctggtgtgtcttaatatattttccattaattgggattatctttttcttataagcataatgtcagatttctcttagagttattggaactcttgtgggaaaattgaaactaaaataattagttgaagcactcagaaaaaaaccgaccaggaatgggcatgaggatttaccactctttctggaatggtctctgtcttccaggaggatatgacggcttgaatatcttaaattcagttgagaaatacgaccctcatacaggacattggactaatgttacaccaatggccaccaagcgttctggtaagaccagatctgagggaggggacaataggcgatgctgtcagacctttacatatataatggtggtgcatgggacaaaccgtagattaatgtaaaaatgagattctgctctcctccttgtctctgttttctctaaatactaggataaagacagttgatacttacaactagattataaatttgaaagcaaaagccttcatgtctttgttctctccctacgttttagaatatctagtacaattttgcctgtgtagtacatgcttaataaatatctgttaaataaagtctctaatgcataaggacaaaagagtagctacttaccttcaccaagagctttttgaagtggagcaggctgggatatagaaaaggagagagcactgtgctgttctagtttacttactctgggtaaaaattgcttcagaaccataatcacaactcctttccctccatctacctttattgccacctttttttcacttcctccctttctcctaattagaagggttgggctctgagttaatgaaagtaaagaagagaaccatttttattatttatcttttatcatttcaagtccaagccaaagggtttatagatggaataacttgtgctggactagattattctaggcccgtgtgggcccattccatatccctcatctactgtagaactcagctagtcattagtgaccgtagtttatttctataattcagattctaggcttagtaccatacatttgctaatgcattcattttccccaggtgcaggagtagccctgctgaatgaccatatttatgtggtggggggatttgatggtacagcccacctttcttccgttgaagcatacaacattcgcactgattcctggacaactgtcaccagtatgaccactccacgatgctatgtaggggccacagtgcttcgggggagactctatgcaattgcagggtgaggatttaga

SEQ ID NO: 3671 - DNA, 2300 bp, Homo sapien
tgagatggtgagctaattggaaaagtaggatccacggtgtgtaattatacatttacaggtggattctgaagagccagtctttgaggctgtcatcaactgggtgaagcatgccaagaaagagcgggaagaatccttgcctaacctgctacagtatgtgcggatgcccctactaacccccaggtatatcacagatgtaatagatgctgaggtaagtagtgcaacactctcaggatccaaaaccttgacggactcttaccttagtgttatgtattcaaaattgagtattttaatgtaggcacagagtctcctgttttgcctctctaggaatgccagtgagagtggtgctgggtagtccccaagcatatttctaagaaaagcgaatttcttggcaagtcaggctcttgacacaaatgaaaatctgtggttcaattttgtgttttgctgtctgttttacatgcctctgagtgttttatataaacacttgataataaactttgtccccttctccattaaacataaattgttccaaattgcccttatgccacacttagcaagcctcttcatttttgacttctggtaaagccagcatgaaaggagtttgatgcattttagtgtcaactttaatcatatcatgttgagtttatttataaaagtgtttctccaacttaagttctctgtgatactttttcataatttttaccatatataccacctgtgttgcctggaccatacttcgagggagcattgatttataatatgtaggtaacccagcaagaagagttcctcttgctggcccagccctagatctcttagttaactacaaacagtttttcagttgttcacattagaaaagttgcagcatggtcagtgtcacatctcaaactctttttctcctgtttgtgatttctgtctttcttacaaccaattcacatatcccttgtgtctagttctttacattgtgtttaggagcacagactctggaaccagactcgggcctgaaatcccaaattcaccacttactctgtgaacttaatatgtcttaatatatttgtgccttagctttcttatgtgtaaaacagggatgataatagtacgttcctcataggttcttgttagcattgagtaagttactatgtgaaaacttttaaaaccaagtctttgtacataagtgtttactactatttattgtttgttttcctttccagttcgactaagaacttcttgggtcaggttaatagaggtgccatttaattagagctgtgtcctttagggtcccaacaggaaacagatgctatactcaaaacaggacaattttagaagagttttttttaataaagaagctgtttacaaaggcgcaagttcagagaaacaacaaaagacagtgaaataacctggatctaggacataagctattaacaacccctaagcctgaagggacaaggttgaggagtggttactagaaccttaaaggaaagagaatcgtgtagagtcactgccttgagagaaaccttgacctttggttgggctgatcccaaccagaagctagaaggcataggaagccctattgacacagttcatataggccagtcttctgagccagagagcagagtggaaaaaggtacagagtgagttgggaggcaaatgaaagatgtccagtacagagctgtcagaaatagacaatggtaattacaacaggactgtgaaccttgggggagatatttcagacaaaatatgattcttcctgtcacccagaaaataacagaatctttttggttttccccttaaaattcttattagttattatgtacttgtgtttgcataatccctggaagggcatccaaactatgtaaaaatagttaaatgtaagcgctgcgatagatgggaaatactgctcaacatatctgtttatatcatttgatttttgatccatctagtatgttatctatttttcaagtaaattttaaaaatcatttctggaaaccgagagcatggttactaccagcaatactcctggaatcacagggctttgcaaactggttttctgtagtcagaagttaattatttgcatgtgctctttgtactcttatagtattacaggtatccccagtgcctaactctgctgtctgctatatttcagcctttcatccgctgtagtttacaatgcagggatctggttgatgaagcaaagaagtttcatctgaggcctgaacttcggagtcagatgcagggacccaggacaagggctcgcctaggtaagctggtatctcggcagaatgaggggatgcttttcaactacttct

SEQ ID NO: 3672 - DNA, 2300 bp, Homo sapien
cttgtacatacatcgttttacatgtgcacgagtatatgtgaaggaaaattttattaaaatcgacgaatatttccaaaatgcccccaataatataccaatcttgcattcttctctacaatgtgtgagtcagggacagttttagatcaggaaggtatgacatggaagatggggacacgttgtaaatttagaatgctacccacttggctatggttttagtacccttaagaatcaaagggctaggcgctgtggctgacgcctgtaatcccagcactttaggaggccaaggcgggcggatcacgaggtcaggaattcgagaccagcccggccaagatggcgaaacaccgtctctattaaaaacacaaaaattagtcgggcgtggtggtgtgcacctgtactcccagctactcggagaggctgaggcaggagaattgcttgaacccgggaggcggaggttgcagtgagctgagatcgcgccagtgcactcgagcctcggcgacagagcaagagtccgtctcaaaaaaaaaaaaaaaaaaaaaaaagaatcaaagggctcacagagcataatagtattaccaaacacaatttgtctagacattcagataagctgaactaattaagctttttgccttttcagtcactaagtgcaccaaaataaattagaatttcctgaatcaattagaatttccttagaatcaattcagtggtgatgacagggcccattatgatgcagagtatatactgaggtctgtggatcctaaggctcagaggattctcgccgcagcgttgttcggcccgaaaaggccattgtggacaatggacgtgaataaatttgaggcctctgtgggttttctcgatgtcaaaaagttcctcagtacctggaaggtaaaacatacttgctgcaatcagatgcttggcatattaagcgttggaattctctctgcctgccctgcctagtgagcggtagggaggaactcaggctcagccaatcgccgagctgtagatacattcccaggctccctgccggaccccacaacatccagccttttttttgttttttcttttttttcttttttcttttttttttttttgagacggagtcttgctctgtcgcccaggctggagtacagtggcgcgatctcagctcactgcaacctccgcctcccgggttcacgccattctcctgcctcagcttcccgagtagctgggactactggcgcccgccactacgcccagccaatttttttgtatttttagtggagacggggtttcaccgtgttagccagaatcgatctcctgacctcgtgatccacccgtctcggcctcccaaagtgctgggattacaggcgtgagccacctcgcctggccttttttttttttttttaagagacagagtctcagtcggtcgcccagcccggagtgcaatggcgcgatctcggctcagcaacctccgcctcccaggttctagcgattctcctgcattagcctcctgagtagttgggattacaggcgcgtgccacaacgcccggctaatttttttgtattttcagtagagatagggtttcaccatgttggccaggctggtctcgaactcctgacctcaagtaatacacccgcctcggcctcccaaagtgccgggattacaggcgtgagccaccacgcctggacattttttttttttttttttttttacagggtctcattctgtggcccaggctggagtgcagtggcgatcctggctcactgcaacctctgctgcctggctcaagtgatcctcctgtcagcctctcgagtagctgggactacaggcgcggtgcgggctaattttttttttttttttttttttgtagaaacggggttttgccgtgatccccaggcgggtctggaactccggagctcaggtaattcgctcgcctcggcctgccaaagtgccgggattataggcgtgagccaccattccctgcccacccgacctttttgtaattcggcttcctagcagcgtacagaagccccgcgctagggtacagacaggtcacgtgacaccacctcctcacgtgacgcagactctggagcggggggagggcggtgctccagctgcattgcgtcatcacgtcgcgcggccgcaggggccagacccggacggctccagagcctccagagcctccgggtctgggcggcgcttcggctcctcccgagccgcctgctagccccgcgccgcactccatccccacaggctggggacgggcccggtgcggctgtgtgggttcgggagcggaggtgagttgcgcggaagtgatggcagt

SEQ ID NO: 3673 - DNA, 2300 bp, Homo sapien
gtgatccacctgcctcagcctcccaaagtgctaagattacaggcatgagccgctacactcagccaggattttttttttttttttaatggtcaaaatatgagtcaggactctgctagccccattcatgctatgtcttggatatcccccagtccaggctggttctccactattacctaggaccattcagagcctgactgacatcttcttagactagttctccatcactgcttgtccttggggaaggtactatctagtgccctacccagagaaagtgtatatgttctaggtctgggagggacgttggagggtcatcccatatgatgtgctccctgactggctaaaggacaacgactatctgctacatggtcatagacctcccatgccctcctttcgggcttgcttcaagagcatcttccgcattcatacagaaactggcaacatctggacccatctgcttggtgagtgatttggatggggaaaggtggaatttgttgtctccctaactgcgaagggattatagagcccaacaaagttgttcagatcgattggcagctgggattctacctttaaactactaatgactttaagctaataaccttggttgacccttgatcactgatctttaagactgagagtaaaaggcctagaaaccaaagaaattgggactagatatttttttgtgatccctggcagaactgttctaggtggagacaattccttgtacttcgtaatttccaactgtaaaagtaaaatgccaacatttcaaaaaatggtcttttttgtctgggtttctgtgaccagtgccactttctttgaaacattggactgcaattacacagctaaacctcatagctttctgattttttttttatttcaatagctcttgggttacaaaggggtgggggggggtttggttacatggatgaattatatactggtgaattctgagattttaatgcacccatcaccttagtagtgtacattgtactcaatatgtagtttttctgtctcacacccctatctccccctcccgcttctaagtctccatagtccattatatcattctatatgcctttgcgtactcatagcttagctcccacttataagtgagaacatatacagtatttgatttttcattcctaagttacttcacttagaatagtggccttcagcttcatccaggttgctgcaaaagacattattgcattcctttttatggctgagtagtattccatggtgtacatacaccacatttcctttattcactcattggtcaatggacacttaggttggttccatatctttagagttgtgaattgtgctacaataaacatacatgtgcatgtgtctttttcatatgactgcttttcctttgggtagacacctggtagtgggattggtggatcaaatagtagctctacttttagttctttaaggaatctctatacccttttccatagaggttatactagtttataatttacattcccacaaggagtgtataagcattccccttttaccatatccatgccaacatctgttgttttttgactttttaataatggcctttcttgcagaagtaaggtggtatttcattgtgcttttaatttgtatttccctgatgattagtgatgttgcctgtagctctctgattcaaaaacatcaaccatcaaagtgtacacattcccttttttcttacaggttttttttattttaccctcctgcaggtttcgtgctgtttctctttttgggaatcttgaccatgctcagaccaaatatgtacttcatggcccctctacaggagaaggtggtttttgggatgttctttttgggtgcagtgctctgcctcagcttctcctggctctttcacaccgtctattgtcattcagagaaagtctctcggactttttccaagtgagttaaaagaacaccataggaaaatactgtgcactgttgtcacatcttgagatcccagtgcttactgggtgataggagctcatatcactcctaaaggtttcttgatatgccagaggaaaggctctctgttctgtggcgatagtggggtgatgaagcttttctcttaaacacttcatgaacagacttactgcatcctcttcaacagatggagagaccaattgtggaatatattttctacctgaaaagcactatcttttgtgaggcttagagtgccagtgcactggctgctttccaagaccttgtacaagcgtaacttactattagcccaagccaaagtagggtgtggtaaatagtctatgcttcattctgctggtgctcctacc

SEQ ID NO: 3674 - DNA, 2300 bp, Homo sapien
catacaaagtgcagctgggaagaggttgagaaagattcagaaagggaggaaggggggaaagagaggtaacatttttgacagcctgggcaacatagtgagaccctatctctacaaaaataaaaaattaactgggcatggtggcacgaatctgtagcccagctacttgggaggctgagttgagaggatcccgtgaagcccaggagttcgaggctgcagtgagctatgatcttatgatcacaccactgtactccagcctaggtgacagattgagagcctgtccctaaaaatacaaacaaaaatggttttgagttaacagccatgtaccaagtactgtgctaagtactcgatctacatcacataatttaatccttatgataatcatgtgagctgaagattaataatttaccaaaggtcatacagctggtcagtggctgacagagcctaaatgtgaatttaggattgtctgaggccaaagtcaaacctagaagtgggcattgtaaactgctggcatcttgcagcagacaatgagaagggcagtccaacagaaggatcagcatgtgcaacagcctggaggaatgaaagagaagttcacttcagagaactagttcaccaaggcccaacatgccagagggaaaatggagaatgatgaggccttagaagttagagccagctcgcaaagagcctcgaaacactatgctgaagaaacctggactcaatcctgtggacagtgaaaagtttctgagggttttatacaaatggcaacacggtaatagctaacatttataaagcacttaccattggctaggcctcataataagagcctgcatgaattatctcactcaatcctgacaaagacccaatgaaatagtattattttattcccacttttcagatgaggtaattatcatttggaggggttcagtaatgtgctcaagatcatagactggcctgggacagaagcttggctctatgtgactccagagcccatgcttttaactaggaccaagagaattaaccccacgtccctgaagcacctatatcagattacaatgagtcactttctctgcctctagaatggcactagttgcacagtgagctatgatatgattgcaccactgcattccagcctaggtgacagtaagaacctgtccctaaaaaagaaaaattaaaaatttttttgagttaacagccatattgaggtactgtgccaagtactctatctacatcagatagtttaatccttatgataatcctgtgagttaaaggtttgctcacaagaggaagattgacattgcttttctgcttttcagcaactgtgtattgctgtatctggggctccagagcatggggctctagagtcacatagagccaagcttctgtccctggccagtctgtgaccttgagcatattagtgaacccctccaaatgatagttacctcatctgaaaagtgggaataaaataatactatttcattcttgggagaaatgagaaaatggccagaccctgaaatccccttctgtgttgtgtggttcagacaagggctgcactaccctatgttgtctcgcgatctgcactctaggtgcctgtgggagcaggaactggggcacgggttcaccagcaagagtagttagaaacaattctgctctctgataagaaaataacaggaggcagactgaggtctagcccagggcctggcacatggtaggggctcaataaatagtttgtggaagggaaggaaggaccatgcggttgaagaagagattaagaagtgtttcagaggtgaaacgactagccttggggacagaggagatgagataaggtgtatggtagaaaattcagcattccctcccgacgttctgtctcattctctgaaatttcttctccatcacgcacttcaggctgcgataacgaggtggagtgtagaatccgacgaacgtcctctaccccggggcgggtggaggttacctggctgcggcggggaggtgggcaggcggcagggaaggcggggcagcagggcggggcccggggcgggaggtgtggccggcgggcgcgggcctgtgattgggactccgcgagagggcctaggattggagggcccaggcagagcccgcgaggaggtgacgcggctgcggaggtgacgcgggaggtcgcgcgccccttccggcgcggggagggcgctgaagatcggggccgctcggccgcaggccgcctccagcgccgcgggatgtagcgcgggggaccgcggcccccagcagagcccgcctgcccggctgtaagtctcccaggggctgcgcggtgg

SEQ ID NO: 3675 - DNA, 2300 bp, Homo sapien
ggactacaggcgcccgccaccacgcccggctaactttttgtatttttagtagagatggggtttcaccgtgttagccaggatggtctcgatctcctgacctcgtgatccgcccgcctcagcctcccaaagtgctgggattacaggcgtgagccactgcgcccggccaacaagtgacaaataattataacagtgtgactaataccatagcagaggtacatacaaagtgcagctgggaagaggttgagaaagattcagaaagggaggaaggggggaaagagaggtaacatttttgacagcctgggcaacatagtgagaccctatctctacaaaaataaaaaattaactgggcatggtggcacgaatctgtagcccagctacttgggaggctgagttgagaggatcccgtgaagcccaggagttcgaggctgcagtgagctatgatcttatgatcacaccactgtactccagcctaggtgacagattgagagcctgtccctaaaaatacaaacaaaaatggttttgagttaacagccatgtaccaagtactgtgctaagtactcgatctacatcacataatttaatccttatgataatcatgtgagctgaagattaataatttaccaaaggtcatacagctggtcagtggctgacagagcctaaatgtgaatttaggattgtctgaggccaaagtcaaacctagaagtgggcattgtaaactgctggcatcttgcagcagacaatgagaagggcagtccaacagaaggatcagcatgtgcaacagcctggaggaatgaaagagaagttcacttcagagaactagttcaccaaggcccaacatgccagagggaaaatggagaatgatgaggccttagaagttagagccagctcgcaaagagcctcgaaacactatgctgaagaaacctggactcaatcctgtggacagtgaaaagtttctgagggttttatacaaatggcaacacggtaatagctaacatttataaagcacttaccattggctaggcctcataataagagcctgcatgaattatctcactcaatcctgacaaagacccaatgaaatagtattattttattcccacttttcagatgaggtaattatcatttggaggggttcagtaatgtgctcaagatcatagactggcctgggacagaagcttggctctatgtgactccagagcccatgcttttaactaggaccaagagaattaaccccacgtccctgaagcacctatatcagattacaatgagtcactttctctgcctctagaatggcactagttgcacagtgagctatgatatgattgcaccactgcattccagcctaggtgacagtaagaacctgtccctaaaaaagaaaaattaaaaatttttttgagttaacagccatattgaggtactgtgccaagtactctatctacatcagatagtttaatccttatgataatcctgtgagttaaaggtttgctcacaagaggaagattgacattgcttttctgcttttcagcaactgtgtattgctgtatctggggctccagagcatggggctctagagtcacatagagccaagcttctgtccctggccagtctgtgaccttgagcatattagtgaacccctccaaatgatagttacctcatctgaaaagtgggaataaaataatactatttcattcttgggagaaatgagaaaatggccagaccctgaaatccccttctgtgttgtgtggttcagacaagggctgcactaccctatgttgtctcgcgatctgcactctaggtgcctgtgggagcaggaactggggcacgggttcaccagcaagagtagttagaaacaattctgctctctgataagaaaataacaggaggcagactgaggtctagcccagggcctggcacatggtaggggctcaataaatagtttgtggaagggaaggaaggaccatgcggttgaagaagagattaagaagtgtttcagaggtgaaacgactagccttggggacagaggagatgagataaggtgtatggtagaaaattcagcattccctcccgacgttctgtctcattctctgaaatttcttctccatcacgcacttcaggctgcgataacgaggtggagtgtagaatccgacgaacgtcctctaccccggggcgggtggaggttacctggctgcggcggggaggtgggcaggcggcagggaaggcggggcagcagggcggggcccggggcgggaggtgtggccggcgggcgcgggcctgtgattgggactccgcgagagggccta

SEQ ID NO: 3676 - DNA, 2300 bp, Homo sapien
accgagtagcggagggaaagggtggcgcgcagaggggcccagccccgcctctgccggaccccgcccccaaaaggccccgccgccgccacctcctgctaggccccgcccccgacagacacccccccccccccccgccaggccccgcctcctgcccccccagccgcgaggtcctgcctcctgcccggccccgcccccggcctgccccgccctccgacccgccccgcggcgcattgtgggatctgtcggcttgtcaggtggtggaggaaaaggcgctccgtcatggggatccagacggtaagaccctcattcagtatcctccactgggggacccctccccatctggttctggccactcagctccggaccaggggctgtcgctgccgaccccgccccgcagggctctgggcccaccgtggatgctggggtcccgatcccgcacatccgggctcgggactccgccaggttacccctctgcccttggcatgcctccgcgctggagctcgggatcgccacccctgggacggtcaccacccaagccccgggctcttacccagcctggcggtcacgctgcctcctctacccacagagccccgtcctgctggcctccctgggggtggggctggtcactctgctcggcctggctgtgggctcctacttggttcggaggtcccgccggcctcaggtcactctcctggaccccaatgaaaagtacctgctacgactgctagacaagacggtaagttggggaagaaagggccagggtgaaggaggggaccagagtgctcctggcatggagggtacagcacccacggtggttgggatgtccaagggacgtggcagcgccaggcgcgcttggtgaaacacttgtgtcctccaccctccagactgtgagccacaacaccaagaggttccgctttgccctgcccaccgcccaccacactctggggctgcctgtgggtaaggaaagtgtggaatgggctcctttccctggtatcctcagaaggtgactcccctcctgggatctcatgaaacacgctgcttcaaccggtttgctccacacaccattccccttcccccacttggctctgcatcctccaagctgtgaggtgccactgggcccctctagagtgtggcttccatgacccccatccagctttaacactcaacagtcttgcctcttccctgcaggatttgctaattactccctctgagcaagcactactaactttttcccattgcccagacccttttggctcatctgtcaaggtcctggcagtaactggcaggaaacgctggaaataagtgtttcctcaactgggcgcttataagagatccaactgagggctcaatggggcaaatcttccctgccttgtagctccttgggaccacagcaggaagcaagacatcttgttctctcaaatctctttgagtattttgagggatgcagcacatcacagacaacccttatgtagctctctgcacggtccccaggcaaacatatctacctctccacccgaattgatggcagcctggtcatcaggccatacactcctgtcaccagtgatgaggatcaaggctatgtggatcttgtcatcaaggtaaggggctaggaagggacccaggggctgcttacccattctttctgggatttgtagaaatttctaagatttgcctgacagcaggaaatggtatgtactctgtggatgtgaagaaagtatgagctactcaggagactgaggcaggagactcacttgaacccaggaggcggaggttgcagtgagccaagattgcgccactgcactcaagcctgggcagcaagagcaaaactctgactcaaaaaaaaaaaagaaagaaagaaagtatgtagacggggaaaagatagcacatatctgatccctgccccagcctcagggaggtttagtcaacatggggctcagaaaccagtgacattccaaataaggtatttttctctctgtcttgtaaggtctacctgaagggtgtgcaccccaaatttcctgagggagggaagatgtctcagtacctggatagcctgaaggttggggatgtggtggagtttcgggggccaagcgggttgctcacttacactggaaaaggtaatgacctgtcttctccttgagcctgtctcccactttatcagttcccatagtcctcttggcacagtatggctgtgtgtacacatgtgtatgcacgtaagggccagggccgcccttccttctaaacatagcgctgatacaatagaaaggcatgtttctcagccccatttgccacaggaagcagtt

SEQ ID NO: 3677 - DNA, 2300 bp, Homo sapien
ccttcccacaattactgagtccaacacttagtttccaggataagcccacacccaaccattctgtcctgtggttcccagtgatacactcacacttgttagaatgtgccactttggggttcagaaaatgcaatcactgagagaagcccgagttgtagttatgctctcctttcgttccatacttccccctctcttgccacatctatccactagagggaggaaggcctagaacctctttagccagagtggagcagtggcaaggatcagtagtgtggcttcttaaccaagccagcagtggggatgtcagaagcaccggaacataatcgcctcattctctcggaacagaaaagaggaagggtcccttccttccccttttcaaccctctctgcatggattggcatgtcaccatgatctggtgcactcacttccctcaagtcagtgtgcaggctgcttaaaaaattcagaggaacatgtactggggtcttaggaacattttcagccagtggagaggaaaaggaaaactaagtatctcttggatcattcacagagttcaccaaatacaactgaaaactgggggctctaatgtccctgctgccctgatggtattagtttaagatgttgacactgacatctgcagagatctcatccatcacggtatatcaaagagcaaatgtcattctagttgagaaactcatgtatgagaaagaatggtcatcttgggaaatctgtagctccagcggctcctgatgttttttcctgcctcctcctgtcccatgcttgtgccccaggcagagctcattcctaaaaccatagctgaccctctgtgctgtcttttaagttataatagtagctgccaactgttgaatattttgctttatgacaggcactacactaagcacgttaacatatctcactgaagcctcacaccaaagctatgaactagatacaatctatctgtagataataatatatatccatctgtagatatccatcttatatccatctgtagatgaagaaactcaggttgagtaagctatctaaggtcacagagccaataagtgctagaggcaagattcttattctgtacactctgcctccaaagcccacttctttgaccctaagggcacaagaacccaaatcaggatgtgaagcttggtctttgaaaccaaaggaagctcctgaatcatcctgataggctgacggcttggcgctgtaaacaaaatcagtcttttgtcaaaaggaaatgaagttgccatgccactgttcactcctgtaagagactcctctgggctgttccattctcttgctgcaattcagccggttgaaaaactaaggtgactgcacaatgattaacttcaggcccttctgctctactttgagcctgtctctggttcatcgttacactctccgctcagcacccgcagactcaagagatttccaatcccccaatttagcgtggttctaccttaggcagaactcccatccagttcggatataagcgggtcgaagtggcagggaccacctcgctgggaggagaggctggagctgcggtcttaaaagatcttggggccgggcgcgatggctcacgcctgtaatcccaacacgttgggaggccgaagcgggtagattatttgagccctggagctcgagaccaccctgaccaacacggtgaaacccagtctgtactaaaaatacaaaaaaaaaattagccgggcgtggtggcgcacgccagtagtcccagatactcgggaggcggagccaggagaaccacttgaaactgggaggcggaggttgcagtaaccgagatcgcgccactgcactccagcctgggcgacagagcgaggctccgactcaaaaaaaaaaaaaaaagtattgaataagcaccggagaccctgagccaccgagtagcggagggaaagggtggcgcgcagaggggcccagccccgcctctgccggaccccgcccccaaaaggccccgccgccgccacctcctgctaggccccgcccccgacagacacccccccccccccccgccaggccccgcctcctgcccccccagccgcgaggtcctgcctcctgcccggccccgcccccggcctgccccgccctccgacccgccccgcggcgcattgtgggatctgtcggcttgtcaggtggtggaggaaaaggcgctccgtcatggggatccagacggtaagaccctcattcagtatcctccactgggggacccctccccatctggttctggccactcagctccggaccaggggctgtcgctgccgaccccgccccgcagggctctg

SEQ ID NO: 3678 - DNA, 2300 bp, Homo sapien
cctgggtcctaagtttcccaagccagggattatcaccttttaggagctgcaaggaagttagaaggataaaggagaataacttaggaaaccaaataacttcttatgtgtcgcggtgatacttttcttttttttttaatttatttatttatttacttttcatgcgcgtctgtgtgaagagaccaccaaacaggctttgtgtgagcaataaagctcttaatcacctgggtgcaggcgggctgagtcggaaaagagagtcagtgaagggagataagggtggggccgttttataggatttgggtagataaaggaaaattgcagtcaaaggggatttgttctctggtgggcaggagtgggggtcgcaaggtgctcagtgggggagctttttgagccaggaaaaggactttcacaaggtaatgtcatcacttaaggaaggactggccattttcacttcttttgtggtggaatgtcatcagttaaggcggggcagggcattttcacttttgtgattcttcagttacttcaggccatctgggcgtacacgtgcaagtcaccagggatgcggtggcgtggcttgggctcagaggcctgataatactagcccagggtcctgctcccttacagttctgtaatcttcactcagtgactcgcttctgtctcaatacaaaggaaagacgttattttttctttttctcctttttttttttttgaggcagggtatcgctctgtagcccaggctggagtgcagtggcgcaatcatggcccactgcagccttgacctcctggactcaagtgaccttcctgcctctgcgatagtttttcatggatgcttctagtagttttttggaggtatggtgtgttaggaacaaactgccccaaaaagcttcttggtactgccgacacttcccccaaacctctccgtgctgctcactcctccccctaatgctctgcaactcttctccttcccccaagcctctttacacttctaagtccttatgaagccagcagacttcacttatcagaccttgctgcaataaacaaaccccaattacaaatcatccggaccgcacaggggaaggtgatgggaagcataaacaaactttacctacaccctcctgtaataaacgtcacaagctaatatgtggcaaaattaaccagcaaacaaccccagggtctctctcccccatataaacccctcattttgtaagctcaggggtgcctcctctgtctgtggtggagcagccgtcaggttaataaacttcctcggctgaccttgggtctctctttcgtcctttctctcggctaaccttatatggtgatagattggaaacttttttttttttgagacggagtcttgctctgtcgcccaggctggagtgcagtgacccgatctcagctcactgcaagctccgcctcccgggttcatgccattcttccgcctcagcctcccgagtagctgggactacaggcgcccgccaccacgcccggctaatattttgtatttttagtagagacggggtttcaccgtgttagccaggatggtctcgatctcctgacctcgtgatccgcccgcctcggccttccaaagtactgggattaggggcgtgagccaccgcgcccggccgattggaagcttttaagaactccttctcctattttgagaattcagaaatttatttatagctttcgtaaaatagagtgaagactcttacagacctatgttagactagcaggcgctcagtctctgtggtccgagatagagcacgaagatgacagtgtatatgcattttggtgctgaagtggacctggagtgtggacagaggagttactaagaagaatcccggagaccaggatgtaaactctcaattctaatcaacacaggtgtgggctatggttctgagacaccattcatctcacacgaggtacggcgatacgcgacaccacccagtacaacagctctctctccacctggaacccggacccagcttgattcgcgggtgccggatgatgacgtatccttgcacctggcgatgattggttcgcgtggagaggcgtcgtccgacaacgcgactcggaacccggacctatgttctcgcgagagttagcggcctccggtgtgggatggccgcggagccgggcggagctggcttgcggctcccggggccggctctccggccggagacatggcccgggggcccggcccgctaggcaggcctcgccccgatacggtcgccatgcccaagagaggaaagcgactcaagttccgggcccacgacgcctgctccggccgaggtgggcgaggg

SEQ ID NO: 3679 - DNA, 2300 bp, Homo sapien
aaagtagattagtggtttccaagggctggaggagggtttggaatgagaagggatgctaataagtatggggtttctttttagagtaatggaaatgttctaaacttagaccatgttgatggttgcacaactctgtgaatatgctaaaaccactgaattgtacactttaaaggaataaattttatctcaattttttgttttaagtcaaagccattctgtggaacaagtccaaaacaacaagaagataaatccctaatagaatggtgataagtagcgatttcaagtgaaaaattaaggacaaagaagtatgaagaatgtcaatactggttgagtatcccttatcagaaatgctcaggaccagtggtgtttcagattttggcttttcccgcattttggaatatcttgaccgtacttattggtcgagcagccctaatcgaaaatcagaaatccaaagtgctccaataagcatttcctttcagcatcatgtcattgctccaaaaatttcaaattttggagcttttcagatttggaatgctcgacctgttttaattttgggatcctgaaaaagagggatatgactaacaataactagaataattccaaagcaatcataccattaatttcattaacttattacttcaatatactttaacaaataaaaatatctattatctgattctcaggtacaggtgaaagtgctggtaaatctgagaccaaaaatacatacatcatttactattatttttttctttttttttttgagacagagtcttgctctgtcaccaggctggagatgtggtggtgcaatgcaatctcggctcactgctaccttcgcctcccaggttcaagcgattctcctgcctcagcctccctggtagctgggactacaggtgcacaccaccacgcccagctaatttttgtatttttagtaaagacagggtttcaccataatggccaggatggtctcgaactcctgaccttgtgatctgcccacctcagcctcccaaagtgttgggattacaagcgtgagccaccatgcctggcctcaccattatttatcggctttcacctaaacgtagctgatcatcagaaccactttagctttaaaaattctgggctaagcatggtagcttatgcctgtaatctcagcactttgggaggccaaggtgggtggactgcttgagcccaggagctcaaatctagcctaggcaacatagtgagacccctgtctctacaaaaaatagaaaaaattagcaggcatgatggcatagcacctgtagtcccagctactcaaaaggctaagatggggggatcgcttaagcctgggaagtcaaggctgcagtgtgccatgatctttccactacactccagcccaggcaagagaccaaaaccctgtctcaaaaaaataaataaataaaaattctgagttccaccccaagagattctgactcattaagtctgaaggaaaacccagaatctgaatgatggtttggcacgttatattatcatcagtttattattctttgtttcatttgtgtacatttcattgccattaggatataaaaaaatcacctacttttctatttcccacaatacttattagacataaagcagacattactaattgcagagcacttaaaagcccacgataatgtctatgtttgtgtgtaacaaaactagttaacgtaaaatccacatactttggaaaacattttttggttacatctctgcttccttacacattcagaaatccagaaatgcaaaggccttttattttcacattgccttatgggtttttacctgataataacatgttctcaatgaagggctactagagtccagttcacagctccagaactctactaacacgtactaatctctttccctctcgaattcagacaaaagaaaaaagaaagcccaggtgtattaaatcccggcccactaccaaggttcttagggagagccaagttttctttaaactctcctggtatcacgtcttatatctcctcctgtgctactgggaaagtaacatcttcaatttgtcaccacaggcaggtctaataaaccaaaagagaacaagctccatacctttgtgtctcttgcttttcttttttctggagacagttctctcatggatgctttcctcctgggcatccatctcatcactgctgtcgatgatgtcacagggctcaccagccccagaaagagcttcctctgcaggaacctgagaggcttccaagccacaaagagattttactagaagaaaataaaaggagaatgagatggcacacagctccacccag

SEQ ID NO: 3680 - DNA, 2300 bp, Homo sapien
agtgcatatgttagtgcactacatacattattccgtgatttctcactagagcccatcatggtaggtgcattactgcccacagggaaagaagaaactgaggccagaagcatagggcagaggtggacagcagagaggcagggcccagtgaggggctccaccccaggatttggagggagcttcaaaccctggtgcagccagagcctggtgattctgggaggatttgcctccgtcctggcctcggcaatgtctgtgaggtctgagggggtgctggggccctctgctgcccagcctcatctgctgtgcatctgtgcagtagtgaggggtcggcaggcctaggctagcagagccctccccagacagaccccctcctggccctgcccctgcccatccttccactcactctctggttggacctcttctcttttggtgtcatctgtgggcctggcctggggcccctggctttggactttgcagtacattcttcagcttctccccaactctgctgtcctctttgtccctctctgactcccaccctccctctctgcccctccctggcccccactcccgcccccaccccgggtctgctggcacagggccgcctgtctgaagagattgagaagctgcgccaagaggtggaccagctgaagggccgaggggggccgtttgtggatggcgtccactccaggtactgcagcgccagaggctgggcatgccaggacggggtcctgatggaccgtgaggaaggagacttccttccaacaaaagactgcccaggacctcagggtcctcctcctgttcagggtgggacactgaggctcagataacttggtcagagtcacccagcttacttgggcagtttgggagggaacacctgtcctccgagggctgctgagaggcgagtcatcagacagccagtgctctgtccccgctgtggtaggacataggccatgatttctgcttccttgacagagggcacacccctgagagaggcctgcacatcccttgcttagccatgtcctacagggcccactggtagggagagccattcactccagttctcttgagagtcaaggaccacctgagttcaggcagcgggcagaaaggcagcaggagagattggaatgaagcatcagaaacttccttactggaagttgagacgccatggcaatcctatggacttggcatcccttttcttgaaaccattgtgagagatggagcttatctcctaatgcttgaattaggcccatgtttagggaacctcgggatttcccccacattttgtggagcgatgggtattgaattcagacctcgagcctgtcctcagtacccaggccagagaggtggggtgaagacaggggagactgaaatggatggtgccactcaaggttcatggctcttggctgttttctctccaaaccaaagtctcttagatcagaacccttgccgttccctttggtcatgtgcttgctgtatcagggaaatggagatgaactaccatgaagaaaggttaatggaaatatccatatagatatgtgtggaggggcagtggttgaaatagggaaggggatgttgagcttgaagaagagaagcccacgggtgtctggggtggtagagacttaagtgccatctccacgctcgccaggaattattgtatatgggtatgaagggaagcagaggatggagacaggcaacagtagttggcatttctcctacttctcccatcctgaccagaagagacaacccctcaattagtaaaatacggcccacagtacaccaagccatttgccactgcttggctttttttttttttcttaatggttgggaatgcttgggttcgactatagaatcattggattcatcgtggaattggggctgagttgcagggagaaaaggggaacatgcaggaacttccctctccctccagtgacctcgtatggtctgttgtaggctcactgtgtcccttcactctggactccctcaagggttccaagtaggaaggcacagggaggaagtatcactaggggaggcttccagatattccaggggattgttgcttgggtcctaaaatctcagggttggaatagactcttggggcaaagtattttctctggcttgtgtttctgacagtgttagggcctcctaaagcttcctaggcataggggtatgcctggcttgaattttaaccagggactcagtccagattatggggagacccgaggaaaagtgctgggtagaagaccaaaaaacaaagaccctcagagtgaaaagggcctctagacatcatcccttccaacatctcc

SEQ ID NO: 3681 - DNA, 2300 bp, Homo sapien
taggaccaccagctttttattttgcaaagtaaaacattaatgataatgactatctattatcgcaatcattttgcaaaagaaaggacattttaacattcctgaagtaagaaagacatactcagaataaaggcgagtccttctttgtgaaagggagtgggcatctttactggagcatgtgtgtgtgagagagtgtgtgtgtgtgcgtgtgcatgcactccttgctgagtgcctcccaggcacacacgtgtaccatttttattatttctctcatttttctgtggaacagggaaaaccccaccaggggtcagcatcatttaaaagtcctacacttggaaactgctgacttataccacttcagacatagcatatgttgggaaactgaggcacagacagcaaaatacctgactcaaggccaccctatagttaggggtatgtcaagaattctgattttcaggatggtttatgttccactgacgaaagtgcctccttccccagcagctgcttttgttaaacggagggagtaggcaagctaacaagaaagagatgtgtttctaagctccagtgggacagacaaagcctggcgggtgtacaccgcatgtggtccttggtggcgagtgcaggcatcgacccgcactgcctcctgctggtcctggctggggctagtggtgaggtctggttttgcctcccttccaggatgattcaggaagagaaggagtccacggagctccgcgcggaggagattgagacgcgtgtaaccagtggcagcatggaagccctaaacctgaagcagctgcgcaagcgtggttccatccccacctctctgacggccctgtccctggccagcgcgtccccaccactcagcggccgctccacacctaagctcacctcccgcagtgctgcccaggacctggaccgaatgggggtcatgaccctggtgagaggcagctgaggagcaggcctggcatcactggaccctgcaccgggggaggttttaagggatggtaggactcacgtgctctcagctgggcctgccatcttcttcccatggtgtgtgcagaccccgacatgtcaggccaccagcctgtccttctgggtttgggaagggcctaggtcatatcttctttgccctctcccttggatgagcccagactgcttaagaaactcacccactgccctcacctcttcctttcttccagagaaataagccctggcttgtttttctaggccagcttttttttttttttctggcgtgatattctctccgggcctgtgtgaggcactgaatcctatcttctcatcctaagaccactgggctcccctggggttggctctagggcacccagagggtgagtctgagcttacccatccctctctcttgcagcccagtgacttaagaaagcataggaggaagctgctggtgagtgctgcctgatggcccaggtactaacgggttcactgctcccatgccctttcctttcagcttcctcccccagggcccttgagtctgagtctgaactcagagaggcacccagggcctccccactgcatttctccatgctccgccacctcttctgggctgggtaggcaggcccgagatctctccctctatcccctgacggctccactgtctgttcagtcgccagtgtctcgggaagagaaccgagaggataaagccaccataaaatgtgagacttctcctccttcctcacccaggacgctgcggctagagaagcttggccacccagccctgagccaggaagaaggcaagaggtaagtagagcagaccccacctccagtctctccatccacagggtcctctcctcccttcctctgcctctgcagggaccgcatctcccctgtcccagtttctgaatgtcttacttctctttgaaacaccatcagggaagggagttcatgtgtctccttttcccccatcccagttctgacttaatagaagttcttcctgaggtctaacttccatctttcctgctgtcacttaagtatgtttcttcttattccgcccccttctggctgtcaccctgtagtgccttggaggatcagggcagcaaccccagcagcagcaacagcagccaggactccctgcacaagggcgccaagcgcaagggcatcaagtcgtccattggccgcctgtttgggaagaaggagaagggcaggctgatccagctgagtcgggatggagccacaggccatggtctctgtccccttcctaacggaggtctgggcgggcattggggcatcagaagcaggaaggtgtacttggactggccttctctgcctgc

SEQ ID NO: 3682 - DNA, 2300 bp, Homo sapien
atttcagaggactcagggagggagctttgtccttgtcctttgggctcccagcctgatggggatcctggggacccacacccaggaccagctaggtttcctctctgcctgcagtcttctgggaatgtctgggtcacccatgaagagatggaaactctggaaacatctactaaaacagtgagtctggcccttggcctttgtccctgggcctggggttgggactgatactcccatgaggatgaggggaaggctgtgggcagtcagagtgggctgccatcgatctcacgtgaggttggtatccctgaggtgtgatctgctgtcacggtggagggttgtcgggagaggggtgaggctgggagcggagcagtttgtatgtgtgtgatccttcccaggaggtcacaagcttgccctgggccactggtgtgctacagcggaggagagttgggctggggagggctttgccctgctatggacctgagccacagagtctctgcccttgtgcttcctccctggtggaggaatggggagtgttgggagagctgggcatcttgcctggctcccagtcaagcctgggaggtgtgtgtttttgccacacacacatttgccccacctcaacgcaaacatgggtgcacacaccaaccttgtgttctctcttaaccatcctgacgagctttccccagtcacccagccagatactgggatgtctttttcctctccttgatggggcctagggtagagctgatgggtttcttgactttgcctgtttcccctaacacgctgcactcgttcctgctaggacagtgaggagggcagctgggctcaggtaagactccctaccctgtctagaaccagctcccaaaacttcaggacagtgttcttctggtaggttctctccgcagcaggaatctctgagtccttcatatgaaaagccctggacataggttctctgctcccatcagagtgccccccgcccccacccagttccctcaaactgcttgttctggtttctcagggtggcaggtgaggagccctggaggactgtggcccctgcattcctggcccttctcctcagtctcattcttttcctgggaataatcagacctagattagtatgagtcttcttcctctccctgtccctctcaggggcaccctggtgaactgagcgaaggtctttcatccatttcatgagcaaacgtttattgagcaaatataaggattaggcctttcctggctctctggatatagaagtaaagaaagcaagccctcatggaggcagtaaacaaataaaggaataatatcagtaaacaaaccatgtcaatagggataaaaaagacagtctcggctgggcgcggtggctgacacctgtaatcccagcactttgggaggccgaggcgggcggatcacgaggtcaggagatcaagaccatcctggctaacacagtgaaaccccgtctctactaaaaatacaaaaaaaaaatagccaggcatggtggcgggcgcctgtagtcccagctactcgtgaggctgaggcaggagaatggcgtgaacctgggaggcggagcttgcagtgagccgagatcacaccactgcactccagcctgggtgacagagcaagactccgtctcaaaaaaaaaaaaaaaaaaaaaaaaaaagatagtctcaataagtaaacaaataaagggacaatattggatagtgatgcgagctgtgaagaatgaagcagggagcagcactgtgtatatctgctcagggaaaaccccaccagcaggagactggctgaatcattcatgccataaaacacccttggcagaggtgatgggtcgggggggatccgagccatagggtgtgaaatgaagaatgcagatcctaaaagatgcatggaatttgatcccaaaactcaaaaccaaacaaaattaataatatgttgtttagggaaatatacatggatgattgtaaaaagtgtaaaacagttttttacaaccaaaggaatagtcagaaaactcagcatagtggttcccttttagaggggcagtaggagatgtgtgctgacagcgagcatcagtgtgcaaacagtacagtgtgggtaatgctctgctgcttagcttggttggtgtccactgttgctaacttcatttatatgcttcataatgggcacattacatatagtcttatatgtatcagctattacattgtaaaagagaacaaaatagactttttctatctgaaaacatcaagtaagggtaaggaaagagtgaggtagggtcgctatgaaaactaaagctttctcaagttgggtggtcacgg

SEQ ID NO: 3683 - DNA, 2300 bp, Homo sapien
agaacccacacagtacctatgctgctactttttttttttttttttttttttttttttgaggcagagtctcgctgtgtcacccagactggagtacagtggtgcgaactcggctcactgcaacctcctcctcctgagttcaagtaattccctgcctcagcctcccaagtagctgggattacagtgcccaccaccatgcctggctaatttttgtatttttagtagagacagggtttcaccatcttggccaggctggtcttgaactcctgacctcgtgatccacccgccttggcctcccaaagtgctaggactacaggcatgagccaccacgcccggcctatgctgctactttctatcatgctggtaaggccaagaacagaattaagacctcactgctctccctcaacatgcttagggttcttttgttgtccagctatgttccctccttccctccatttcctgtcccaaaaggacatcagaattctcctggctccctgctgtgaataatgagaggaaggaacactggttcttcacatgcctcgcagatctcatgttccctgtgaagtctcccatgagtccccagcagggttccccttcctcttattgtccttgccactggcttgaacttgtcagtttgatctgtcgtaggataaggagcaggacattagtctatggggaggaaaaaactgggaacaaaggataaaagatagagggagcagattgcagcccaaagctacacgtcaatggaacgggctgtctcctgacgtgagcagaagctgaacagtagccgcctcggaggagatttgggcatcaggggctaggtagaaagaggtgatcaccgttgtctatcagatggtaagttcgagggcagggatcctgtctggggtgtccctataatccccagccctaagactgagccttgttcactgctagtgtctaaggtctgcccactgcattggaaggaatttgtcctctcagaccctgaggcacctactgagaggtgaccatggcctgagaggcctgaagattaaatagtccctgctctacctgacatttgagacctgcatgatacgtgtaaaattgatggctcagacagtaagaggcagaacaaccaagcccggtggccaaggagagaggagatttaaactgagtttgaagggctctgttttttctactttttcacccccgtccacattaatgagccaggaaaattctggtgttggaaaaagagttgaggaggtaacatagaaggacagatcaatggtccggagtgagacagggaggagacagggagcttaggacatcttgaccttgccgctctggggaaggtggcaacgtgtaggctgtaaattctaatctctgctctgaccacggctgctgtattaaagaggaaatttctctttacccctgccaagaaaaccaaaacccaaataatttctcttgcctcaatttacccccccagatgagacctaagagaacatacagctcaaagctgcttgggaaccccaaaagtggaatctgttagctgctctgagtcttgatccttcttatccctggatactgagtgcccatgaatgcccagaatctgaagcagtcccattctttccggagggaagtctttaaaagagtctcatcgactgatgtagtgtggttaaggtgctgtcaggaagcaaggagatggataagttggctcttaaggccccttccagcctaagcctacccttccttgttccctcctccccctatacccaccagcttcttcgggactgcaaggagacagcaggcaggccgcccagctaggagtaattgaaaggagcagatgagaggggaatgtgtcctcccccaacgcccctgccccacaggggctgctgagaaatgaaaactaatcaaattacacccgacggcctcccgacccgtgcacaggagcccgcctgggccaggggcaggctggcagggtggggtgggggccatgcgggagaaagaaggggaatcacatctaatccactgtaaacgccttgatgtgcagcaacagcttagagggggctcaggtttctgtggcgttggctatatttatctctggttccatgccagcggggagggtttaaatggcacccagcagttggcgtgaggggctgctggagcttgggggctggtggcaggaacaagccttttccgaccccatggagctgtatgagacatccccctacttctaccaggaaccccgcttctatgatggggaaaactacctgcctgtccacctccagggcttcgaaccaccaggctacgagcggacggagctcacc

SEQ ID NO: 3684 - DNA, 2300 bp, Homo sapien
agccaaaactgctgaagactggtgctctgcagaaggcttggggagcatgctgggccagctcttggagaactggtaggattcagatgaggagaggggagcaggggaaggggacgttgggtaggctgtttgtatggagcttggggttcaggtaagggggtgatttgagacaaacttgcacagaggggaggaggcccagctgggcagggaaggacttgagagctgaggcaaggagaccgcacagaacagtgtgatggtcatccaggaatgagatgatgaaggtctgaacaacctcttcagaggcaggaggatggattcgactgggagagggtgcatgtttcaggctagcaaaggatggcgagtatgcaagcaataggggaatggctgtattaaatgatagggtacttggcacatggatacacctggtaaatgttattcccttttcttgctttgtcttctcttctacttctgtgtgccctgcaggggaccacagcagcaggaatggaggagggaaaacctggctccaccccgaatgtgtttattcattcattcatttttttttctatcaagtactgtgcattcagcaccttgtgccaggtgctggggttactaagacatgccctctctgccttcagcatgttcactgatgagtaaggagaatgagtacacaaagtcatctaaccaaggtagaaacagcaggctagagaaagtgctgacgtaatccagagaaggaatttattaattcactccttcatctgctcaacacatatttactgagaacccactctgtgtcagttccctggctgggacctgacctggggcaagagcagtgcctagactcggcgcttgcctgcagaagctctgttgggcatgcatttggccttgtgtctggatgatgtttgcctctgaccaaacatgagggcagagccgggaggttagggtgaccttgtgtgcctggtttctgtgaatccctgtctctgtgtgtgtttgtgtatgtctgagtacagtggtttggggaccacgtcaaagcccgatgtggggcacagaccctcttggtctgagctgatagagtgacccaggtgtctttgacctgtccataccctgatgggggggattggccctgtacccatcttgttcttctctcagagccgagctgtggagacgcctcatctagaggcttggtcctcctccccttgtacacccctccacccccacaagctgccctctgatggatgggaacacattggtgccaagcacagaacagcctttgtgctccgccaccagcggcaatccatcagctccaacctgacagcagggcgtccggccctaatccccatccctgctggcttgggcacacagggccccctgccctgactgtagcctcctcctccagcagtcctgcgccctccagaggaagcccttatcccctactggggctccagggccacattgttggctccccaaccctgactgtttcaacttgattctgtctatttgcacgctgggctgatgtcatttgcatggtagcggctggatttcaaaatgctcagaaatccccttcacctgctccctgctccttactaccccttctgctgcacacccagtcacagccctctggccttcagcatcttctagtccctgctgattttgcaggtgggctgacctgggctgccatggtgcttggctaaaatcaaagcaatttttccattctggattctcatgtgcttgggaatagaggagcaagaaggagaagggtctggaagggtgggggcctctggctgctccaaacaggtctcaccatatattttcctaggctgggtctctgggtattattgatgaggatgaggtcgggggtgggggggggtgggggggggtggcaaatgcttgtgcatttcaataggacatagatgcataaaaattacatgcaaatcagcattgattatttgtggggcagtagctttgcagcaagatgagaacagatcacagaatcacagaaagtcagagctgcaaggcagtctagaatccactagtccaccttcttcctccacatatggggaaatggaggcccagagaagggaagtgacttgcccaagcgtacagaggatgagtgtcagaagtgtgaagggtgcctgttctgaatcccagagcctcctctccctctgtgaggctggcaggtgaggaagggtaagtagtaagcagcaagtgagtagatatttcccggtgggcctggggccacaagtaggcagacagtgaggggttggagagtttgaatggagggtttagagagacatcaggagaggtac

SEQ ID NO: 3685 - DNA, 2300 bp, Homo sapien
aaaatagaagctttgcattgggcatcttggagggcacctaaacttggtacctgtgggatttggtaccaacattagcatccctggctgtgcagggcagatttcataattttgcattctctttccctttccacccccacgcttcactggcctggtgctgcctacttgcctttttgataaaatatcagtgctggacgctttccaaaagccagctcattatgttctcataaccatcctacaccgaggggtattcctacactgctgttacaggtggggaaaccaaggctcagcttttgaaggcaggtgaagcttggagggttgcatggctgcagtgtgtgaggggaccctggtgtggggagggtcatcttgtctaagggtcctggacacactgtgaaagccagagagttttgactcaggatacattccagacaccttggctccatctgttctgcctacagcctccctcattgtcctttcctcgttatagatctgtgaccttgcctcttcctctactcgcctccatcacaaacttccccttctctcagccctgctctctgtgcctcacaggggagctgggagttagaagacttccagggggaaggaccaagttctgtggtctccatctcagcccatctctcgcaccttggaatggacttaccagctgttggtgtaggatgggtaaactgaggccaggagaggaaaagtggcctgcttgaggtcacgcagccagtgagtggcagagtagagcctagaagccagcttccagctcttctgactctcggtcaagtgctcttttcaccgcaccaaatgaccctgctgcccaggagatctcagcaccgaccctcctacctccgtgtcaagccagaggactgaggagaccgtgtgcttcccccaaggcagctttctggaatagaccctgccttggccagttctgttgtcaaataggctggtctaatccctgaggctgggaacaggcaggggtggaaggatggagaagataagggaagaagattttggcttattttgcccagaactgagaaacaaattacctacaggcattatgcaaatgcatccactacatgtcagcaacctgtggtaagatgaatcggaggtgggagtgtatgtgtatgggaggtggtggtgggtgctcagttgccctccagagctgaagatgctgtcaatagttagacagggtgaccccactcacccatccccgtccccaagctgggcccatctgggtcttcacagtctcttctgacatctagttgagtgaccattgggaagctgagtgtaaactgagagagaaagccttgagccaaaaatggcttaagtcaagcaaagggtggagaggcaggggatggtcgcaaaggcctgcatgtctgggtggcagggggagtaggcaggacgtcaggtgctgttgggcgtgttgacaaagtcagcaggggaagtgcaaggggacgaggaggaaggagagtttacacttcctaatttctccaactagcttctagggaaggaatgtaattttgctgtctgaggcactgattccttgctccccctaaaggcagaaatggaagttatttttccccacagagggcttccccctcctcctcagaagactcaactgcccttcctccctgcctcccagctacccaggttccgggtcccacatcattcctcactgtgattcagtgcagcccccaatgggagcaacgtgcccaccctcctctgggcagaacccttttccttgcattctgagatccagtgaggggggcagtacccccagaggccaggttgggttgtggctagctaacattggggtccccagcctgactctctttgccttcctagaacccttgcccaatacccacaaacaaggatttctcaggttgggatctctgcgaggcatccatccatgtccagggtctggtcattagttaatatcagtggactgcctaaaccgaaactggcagaaggtggccaggggaggggtctggacccagtggagagagtcaggagcctgggattcttattttggtcctgttaggatttgccctgtgaccctccggaagtcccttgcttccctgagcctgcttctttatctgtaacatgaggggattggactggatgccttatggcttagcgctgtgctatgaagaggaagaaggaggaaggaaaaggagcgcagagcgggttacactgccaggagatcctgggaagctaggtcacttccctgagcctcagcatccttatctgcaaaatagaaattgctaatagactaaaaggcaattctgaaagatggatga

SEQ ID NO: 3686 - DNA, 2300 bp, Homo sapien
ctgttggtgtaggatgggtaaactgaggccaggagaggaaaagtggcctgcttgaggtcacgcagccagtgagtggcagagtagagcctagaagccagcttccagctcttctgactctcggtcaagtgctcttttcaccgcaccaaatgaccctgctgcccaggagatctcagcaccgaccctcctacctccgtgtcaagccagaggactgaggagaccgtgtgcttcccccaaggcagctttctggaatagaccctgccttggccagttctgttgtcaaataggctggtctaatccctgaggctgggaacaggcaggggtggaaggatggagaagataagggaagaagattttggcttattttgcccagaactgagaaacaaattacctacaggcattatgcaaatgcatccactacatgtcagcaacctgtggtaagatgaatcggaggtgggagtgtatgtgtatgggaggtggtggtgggtgctcagttgccctccagagctgaagatgctgtcaatagttagacagggtgaccccactcacccatccccgtccccaagctgggcccatctgggtcttcacagtctcttctgacatctagttgagtgaccattgggaagctgagtgtaaactgagagagaaagccttgagccaaaaatggcttaagtcaagcaaagggtggagaggcaggggatggtcgcaaaggcctgcatgtctgggtggcagggggagtaggcaggacgtcaggtgctgttgggcgtgttgacaaagtcagcaggggaagtgcaaggggacgaggaggaaggagagtttacacttcctaatttctccaactagcttctagggaaggaatgtaattttgctgtctgaggcactgattccttgctccccctaaaggcagaaatggaagttatttttccccacagagggcttccccctcctcctcagaagactcaactgcccttcctccctgcctcccagctacccaggttccgggtcccacatcattcctcactgtgattcagtgcagcccccaatgggagcaacgtgcccaccctcctctgggcagaacccttttccttgcattctgagatccagtgaggggggcagtacccccagaggccaggttgggttgtggctagctaacattggggtccccagcctgactctctttgccttcctagaacccttgcccaatacccacaaacaaggatttctcaggttgggatctctgcgaggcatccatccatgtccagggtctggtcattagttaatatcagtggactgcctaaaccgaaactggcagaaggtggccaggggaggggtctggacccagtggagagagtcaggagcctgggattcttattttggtcctgttaggatttgccctgtgaccctccggaagtcccttgcttccctgagcctgcttctttatctgtaacatgaggggattggactggatgccttatggcttagcgctgtgctatgaagaggaagaaggaggaaggaaaaggagcgcagagcgggttacactgccaggagatcctgggaagctaggtcacttccctgagcctcagcatccttatctgcaaaatagaaattgctaatagactaaaaggcaattctgaaagatggatgagaaaggaatataatgactcagggtagagcctgcaaaacaatatgggatgagaagatgcagggactggtttcatggagagagcagggttttaggattgggggagggtgccagggctaccgactgctttgggagatcccagagggggcattctgaagtcctgcagaagagatgctgtgccgtgaggggtgaggggtcgctggaggccagaccagggctcccaggagtcctgcattgagaagggagagagtggacacaggaaggatgcgcctctgtccagtcctgaggctgggcgcacacaccaggcccttcgaaaagctcacattttttccagcttttctcacccagtatcacttcctttgttaagaggagggggtgggggaggagacggaggatgaggagggaggggctggcgggtgccgccgccgcccccgccccctcccggtgtgcggagcccgattgtcactcagctcctgcgccgggggcgacagagccgcaggcgcccgagtcgagtcccagccagctaccatccctctggagcttaccggccggccttggcttccccaggaatccctggagctagcggctgctgaaggcgtcgaggtgtgggggcacttggacagaacagtcaggcagccgggagctctgccagctttggtga

SEQ ID NO: 3687 - DNA, 2300 bp, Homo sapien
gcgaagaaaacaaggactcggcaaggcgtggagtggggtgtggggagggggtacccggcatttcacctctggctggtggggccaagtattccctaatccctgccactgcccaccccaccacacaggcatctttgaaaccccagggctgcaagcccttgtgggcagccaactgccctcccctggggccacccttcccccagccggggacaggctctccagggctgactcagtgtcctgtggggttagtcacattcacttatagctgcagagtcagaggccaaggatggagatccagtctccaggacccactccctgcctggcaagacgtggagtcacctagcagagggcgagggcatccagggagggccagatccagaggctcccaggccctgcactgccactccccagcagagacagcagggttgagaggcagccacaccctggtgtccccagtcctcaggaaagggaagagcatgcatgctgctgagggccctgaataaatcacttttacttatttttaaattgtgagcacatcttacgtgctaaagagtgcataaatgtatttgtttaatttgaagaataactatgtagtaagaacctgtgtaaccaccacccaggtcaggaaaggaaacctcattagcacccctgcagccctcacgatcacagatatccctgttcctccacctagaggcaatcgccatcctaacttttgtactggcctcatcttcctttctggccttaccgcctacggatgtaccttgaagaagggagcctggtgttgactgcatttggatttaatgtagatgagacagatgagacgcaacatttctgtgtgccttgctcttctgctcatcactgggtctgtgagtagctgaagttgctcatttgaccccatattttgctttacagttgcataaacactccacagttatttatccatcccactgttgagggacagctgttttcccccacatttcaacaattacaaataacattgccatgaaccttcttctccatgtctcctggggcatgtgtgggtgttatatgagcggcacggctgggtcacggagtaggcacctcatccattttactaggcactagtaaaactctcacattttccagagtgactgctccaataccagcaataaaagttcttaatgttctccctccttcctgacacatggcattttctggctttccagtgattcccagtcttaacattttatcgaacaaatgaatcaatgactagaaatctggccatatctgcctcctttggcacactgagaaagcccatgcccacagcctgcttggaagagtctagaagcttcagagtgctctcctccactagggcatcttccagatctgcctacaactgcaacccatcccgaagggcgaggggttctctgtaacaggtggaaaactgaggcccacagcaggcatcaggggagacgagctccttaccagccgcccaactgagacaggagccaggagacttagtgccccttcctggggttccaatgctggaggaccatcctctgagcagctccaccctcagcatctcaattccctccctctctagggccctcagcctcatacagcacaggcgagagtccctgggaactgtgggagcccagggaatgtggaccccagaggcaaagctgggagtgctcacaaggacgattgtcccaaactgtcagggccccagcacccagtctgagaagctctgggaacaagtggccccatagacgccagacacacagagcctgagctgggctcattctccagatagaagttcttcctcctattgccctgacacctggcacgcggcctgctcgatgtcccatctcacccatctgcgccctcccccagctgggcaccagcaccctggctgttgaaggccagtcggggagatggatgaggaagtgactcctcaaggggcccttgtggttcctcccccagagctattcctggcctgggcgcctctccaccctccagtcctcctgcttgacctgaccccacagctgggaatcgtttgctgggggtggggcagcccctgactatataagcctggacctaggtgtcccaggcaccctagaggcccaggccccccaacggctgacccctgcacactccaccctggccccccagccagtccagcaatgatggaaaaaaacacctccgagggccctgcctgcagtccagaggagaccgcatctgaatctgccaaggtgcccacagcagagcctcccggagaagtggcagtatcagagtccaccagagaagagcaggtgcccaagccg

SEQ ID NO: 3688 - DNA, 2300 bp, Homo sapien
gcccaggccggagtgcagtggcacaacctctgccgcctgggttcaagcgattctcctgcctcagcctcccgagtagctgggattacaggtgcctgccaccatgcctggctaattttcgtagttagagtagagacggggtttcaccatcttggccaggctggtcttgaactcctcacctcatgatccacctgcctcggcctcccaaagtgctgggattccaggtatgagccaccacgcccggcctaaagcttttctattaataatttcctgcctcaccctccatccccttcctcctcagacacctggatttcattagcatcatgacctacgattttcatggagcctggcgtgggaccacaggccatcacagtcccctgttccgaggtcaggaggatgcaagtcctgacagattcagcaacactgtgagttcccagaaggagggagggccaggagggggccgcaagacctgccatctgccagtgctcacacaccaatctctctagccctcagtacagtcctgcaagaggggggtcatgaggcccattccacagataaggaaactgaggcccaaagtctgggcatgctgcgttgctctgggaaggtgatctgcagggtaaatggagtgagggcagggggccgaatggggagaggctgggagccgaggaggtaggagtcattgtgccctcagagccaaccacctgatttctgcatctgtcaaatagtaatagccccttcctatgcctcaaaggatttttttcaagaatgaaactgtaaaattcactttaaagtgacatgatccgttcccggagggacaggggaatccccagtgcaccatacaccaataacccctgctaaggcagcagtattaattgctcaaccttccgcacctgtgcactaactgctcacgttgttcccaccctaccccacccaggactatgctgtggggtacatgttgaggctgggggctcctgccagtaagctggtgatgggcatccccaccttcgggaggagcttcactctggcttcttctgagactggtgttggagccccaatctcaggaccgggaattccaggccggttcaccaaggaggcagggacccttgcctactatgaggtaatggagttggggagaaggtaggattcccccacaccaccagcagccctggggaaggtgattccccaccacgttcttgctttttctcctttgggaataaagaaaatgtccggttgccccagcatgcctgaggaagtggaagggagaggttaggacatttgttgctgaaaatctccagcaggtacaggcacatgggcctgcaccactaggcacctgggatagccctctggctatggggctgaggtcttccttccagcccaggaaagagcagaggtcaagaggcagattttttgtttcactctagcctctgctactctgtgtggccttgggcctgtcctcagtgtcaaccagcaggcctcacatctctgtttaaatggaagaagctaagcagggccaaggcagccaccatctctgggtcatttgcctctggtttgtataaacttgtgtgatgcatgcagcctgcagaccctgcagagagtgaggctgcaggatggagcaggagctaaaagagatttggagagtggcgtctcctggtgacctgcaaggtctcggcacgactccccacactgccttttccctgttatctgctcagatctgtgacttcctccgcggagccacagtccatagaatcctcggccagcaggtcccctatgccaccaagggcaaccagtgggtaggatacgacgaccaggaaagcgtcaaaagcaaggtaggtttccccaaggccacacctcaggacaaagagaaagaaggaggccccgctcccagcagccagattcctgtcccttgcactgaggtctgggctgggctcacagagcacatgtgccctgtacacactctgggtcagggaacccagccctgctcctctgggcctcccctgccaggtgcagtacctgaaggacaggcagctggcgggcgccatggtatgggccctggacctggatgacttccagggctccttctgtggccaggatctgcgcttccctctcaccaatgccatcaaggatgcactcgctgcaacgtagccctctgttctgcacacagcacgggggccaaggatgccccgtccccctctggctccagctggccgggagcctgatcacctgccctgctgagtcccaggctgagcctcagtctccctcccttggggcctatgcagaggtccacaacacacagatttgagctc

SEQ ID NO: 3689 - DNA, 2300 bp, Homo sapien
gtggggagaccctgggaggagtctttggattaggtggggttggagcagggcttgaaatgggggtggttatggccatcgttggcacccatgtgctgggtactctttctgtgtccagcaccctgtctccccatgatcccatgttgtcctcacaacagcaaggtgagctgttatatttgtccccattttacagatgatgaaactgagactcaggttataacctttcacagtggctggctagtaagtgatagagccagacttggaaacctggaatgcctggctctaaggcacatgcatgcctggaggcgacccctgtcccaatcatgccctcccagagctgtgtggcctcaggatcccagctctgcaggtcctggaaaccccaccagaggcccaaggcacctagcatatcagtgctgagcatgctacagggctgattttggtcctagattttccaagatagcctccaacacccagagtcgccggactttcatcaagtcagtaccgccatttctgcgcacccatggctttgatgggctggaccttgcctggctctaccctggacggagagacaaacagcattttaccaccctaatcaaggtgctggtcaggtcagggacagggagggaggtgggcaggcatgagggaatggggtgggctagaagccggcgtcagctgctgtcctcctgaggacaggtaaagagggacttcagcctcagggcagtgtcctgggaccctgtgccctgaagatctcacatagcaaggaaggcttcttgtgaccatggtgggaggtgggaatggggttctaagaggtggaaggttgtgactgagcagagcacccacttataactacccacttagtgcattgcccattgcccacccttcaatcccatactgatgccacccatacccagcatgcactgtgtccagcagctctcagctctgcctgggggcagcctaagtatctccagttaccaggggcagaaggagagtctaaacaaattgttcacaataccagcagcaatcactttaactttgggatttcatgcaccagctagaacaaagcacagaccgaaaggcaaatgtctcccaaagtcatctgtgggccaataggggtcacccactgtccgatgctccctccaggacagggagtaattgagtgctgatgggtgtgcatgggtttggggagaagattagtcagttttttaggaaaaggatgggtgacttgaggatgggaccactgatgagccactttatcacttccactaggccccaggcaggttggggagtacagcaaatgggttgcgcagagacctagtccgccctcgatgagtctacctctcatgccacttgggaccctttctctcacctgcctgtctcccatctaggaaatgaaggccgaatttataaaggaagcccagccagggaaaaagcagctcctgctcagcgcagcactgtctgcggggaaggtcaccattgacagcagctatgacattgccaagatatcccagtgagtctcctgccccaggcagcctccccagaacctctgccaacactcctgtttccccgccacccccagccctagcactccatgtagactgaggacactgggcttccagtcccagttcttccaaagccttgatgtgtgaccttgagcaagtcacttccctgccctgtgcctcagtttccccatctgtcaaatgaggcataacaatccttgcctttcctttttcacctgggctgttggctgagcagttgagagagctgctatgaaagtattttggaaagggaagtggaaaaagctattcaaaccctccagctattgcagagtattttctccacaccaggcagagcagagtgctgggccctggagaggccacacagcagcctctttctagagtgctggggagtcctcaaggctctctcatacacacaggcctccccctttcctgttggccccacgcctcatcctcaccccacccctcatgcctgtgaggaacaaggaacagccaagcagcctcatctctcctgagagcagagccatgggtctcgggaaacccaggagtaaggaacaaagactcttcaaaatgacttcagagctttctttaggatcccagggaggtgtaaactcagtgcttaattaaatggattctttagagggtgggaaacaggtggatgtcaaccatttgccccacatacccgtattcatgcaatccacccccagtgggctcaccggtgcgggtgtgcaaaacctcctcccaccccagtcatcttaggttcaggtcatcctttggtcctgctctttc

SEQ ID NO: 3690 - DNA, 2300 bp, Homo sapien
gccaaggtgaggaaggcttactgctcatcatgaaagatttgagttccttaaactagggattcctctgctgtgatgtaactcattgcattcatggcatctacctgggctcctccaacactgcccttgtgagacctgagggctaaggggaactgaccctaacatgaagttcatgctgcttgctgtaccatggataataaagtcctttgtctctgacctaggagtctcgtgtcttctgccaacatccacgaaactgtagttatgtcattaatttgcaagtagcataaaatctcagatctttcatcgttatttacaggcaagtggatgtcatatataaaggccctgtggcgggagtcagtagagcaaatataaggatttaaaagaagacatataagcatgagtggaatatagggagggtgggggtcatggcctgagataaggctgggaggtggtgagcctatgagacccttggccaatcctgctaacacaggcctgggggtatcttggccatttgttgttacaaagctgccttcaggcagagcatgtggaattaataaactgagcttgagggagcataggacaacaaggcttgggccaatctaagcctatgaaataatttttaacaaagggagatagtgaaaataggaggtgttttcttaacatcctgtgctctgtgatgaaaaattttgcatctgcatgccacttcataatatcactattagaaattagaagtcctcctctcagtgccccaaatgaaccagaagaagctatcattgactgtcattgctgtcaatcatcttgggtacaaaaggaggcagtcatcttaaaaaggaaaagtgatgcctctttagtattcaccgagcgtgattctggacaagccactttttgtccacctctcttacaatgaagggaaggcactggctgagttttaaaggaagagaaagggagagagggagagaagagggagagagcagagagacctcaccgagagagctgcaaaaccagcctggaaaaattagagtattacctaacattagtgaaaaataaaggtactttcttgagaagcccttggacccattctgcctcttggagttctgaacttttcactcactgcctattaattaatgttaagcctgcaaagaatggagttgtcctggatatttggccaaaaaaaaaatgtatccacaaacagggacgtaatcaggcagggagcctcgttaagaagttttgttcttgtcctaggagtgatgagagatcactgaaggatttagagaggggctgtatcatcaggcttgggttccaaagcctcactgagagagttggggagctgactgatgtcagatgctcgtgcagccgccccgtagggcctgtatttcctccatggtgcctcactgcagcaccgagcttgcaaaagatcctctctctttatgggaatttcaaaacagaagcaaaatagcaccggggcttaaagcattcttgggaatttccctgtctttccctctaaataatcagcatgtaaattgcaaaaaaaaaaaaaaaaaaaaaaaaaaagacacgggcccaaaagggagcgctcagtttcaggctctttgctttccttcctcccgaggctctctggcccttacccagcctgaagacagaaagtgtgagggggagggtaggaaggtaggtcaagcagggcaatgctgagcctgggaagaaaacaacagccttgtttagggcactgtggcttacgtaactaaattgtgcccagtttccacctggccaggggcctggagtgaatgctgaagatgcaaaggtagaggctgccagaaaagccaggaaattgctggcaagaaaggccagtggtggggtgcaggagtgggaggaaggctgggaaatgcggctgagtcacatctccagaagccccccatcatcaccctagtggctcttctgctggcaggtgcctcatgaagacctgacccaaagttttcaaaactctgcggtttctcaaccctcctctggtaatccatagtactcccccgcctccacttgccagcctcgtgattccttcattgacacatagctcagttcccataaaagggctggtttgccgcgtcggggagtggagtgggacaggtatataaaggaagtacagggcctggggaagaggccctgtctaggtagctggcaccaggagccgtgggcaagggaagaggccacaccctgccctgctctgctgcagccagaatgggtgtgaaggcgtctcaaacaggtatctgggctagccaaggttaatccatcagagttgtgggttttcaggc

SEQ ID NO: 3691 - DNA, 2300 bp, Homo sapien
ctgtgaaagaataaacttctgttgtttcaaatcacctgtttggtggccatttgttacagaagctctgggaaaccgacacaaatgtccaccattcttctgtttttttttttttgtttttttttttttgatggagtttcactcttgttgcccaggctggagtgcagtggcgcgatctcggctcaccacaacctccgcctcctgggttcaagcaattctcctgcctcagcctcccgagtaactgggattacaggcatgtgccaccatgccaggctaattttgtatttttagtaaagatggggtttctccatgttggttaggctggtctcgaactcctgatctcaggtgatctacctgcctcggcctctcaaagtgctggaattacatgtgtaagccaccatgcctggcccaaatgtccaccattattattcttcataagaaacataggcatttcaagccattaccaaacttatagtcactatttatcattatctatttttctccatcaatggatatgcaactattactatcatgaaaagtaaattatatttgcaaccccattatcttctagatggagaaacagtttgagagagggcagtggagaagcaagagagctggtctggaacccagctgcctgactcgtgagtcatttctcttcctccaaagccctattaagtctggggctgcttatggtcctcaccaactacacaaagaaagtcagggtcatgctcatccatcaggaggttcagggccacttcccgctttcctctgtttggcaacactaagagtcaccctctgattgttccagaaaagcaagaattgctaaaggccattgtgtcaagtttgcccaattcatgctgcttgacatcttacccctccccaccctgctcccatcccccccacccagtgcccctgattgcaacactcctggctggggtgggacagggtggccagataaaagcagagcaggacctggaaagctggtttgtatgggctgcagcctgccgctgagctgcatcatggtgcggtctgtggcctgggcaggtgagccgtcggatagtgggctgggtctcgggagctgtggggaggtggggatgtggatgttcagggaccacttgctaccatttgcaaggaagcaggaggactcaggagaacttcagagggtcattttatccctctccatgcctcctggcttgcagtcccttgattacctttcctgtgggctcccccttaggctctttcagcccaagagacttcatgttgcaagggaaggcttttctcaacaggctgaagatgacttgactttcctctctctgtcctgaaagcccagagtcaatgaggcccctgcactgggtctttgtgtctttcccatgttcttaggtccctcctgttggccttatccaagaagcgcccactgccaagaacctcttctccaacctcatattgtctgtcctgcaagagggcagcctggggccaagatcctgggcatccttgcaaattttcatggaggttctattaggttgacagagaagtccaaggtcaccaggtgaaagagatctcttcgaaggagtcctgtcagaccctaggtctccaaggctgtggttgcctaccacagccaggtagcggaaaggcaacaggaagccataaacgatgggagcagaggcacaggccctccccaggagatgaactctctccatgcagcccttccagattgattctttctagccccaaaacaggcttgtttcttgttccgaaagagaaactatctctctaaataactcacaagtcagcagtttttccacaatcttcctgaatccacactgccctttactgaggtatagagagggggcagcctcagcccatggaactttccatcagcttctaggaccaacccaggccaggaagagacccccgtggtctggtctgcatgaagggatgggcacagtgccctcctgggtcccttctgaaaggagaaagcttgatttgtatgaaatcagccctccctgaccacctcctgtgcttccgtaagctgtggggcctgggaaggtgagaatggcagcataaccctggccttctctcttgtgttgctccaggtttcatggtcctgctgatgatcccatggggtaagtagcctctttcttggctgcctcagccccttccctgggctctgcttaatgtcccaaaacaccttccctgccagacctccccaagagctccagatttcagtggggactctcttccaaagctcagacccctgcaaatgtccccatctgctaccagccctcccaggaaggctcttgcct

SEQ ID NO: 3692 - DNA, 2300 bp, Homo sapien
cagtgcatgtcctcctggggacatgaggcatagcgagaaattcatgaaactgacaggtcagttgtgtatatggaggcgggggcgagataaggtggcccctaactctccagagaagcctctcctccccgaggctcaggacctcccagtcctcactcctgcatcccactctcactcccccaccaccaaggagctgaggcacctctgcacatctcaggtgaccctgaacaggctcttttgcaggatccccaagagaaagggctgaccacagcagaaacagaagccatgactgcagcagggaaagggaggacttagggctggtccatctgagtgctgaggtccaacactctcaggggcctcgaagaggttactagagccctctgacacccctagaccagcagaagtggcagcacttggcagaaccaggaataatagcagccaccatggagtgcgttcccaacagtcctctgaggattcccctttacagatgaagaaactggagttcagggaaattaaggaactcacttcagtttacacagatagtaaatggcagaggaggaattcaaactcaggaacctaactccacagcctgccgcacccaatattcccacgtggccatctaggccattcatgttaagcccaccggccaaagactggatcccctagaaactgcagagctttctcagggaccctggagttcatgcatacaccagacattgtctgcagacattacagtaatatgtgcccacttgggtcctgtggtgaattgaatggtgaccccctcccaccccccgcaaaggataacttcacctggaatctcagaaggtgactgtatttgtaataggggtctttgcaaatgtaatgaaggtaaagatctcaagatgagatcatcttggattagaatgtccttctcagagacagaaaggaggggacatacagagacacagcgaggaagggcgtgtaaaaatggaggcaggcagaggctggaacgatgccgttgcatgcccaggaatgccacaggccatccgaagctggaagctgctgggaagtattcgcccctggagccttcggaggaagcatggccctgccaactccttgtttccaggcttctgacctccagaactgtgaaagaataaacttctgttgtttcaaatcacctgtttggtggccatttgttacagaagctctgggaaaccgacacaaatgtccaccattcttctgtttttttttttttgtttttttttttttgatggagtttcactcttgttgcccaggctggagtgcagtggcgcgatctcggctcaccacaacctccgcctcctgggttcaagcaattctcctgcctcagcctcccgagtaactgggattacaggcatgtgccaccatgccaggctaattttgtatttttagtaaagatggggtttctccatgttggttaggctggtctcgaactcctgatctcaggtgatctacctgcctcggcctctcaaagtgctggaattacatgtgtaagccaccatgcctggcccaaatgtccaccattattattcttcataagaaacataggcatttcaagccattaccaaacttatagtcactatttatcattatctatttttctccatcaatggatatgcaactattactatcatgaaaagtaaattatatttgcaaccccattatcttctagatggagaaacagtttgagagagggcagtggagaagcaagagagctggtctggaacccagctgcctgactcgtgagtcatttctcttcctccaaagccctattaagtctggggctgcttatggtcctcaccaactacacaaagaaagtcagggtcatgctcatccatcaggaggttcagggccacttcccgctttcctctgtttggcaacactaagagtcaccctctgattgttccagaaaagcaagaattgctaaaggccattgtgtcaagtttgcccaattcatgctgcttgacatcttacccctccccaccctgctcccatcccccccacccagtgcccctgattgcaacactcctggctggggtgggacagggtggccagataaaagcagagcaggacctggaaagctggtttgtatgggctgcagcctgccgctgagctgcatcatggtgcggtctgtggcctgggcaggtgagccgtcggatagtgggctgggtctcgggagctgtggggaggtggggatgtggatgttcagggaccacttgctaccatttgcaaggaagcaggaggactcaggagaacttcagagggtcattttatccctctccatg

SEQ ID NO: 3693 - DNA, 2300 bp, Homo sapien
tgaatgacttgagccaattcctgacatcagccttctaaacgaactggcgctcattgtaagcggtcacagtggcattgtttatccatccacccacctcccgtatgtttggttgggtgagccaggcctgtagatgttaaccagttctggtgtcctgaaaaataaaacaaagacaagttctagacctgtcaaaacaagacgggccctgccgctctaaccaaggttctgcttcagggagttggggtagtgggaggggcagaggctacctaaggagccagttcaggctagagcttgggatatacaggcccaagtcctggctctgtgtcctgggacaagttacctaacctctctgagcttcatttttctaccaacctcacagaataaagatttgtaaaatgactcagcaaaccgtaaactgccttatggtctgcccaaagttatcacagctgctgtgtgtgcctgcctagcccactggcccctccacggcaggcattgcagtggggcctcactcctgtcacccgataagatgatgcctctggctccttaaaactcagcgtgccttgcctccttcagggtcttggaagcttttgttggcagccctctacccccaccccacccccagccacctaccaccatcaggagacttccccagggctcctgaccctgtggtagatgcccagcaccctccctgctctgccagctcctgtctgtaccctcagcctgggaaggatgatcacatggtggcccttcggtaagtgtctatgaaaagggtgattctgggaagtgcagaagcaaaaaggggatgctggcggggcagatgggaggggcctccgcgagccctgtctgcttcacagtttgagttcgcattctccaccctgtgtggccacaggctgcctcccagaccagcctgactatcctggggagtatcgtcctgcaaacagtggtctcttggggtaaggatgcattgcctcctcaggctgggagccccaggcagaggccatgctaacccccttcccctgtgcacgggctccacctggcccggcagttatcagagcccaggctggctgatttgacctgagcaatcacttgcgtctgggtgagaccgtgatctcaccaggcttttggtttggtttggttttgtcttcttgtccaataacctaaggcctattttacaatcccctggcccctttcctctgaacagagaagcaagcagggcttcctccgtccgggcctcacactgacttggcgagcaagagcaccggagagacggctctgttgcaggggtcaccggccaaggaggcggtctaccctgtgggtcctccccgctgcagggcacacagagtggcgcccgtggggctgagcacgaggcagtggctcctgaccctcctacagcatcagcaccgcctctgccggccgctgccgggagtccaggaccgggcggacaggagaagccccacctttggctcagcacaaagcccacagcacagccccggtgcacagacgcggtcacatgcacgcccgtccacacacacccagagtaagtcagacgggtgagcaatggtgactggctttgaataaacacaatcagcgatttcagacctctggggaccaggttaccttttctgggcctcgaggctcgagcaccaagcggaggcctggcgccctctgccggtgagcttgggcgtgcacacctggtctgtggttaataagctgggggagccgcctcctctgcgctgcgtcccgtgggatggcagaaattctcccgctccctcctttccgtctagggattaagagtgatttacttcaagtcattctcccaaaggcaggatcgtctccctgtcgtgtgaaaggaaagatgaggctcagagagtttaagcaaatgtcccaggatcacacagcaagttgggggcagtcctggaattggtctccttcactggagaaccagaactgacgtcactgggcccacccagacccccgcaggagtccgcacctgggtgtccccttcaccctgttctcccgggtcaaaggccaacgctggaccatttctatatcctgggcctgctcagggagggctctgggctaaaggaatcgcgatgctgggcaaatgctccctcagacacttagtgaggaagcgtaattgggggaccactgcaggaactgaggtcctgaaggggcctgcaacagccctcccctcggggagctcccacccctgggggagacaggccagatgagactaccaagaagtcacacccctgccttcctacagggagcagtgctggatttaggtggaggtcaagtggcct

SEQ ID NO: 3694 - DNA, 2300 bp, Homo sapien
attaacttgcaagctctggttgaatctctaaaaagatcactaacaataccaaatgatagattatgaatgcccaaagaatggtatggatgactaactcagcctcgagagaatggtcagcataggttttcaaggtggaagaccaagattacactgtaccttcagtagtgtgagagattgaggcaggggtggggcgtggtatagacaatgatgtatgcaggagataaggacatgagccacggagcagcagggtcacgcatgttcaggcatgcatggaatggggaccacgttacagggcagagatggggatcatgggcaagctgttgagggatccaggctgtagatttgctgatacttagagggcagtgagaagagtgaccctggagcacaaagtagcagcaacctaaaaaggcagatggggctaaattatgaagggtcttaaacattaggcaaaggagtctggacttgatttagtagacgaatgggggaggggatgtttcagaatgacctgagcaagagaagagctagggaatgaagtcttttaggaagggaactccactaacagtgggaagggtggtctggggatgggactggatagaatccactgcaaccatctagatagtaagaagcagccgatttggggactggatttagggagcaaagtacaaggaggggctgacctttctggacggagtgactgggaaatgatggtatcgctgacagaaatggagatcaagagctttggagagacactgggcttcggctgacattgaggtggtggctggacatctgagggagaggacagagccggtgggaacaggagcaggatggaaagacaggaggacagactatgcagatgagaaaagccactgtaaaacagtaaacatcaagacaggctacatgcataggacctctccaaggaaaggcagcctagagaaaagggaggaggactgaggagacatagtgcggggaacggggcacgaagggatccaggggcagcacagccagacaggggggtggagaagcctggggcacaaggaaaaaagacagggacacggcttccagaaggtggtcagagggctcagagtccaaggaaaataggaatttacagaggccactgggttttagtcaccttacaaacacggcatctgtatgccagaccctgggccaggcttcacggtgttgggtagaagttatcctcattcagcagacatctaccgagtgcctgtgatggtggcggtccctgagtgtggaagagggagactgaggccagattctttctcgagaaggtccaaaccacaatgaggaaggaagacggctgggggaaggagggagtggacggaaaaatacgtacagttgagagcagaccactaattcaaaaaaattagcacttaaggaaagtgagaactagaaaaataagttgagaagacaaaagtcttgcaacacaccccctacccctacccaccagaaaacttagacttgaatggttctcagcaagagaaaagacattgctgtagaatggaacttgttgtgggaggtgggattaccacggaaataaatagaagacagcctccctttccaaagagccaaaaggaacccatttcgtctagttaagagacgaggcaaagcggtaaaatggtgacaacacgtcctggtgagtggttctgaccgtgaatggttggaaaatgctgtgggaatcagaaaggggaaccgtctgggagaggtggtgtcaccgaaggcttctcggaggaggtggcctctaactcgagccttaaaaatgggcgaagaggcgaggccggggcctgccccgcgcggagtactcgggagccgcctccctcctttcagagctctcagtcccgtccccgggcctcgctttctcctctcgcctcgctcagctcagccgggcgcaggttcctagcactgacgacagcgagcgatgacctcagcgccgccaaggctgcgagggcgggggctggggtggcgggggcggggaaaagcgccggagcggggccgagcggagcggctccgggccccgcccccatcctctggccgcgaccaatgagcgccgccgccggctgcccccctacctccctggacctcctgaaaaacgctgcccggggaaagtccgggcagagcccgagcagcggccagggtaacgctgtcttgtggacccgcacttcccacccgagacctctcactgagcccgagccgcgcgcgacatgagccacgggaagggaaccgacatgctcccggagatcgccgccgccgtgggcttcctctccagcctcctgaggacccggggc

SEQ ID NO: 3695 - DNA, 2300 bp, Homo sapien
tggaggggctgctccggcccagcagcacttggttcttgcaggtgaggagcccacaggaggcggccagtggggcctcctcgtacaagacgcagatggagccgtcctccccaatgcggtaggacacctcataggggtccacccacagggtcagctcgctgggcagcagctggtgcagctggggctggctgagtccgatctggctggccaccctgctgatgatggggtccatcttgtggttgatgcgaatgcagcggtagccggagcccttggacggcttttcgggaaaccagtggtgtttgtagtgctctgtggagacaggaccaggggcagatgccctggttagagcagctaggccatggatactaccatagggcggggtggagggtcaagggacaggaggagagaaaggggccctttaagtaagggaggtggattcctctgagttctaggaccctctttccacttagcagagaaaattttatggaagctggaaagatccactttcctgcttccaggacaagtgtatgtgagagagtgtgtgtgtgtgtgtgtgtgtgtgtgactgagtgtgtgtgtgtgagagagagagtgtgtgtgtgtgtgtgtgtgcgtgttgggaggggattctagagctctagggtactctctagtggccagtgtattgcttttggcacacccccaaagcaagggaagggtgtgactgggactggcatgtccaggcagggcctctggagacctgtgagctgaagtttcagggccaggaaggctgccaacattgttgggtccacagcaagtcactggacctcccaccctgtgttccctctgcttccttcagaagagtcagagaaccttccttagcagtgcctaagggagtgaaaactgggttgttttgatgaaacatctgttttcctcagaaggcagggtctgtgtgggtgcgttccgagatggctatcgcttcccaaaactgacagtaaccagctagaaacagctgggagagaggtctctccccagccagcgagcgggctgcttatctcttcacctcccaacttgaaggcccgcacggcagggtcacgagctacgaggctctcctccctaccacaataggtggcagatggctaaggggaaccaaagataacacaaagggggcccaaattccaacttgaagccagtcagcaaccagtggactaccccaggcacagcgcaccccgaccggcaggaagaaccgcactgggactccaaattgttgaaaaggctcgactgcaccttcttccctcatcgggacccctcggccgaccgggcggcccgcaacaacatccatcgagggtcttaagatctcgagggtccagcgagggagacgagcccgtaatgagacaggggcataagctggggactcgggctggcactccaggaccagggtctgcgcctccgagagcgtagaggggcgcgccccatcagaaccgccacggccgagacccgagcacagggctggggaggaggacccaggaaactggggactgcgggccgccccgggggtcggaggagggccaccgagtcccaaagctgctcccgtgggtcaccctgccgcaggagtagaagaaagacggccctggcagggatggggccgacccccggtggcgccaggcccctcggcatgcgctcacctgtgagtgcctcctggagcgccccgctgaagaccttaagcctctgctcgctcacgcagccccgggtcctcaggaggctggagaggaagcccacggcggcggcgatctccgggagcatgtcggttcccttcccgtggctcatgtcgcgcgcggctcgggctcagtgagaggtctcgggtgggaagtgcgggtccacaagacagcgttaccctggccgctgctcgggctctgcccggactttccccgggcagcgtttttcaggaggtccagggaggtaggggggcagccggcggcggcgctcattggtcgcggccagaggatgggggcggggcccggagccgctccgctcggccccgctccggcgcttttccccgcccccgccaccccagcccccgccctcgcagccttggcggcgctgaggtcatcgctcgctgtcgtcagtgctaggaacctgcgcccggctgagctgagcgaggcgagaggagaaagcgaggcccggggacgggactgagagctctgaaaggagggaggcggctcccgagtactccgcgcggggcaggccccggcctcgcctcttcgcccatttttaaggctcgagttagaggccacctcctccgagaagccttcggtgacaccacc

SEQ ID NO: 3696 - DNA, 2300 bp, Homo sapien
ttggtgtttattctcagagctgaatgcggcacttgttctggtcagttcttcctggagtacaaggaccccctggtggcagggcagatatccttcctagggtaacatgagcctgactaccaccaagcctaggacactgggcttcctgtttcataagcacttccttgcaatgcccaaaggaaaaaaaaaaaggctgcctccctgactctaagaaatattcatttcagatggaattatctagctgattttcagctccctttagtcttaggatctagtattcagaacatgcttacattaccccagggcttctgatgtcttaatcccagctggaaggtactgagccagcacttgacctcccttcctgtcagcaaagtcctcttccatctggagaagggaggactcattaacgaccactggcaaagggctttgaagtggagcctgctgagatagaaccgcaccatcaaagcgctgagaagaacagagtcgtcaccctctccctctcattcctttctcccctgtgctcagggaacagatcagtcattgagcaagatgttaacaagctgggcagccctctgagtgagagaggcaccagccccagagggcaatttgggagttgacagtcgggtgggcaaggcaaagaggcatctgtctggcacctttagtttgaagtgcctgacaccatcatgtacagcctaaactcttttttattaaaatctctctttctttggggtctttttattcccaaggtggggattgaggggtcctctaagacgtctttttttttttttttgagacagagtctcgctctgtcacccaggccggagtgcagtggcatgatctcagctcactgcaaactccgcctcctgggttcacgccattctcctgcctcagcctcttgagtagctgcgactacaggcgcctgccaccacgctcggccaactttttatatttttagtagagacggggtttcaccgtgttagccaggacggtcttgatctcctgacctcgtgatctgcctgcctcggcctcccaaagtgctgggattacaggcatgagccaccgcgcccagccaagacatcttgaagatgttgcaagctgcagacgtttgacatttccttgtggctgtctatcatcacaccagcagttaccactacttacctgccacacactctgaatccaggagcagtcacatcagaaatgtcacacgtatgctgtgcttcatccaagtttgaccctgaaactgtgacagcaaagaacagctgtcatgggaaagaatctattagcacctacccatacaatcagagaaagttgggatggaaaaggcttcatcacaaccttttatcatcgttctgccttcatgcagaaccacatctgccactcaaatgggaggtggaccacctcttccagacgcttgtcagaaaataaaattagtgcagtttcctaaggtcccgcaaacaaattctctgttcaaacaacccccaaattttcggtgtctactcccaaatcaattcttgtgcaatttaagtccaagccccgtgactaggtatcacttagtctctctcagccttctttttagacaaaataatgctttattttccttaaagtagtgaattaatatatgtaaagtgctttgtctagggcctggcatagaatttaaaaaccaatgatagctattattattagcctttcttctcattgccactttaaagttgacaggcagtttttgttgttgttttggggaaaaagagacacagagaaggtaaagccatctctcaaagtcctccagatgatgtagattagaatcctgacctaaaggacctagagccaggcatctccgactgagaatggtgaggaatatctctctgatgcagaccactagcaggaaaacagctccccaagctcagccccctctcctacagcaaacgtgagggacatctccctgcaaaccagtcagggacttggggatggggggtgttggaggtgggattgaaacaagcttctgagagaggagcttaaagaagaacaggagctcaggggcgcacaggggaatcagatgtggtcctctcctcgccacttccctcttccatcagtatctccctcagtttttccagcctggcaagaacacagctcagaatgttattcagaagctttgggattcagtggagcagggcgggtacaccagtaggaatttggaaagacttatgtcagtatttaatttgggctagaaaaatgtcctccagtgcctccacgcagaagcctgtcctattcatgggcttggggaagacgggggggtgctcacagta

SEQ ID NO: 3697 - DNA, 2300 bp, Homo sapien
agtgtggcagtcctggaaactttcgaccttacagaaactctgagcacaggagggcctctagcattatgggaaacagtgtaagactatgcaaccctgaagcaacattgctaagagatgggatggggtaaggagaggcataagctccccatcaaaccctttcagcacccatggctctaagaagaggctgaagtgggcagggtgcacagcccctagaaagctgagtctgaaggggaaggtggctcttgtctgccaaggtgcccagtctgaaagaaggagaaacggagacagaggctcactgtgccagccctccagacagccaccttggtcctgcaacagcccagggctgtgcatggaaaaatgctctgttggcagtgggccgctccattcgtcttctctcctggccagagccaggaaccagccagcttgcccaggcagtgggcagttgggtcagcttctccaaaacactgtggctctttgtctgaggcctgaggctgcctgtggatgagccagggtgcctgctcctctgcaacctaggaactgatgggatgaagtgggcccaaggaaactgttttgaggggacagagaggtctgggatggatggtggtcaggaggtaactctgttgagtgtcatagttggggtctttcccatcagttcactggatctgatgatgttggcttttatactcctttctttcttctgtttacagttgccaaccccagtaggcccaacagcaatgtgagggctgtatgtgactcttccaggccaagaaagattctaaggtttctctgtccaagggtgacactcaggaagatgcccactgctcacaggagtatgtcatgcattggctataggtaaccagggtagggtacccaggccacccctagtctcttaccttccatacctttagtttccctctcagatgacatcagacccacatttcctcttcagtctgccctgttcctatctcattagcacaacaggttcaaaagcaacaggtttccagcaatgtggggacctagacacagagcctggtcatctaggtgtcatcgctgggagcaggtagcttgggaaaggagaggagaatgtcagggtcctacctcaagctgctttcccttgagcatacacaagagtttccaatctctagctattcttttggtgtccctcattcatttctcttggccccacatggctcttgcatgatgcccatggtggagcatgaggagtgctaacaccttactaggcaccatggaagagagaagcagattaactcagacttcacacactgagtacctgctttagaaggcaagtgccacacccagtgccagggtcctcagtctggaaaggatttgtaactgctgcatgaagaccctgtcccagccaagttgcatgtgtagccacaaactgctaaccagtgagtttcctcactcagcagactgttacagatgatggcactttggagggcaacctgagccttgtggtggctgcagagggaccacactcctccccaaacactcaagaccaaaaactcccagcctgcccaagagaccaaaagattttccagatgtagttcagctcttccccttcgatgcgtcaagcggcttctggaggtctcccatcctagggctttctccttggactcttagaaaaatactatttccccggaacatccaaactggatttgggttcagatctgaagagcatcccactaccatccttaccaccacaccacaaacacagggattgctgtgggcttttcagctttcccacaggactttcagagtgctagaggctcctaagaatctgcccctccaaaaaaaaaatgcagctgttcccattcaaagacattctgtctgtgactctatgaccaggggaaaatgcacttagctcaccccaaatagccatggtccggctggaccaagtgcagaaccagactgggaggaggcaccgaagaaatgagagcaaggctcctgctctcagatgtttgacatggaagtcagctctgcatagctcaaagcctaaggcttgcctactctgcctcactgcctctgtggagtctcactcatgctggcttgctctgttctctcccgcttcttgcagagacaaaatgcagtggacctccctcctgctgctggcagggctcttctccctctcccaggcccagtatgaagatgaccctcattggtggttccactacctccgcagccagcagtccacctactacgatccctatgacccttacccgtatgagacctacgagccttacccctatggggtggatgaagggccagcctacacctac

SEQ ID NO: 3698 - DNA, 2300 bp, Homo sapien
ccacctagtctatagtaggtggtcagaaaaggctcattcattaggtttcatctttttgaaatctcttcttaaattctgagaatgggtccctgacaaggccctttctgacagcccacacgctaagtcaaaagctcaaacctattggagaaaccaaaaggaccatctgcctcgacacttctaaattcttcaaattcaagtcatctcagggtttctcagttggtatttttttaagataaaggtgtttctttgatgttggcataagccagttaacatacttgaggagagaacatttaggacacatgagtttatctaagctattgagattctgtgtgacccacattataatggttctcaaatgttttcttccagcccctaaactccagattcagattcatatgtccaacggtctacgtgcatctccaggggaatgcctagcaggcatctctaacagcatatccaaaatgtaactttggttttctacccaactcagtcccacgtcacctttcccatgtcaagaaatgttaccaccacctacccagttgctcaaactaaaattctaggaatcatccttgacttttcctaactctgcaagacttgtcagttctctgtctaaaatataagatcttctcttccattgcaccagtccaatctgccattacctctccttgaggctgggttggagcctccctgcttccaccctggcctccccttctccatacagcagcccctcctacatgcttttaaaatgtaaattagatcccatgcaaatcagatcccatggcttctcctgcttgaaacatgtttttttttttaaacatttagaataggccggaccggatgacgcacgcctgtaatcccagcactttggggcactgaggtgggtggatcacctgtgtttaggagttcaagaccagcctgaccaatatgatgaaaccctgtctctactaaaaatacaaaaaattagctgggcgtggtggcgtgtgcctgtagtcccagctacccaggaggctgaggcaggagaacggcttgaacctgggaggcggaggttgcagaaagcagagattgtgccactgcactccagcctgggcgacacagcgagactccttttcgatctcctgacctcatgatcctcctgcctcggcctcccaaagtgctgggattacaggcatgagccaccacgcccagctgagactccttctcaaacaaacaaacaacaacaacaacaacaaaaacatttagaataaaaaccaaatcacttccatcgcccaaaagtcctttcatggtacagctcctgcccagctttctgatcttgtctttccctggctgaggaattctatggctgtgaaatgggtaggacacagtgaacctcagctatgtgccaggtcaggagcctcccacacatcacctgatacagtccttgctacaacccagcaaggtaagtgttattaactctgaatttgttgtgagcattaagtggaagtggatgatgctagtgcataagcagtgatcagcaaatgctggagtccctgcctttccttttgttccagtggtggaggtgggcaggacctgtagcctagaaaagtctacactgcttagggatagaactggaaccagagccggctgtcccttgtcattcatgctcccttatccactagcctgatgacctgtctatagggggagctgagaagcgcgagttctcgctctctggagggacatgtgggttgctgaaggagttaagatgtctcttaccaaaccctggccctccccatccctgcatctgcctttgtggctttaatgagaaatccaggcgcttcataagagactgtacaaataacttctagggcgccactaactcattcagcagaaagggacccagggctgccaatgtttcagggaagataagtgagtggaaaaaaggtggtttttatagcgtcaggcggaccgaaggatttgcgtggttgagcgtgaactccgcccctgcagcagagctgaaaaaaaccaggatccgggttcctcagccccttttcacaatatttgattaggaatttggggcgggaccctggtctggcacaggcacgcacactctcagtagactctttcactcctctctctcttcctctctcacacgttctccaacccaaggaggccagacagagggacgtggtcactctctgaaaagttcaacttgaggtaagtatagtcgttttacttcgggtttgtccctagcagttccttaaaagaaataaaggaaaagtggtaggggataggggagatggggaggcagggagggttcattcctc

SEQ ID NO: 3699 - DNA, 2300 bp, Homo sapien
ttattttttgagacagggtcttgctctgtgacccaggctggagggcactggcgtaatcatagctcattacagccttggtctcctggcctcaaataatcctctcacctcagtctcctaagtagctgggacttcaggtacacaccaccacacccagctaatttttaaattatttgtacaaacagggtccccccatatggcccaggctggtctcgaactcctgggctccattaatcttctgccttcgtctcccatagtgctgggattacagacatgagtctccgtgcccagccagtcttttttgccctctatcatctaccacccaccataccaagggaaacaagcaaatctggcgtctgatgttcccggcctgcagaagacgccatatcccatctggatgagaaatgaagcacatgagcagcctggcagagccacagttaatgtgaacctggagaggaaccgtgctgtcttccagcaagacctcaccagcagggcgtgaagccatgagatctggggtggaagggggttggagaaaggtctgggttttatttttccttctccttttcttaggctaattaccattcatcgcaatccctttcctaaaccctaatatcttcccagtttataaagtgctctcacatttacaatatttaatcttcccaaccctgtgaggtcaatattatccatattttgtaaatgaggaaactgaaggtcctcatgatcaagtgattcacctaagaccatagcttgtgggtggctgagcccagggctgcagaccctaattttaatgttctctcctctaccccatattgcggagggcaggcaggcagtcccctgtcatggggctctgcagctctccatggaaccaataatggagaagaaaattgcgttgcattttctaagtagtcagctgggatggcaggaatttatttattttatttacttatttattttttgagacagagtcacgctcttgttgcccaggctggagtgcagtggcacgatcttggctcactgcaagctttgcctcccaggttcaagcaattctcctgcctcagcctccctagtagctgggactacagatgcccgccaccacacccagctaatttttttgtatttttagtacagacagggtttcaccatgttggccaggttggcctcaaactcctgacctcaggtgatccgcctgcctctgcctcccacagtactgggattacaggcgtgagccactgtgcctggccatggcaggaaattttgatgggcatctacttacctgcaagtgtgttgtgctttcttaattgaggggcattgttagaggattgttagaggtagtggtgttacttgactgggtcttctggggtgttgatgtgcacaggggaaatttggatttcccatcactttgtgtgatgaccacacagcccctaaatctcacctaagtgtgatatggagaagctgaaagaagccactacattgtccacatgagctaggaacagtgactttaggtcttacattaaatcttaattctgccttaactttgctgtgcaactcaggccagacttctccctctctggttctcagaacagccctggcagccaaaccgaagttatctcctatgccagcctgagactccactccctttgcaacctcctggagaagataacttagggaaagactgtcactgctcagaggaagcatcccaaacccctcactggtttaggaatttaacactaccgagcaacggccccagaaggcaaggcgattgttaggaggaattaaacaggctagtgctggacccagccatccagtcctggcttacacagaggttgcttttcatgccttttcactctgttaatttggcttgttttccaaacatgggtcaaacaacccctctccagaagcggcagcagcagaaggaaatgttattaaaaatgagtctgttagtgggaatggtgtgtggatgaagtctttgggagttttggctgccaaataaagactttattgtcattcctcctttcccaagctccctccctctctcctcccctcccctccctccctcctccctcctctcctcccctccctccctatgatctgcccctccctccccccaagctaacctccccaccccaataggatctggtggaagaaaagtcaggcaaacacaagcacgcacacaccactgggagatcagatcttctagctggctctctgctgccacagctccgccgaagggagggggtggaagaggaggactaaactcagagctgagaggagaggcaggtgtgtgcaggtaagcccagttggga

SEQ ID NO: 3700 - DNA, 2300 bp, Homo sapien
gcctgagtctggatgtggctcctgcagggagtggggggagcaggtgtgtatgcattggggaggaacgatggtgggggtgtggcaaccaagcagggatggcaggagcgtatgtctctgggaaagcagggagggagagtgggagcaggcggcagggagagtgaatgaacactcgcatttgcatttctcccaggaataaatgtgtggggtgggagcggggagattgcctaggctggctgtgggggtggagggcctctggctgcaaagcccaggctgtggagagaagatggaggcatacagcccgccaaatgtgccatctgcctactggatgccctccaggatccagggctatctttccctccacccagcagagcctctgatggtgtcttttcccaggtggggggctgccaggggtacaagaacatgctcttctctggtgaccaggctcttgggctgagggaagccccctcttgcaccagctggagcccaggaacacagcaagccaaatgctgccctcgagggccaggctattagatctgcctcttcacctggtgtgccagggcagagatgagttctgccaagccatctgctctgagggcctggaaacacacggattcaggactcctggggaagaaggtggaaatggggagggtcatatgaactaaagaaaactctctgaccagggagtcaaaaaatctaggcattggccctggctctgtgtgacctagggcaagtcacgtcacctctttgggcctcactctcctcatctataccacaaggacttggactagatctttagggggcctcacagctggaattcagtatctggttggtggaaaggagtagggaacaaggagagtcactgagaaacctgggtgggcgccagggcacaggctggcagaagctggggaagactccttagccaccccacctctgccttcagcaaggacttgctcggcagcctgctcgaggcaccaaggaaaggggagtgtttccagatgaatgccgttggccctctgtatctgtgggttccacatccgtggattcaaccaaccacagattgaaaatattcagaaaaaaaaaaaattcacaacgttccaaaaaggaaaacttgaatttgctgtgtgccagtactatgtggaatccatgtgaatggagtgaggtgtaagcattgtgtttggtgttataggtaatctagagatgatttgaagtacacaggaggatgtgcgtaggttatgtgcaaattcaccattttatataaaagacctcagcatatgtggatttggtatccactggacgtgcagaaccaatcccccatggttactgagggacgactgtacatctctgagggtgcgggagaggatacttcccaggcccccgagaccctacacaatgtctactggtgtttatgatcctttctagggcccacctcccaatttccatttggtttcctcctagcagatttagagaatttcccgtatcctcatgatcatcatctgtgaacttgaagttggctttcaaatccgatctcatcccccatacaccttctctttgaactacctaggcctgcagctcctgtctctggtgattttattcaattatggtctctgtgctggcgctctaggtgagggtgaagtgcctcatttccacctatttttatctttggattctggctatgaagctgaagccttgtcactctctggctggagaaagaagctgcaaagacaagctctatctctccatatcccccgactccagccttctctgaggactcagaatctgagggatggggccccttccttgcaggggatggcactccctgttcctcaaagatgtggccttatcaggagagtggacaaggaaaagaaagaaggagctgacagagtaagaggagagagagcaggagctggaggtggggggtgaagcggaaggtggggggagaattctcttttgtcaaatacaggaatggggcaggggaccccctgaggaaagaggaggggaaacagctggacatcagaaggaatgagaagtctgattggtcgcaggcctggccaactccttgccctcccccgggcaccactgtctaacccaagccccagttcagacagcctccaccagagtccccacctttctggaagctgcagggctctccatccaggatccagaagcattgaaggggtaaggctcaaggttgaggcctctggccatcggtgcgcaaatgagggcaaagtgtttggctggggcaggggattgggaagggaaaatgaagagagtttaggcctctggccaaagaagttggacaa

SEQ ID NO: 3701 - DNA, 2300 bp, Homo sapien
atgtggccttatcaggagagtggacaaggaaaagaaagaaggagctgacagagtaagaggagagagagcaggagctggaggtggggggtgaagcggaaggtggggggagaattctcttttgtcaaatacaggaatggggcaggggaccccctgaggaaagaggaggggaaacagctggacatcagaaggaatgagaagtctgattggtcgcaggcctggccaactccttgccctcccccgggcaccactgtctaacccaagccccagttcagacagcctccaccagagtccccacctttctggaagctgcagggctctccatccaggatccagaagcattgaaggggtaaggctcaaggttgaggcctctggccatcggtgcgcaaatgagggcaaagtgtttggctggggcaggggattgggaagggaaaatgaagagagtttaggcctctggccaaagaagttggacaagacttttgggtgggcactaaactctcttagaaaaattttttttgagattatgtaattcgtttggggtgaggtatgggaggtaaggtgaagaaacacctcttgctactgctagaggcttgcccccttgcccagctaaaattaagaaagggtggggaggttaactgggcatggtaacacacgcctgtagtcccagctacttgggaggctgaggcaggaggactgcctgagcccaggaggttaaggcttcagtgagctgagatcatgccataacactccaggctgggcaacagagtgacaccgtcttaaaaatagaaaataaaataaaaattaaaagataaaaaaaattttaaaagaaagaaagagggagagtctactagaaacttgtgcagctagctttggggagggctgtgttaagcctacactgggtatgactgttgtatacacttatgcctggatacaaaaccacaccacatgcatttcctgacccgtctatacatatacgaactacatgaacatttgtactcacatgcatatcacatacatacgcaggcatctgtgtgcacacacacacaaatatacacaggtatctaaggaaatttccagatgcgtacacactcatgcaatcacacacaaagaactcttttatctgtaataatctgtttctaaaaagctgcatttagaagtatatttcataaactaacattcttttttacattgtatgtttcattgtaagtccatgtctcctaaagagactaggtgctcctaggaagggctgtgcctcattcattctgtacccacagagacaagtcctgtgcctggaactcaatagacacccataaatgtttgttgagcaaatgcatgaatggatgatctttataaaaaaccacaagagtcaactgggcgcggtggctcacacctgtaattccagcactttgggaagccagggtgggtggatcacctaaggtcaggagttcgacaccagcctggccaatatggtgaaaccccttctctactaaaaatacaaaaattagccaggcatggtgggtgcctgtaatcccagctactcaggaggctgaggcaggagattcgcttgaacccagaaggcggaggttgcagtgagccaagatcgcaccactgcactccagcccgggaaacaagaatgaaacttcgtctcaaaaaaacaaacaaacaaaaagaccccataagattatttgatgttgacattctctaaatcgagcttagtgactagcagtcatgttctgagcatggggttgtttaagagaggacatctgtgtgcatgcaccagtgtgtgcctcgtttgtaaacaaggggactcttgtgaatgtgtctgtgttgagatgtgtctgcacatgcctctgtgagtgaatatcagtgtttgggtgagcgtgtaaaaacactcaagtggggcggtggagggagggggctgctaggagataccccccaagacatagtcccagctggtagggaatttgtgcatgtgatgagagcactgagtctgcaagtgtgggggtgggaagtggagtaaatctgcgagccattcccacaacactctggagagcctgtccctcagatcgctgcccttcctcgtgcccacttgccaggaccagccgctgaagggattctcagtcccatctgactccccatgaggctcctggctttcctgagtctgctggccttggtgctgcaggagacagggacagcttctctcccaaggaaggagaggaagaggagagaggagcagatgcccagggaaggcgattcctttgaagttctgcctctgcggaatgatgtcctgaacccagacaact

SEQ ID NO: 3702 - DNA, 2300 bp, Homo sapien
gggaagagggagggaagggaagagggagggaatggaagagggagggaagagggagggaggaaggaaggaatctaacaaggtactaactgttcttgaaatgccctgggaaggtgggagtgactagaggagttgcaagaggctgaaatgagaacaaaggtcacctttagtgtcctgtaagtgccttgagtgtcagacagtcaatcactagacaaaaaagaccaaacaatccatagttcccatagagggtgaccctaaaatctccccttacccctgcaactttcttcggctgctggcagggagaggcacaagcacaggcaggggcttattttttttctcttgtttttaatttttttgtagagatggggtgggtcttgctatgttgcccaggctggtcttgaaatctggccccaagtgatcctccctcctcagcctcccaaagtactggaattacacggatgagccactgtgcctagccagggcttattttggattttgttttcagatgacagcaggcaatctccagcctcacattgatgaactctgagttctgagcccagcccaaccagtctaaaaacattactggccgggtgcgggggctcacgcctgtaatcccagcactttgggaggccgaggcgggcagatcatgaggtcaggagatcgagaccattctggctaacatggtgaaaccccgtctctactaaaaatacaaaaacaaaattagccgggcgtggtggcaggggcctgtagtcccagctactcgggaggctgaggcaggagaatggcgtgaaccccggaggcggagcttgcagtgagccgagatcacgccactgcactccagcctgggcaacagagcaagactccgtctcaaaaaaaaaaaaaaaaaccataaagaaaaaagaaatagcagggtaagaaaatgaagaggaaaaagaggacccaaatgagagaacattgggaagggtgctagttggacacgggggaaactggaccccgtttcacaaccctgtttctccatgcacatgtggctctgcttcttgggggcagagatgacagcaaagaaggacagggggtggtgtgagctgttgggttagaatgataggatcaaagaggccttttcccaaccctctgtttaaaaggttgggaagtagtggccagtcaccttcttcacagcatagctcatagctataacctgtgagacatatgtcaatgtgccttccataagcatataaacatgagtgtgtttgctgaggtaggtgtgggaatctgtcagtcaatgaagatatgttgtgtgaaccagctgatggtgcatgtttgtgcttgaaagccataaagttctatgcaaaatctatgggtggcactgttgcacaatgctagtgggtgtgtgggtatgggggtgtgattaactgtttacaggctgtgtataagtgtgcatggatgtctgagtgtgtgcaaattaaaacggaaatatgtgccggagtatgatacaaagtacaggaaagtactcgggctttggagtctgtctgacttggtcttgaatcgttggctctgtcattagccggatgtataaccttgggccagacactcaatcttcaattccctcaactaggaaatgaggttaataataagtacctttcaagattaaatgaggactagaaacgataccatatagacaaagcttttggtgtcatagcccacgcatagcaggactcaaaagtaagcagctattttcatgcactgtcagtatacctctggtgggtacagggacaagagggaacaaaatgtgacctgtatataaggtgtaggggaggacgggtgtgtgtgtgtgtgtgtgtgtgtgtgtgtgtgtgtgtgtgtgtgtgtttacaaaacaatttattctccttctccaaggaaccccctattcagacaggagcaggaaggtaggaggggacatacaagtgtccacagacacctcgggtttctgggtcctggatctaagtgagtaaggggttgagaggcccgtaggagctgcaggaagccagccgcctgcccaagcttccttttttttcccctccgcccagcaaccgttgaataccgccacccacatccactccccacctccaccctcacccctcctccacccctactcagctttctattcaacaagtgagagcaagggcggggaagaaagccgacaggggagaggattgcttccctttcttttcccattcccccttaagacgaaccaggaagtaaccgcaagaatcgggccaccttaacagtagagtaatggtttggcctcgcgccaagtcccacctctg

SEQ ID NO: 3703 - DNA, 2300 bp, Homo sapien
ccatactcagctcctaaaagtactaccccctcactgtaactaaatgattcaatgtatgtaaaatgccttatacataacaagtactagaaacgtttgttctgtgttctcttttccttctctttccttcccattcccatttctgattacagggaatttacataactttaaaagtgactattcggccaggcgcagtggctcacgcctgtaatcccagcactttgggaggccgaggcaggcagaacacgaggtcaggagttcgaaaccagcccgaccaacatggtgaaaccctgtctctactaaaaaaaaatacaaaaattagccaggcatggtggtgcgtgcctgtaatcccagctactcaggaggctgaggcaggagaatcgcttgaacccagaaggcagaggttgcagtgagctgagatcgcaccactgcactccagcctgggtgacagagtgagactccattacaaaaaaaaaaaagtgactattaataaattacccatagttcatcaaaagttggcactatacctaagtagggctgaattaaccagtgctccaacatggctttagccaccttcttttaatcagcacattcttgtataggaaacctcccccaaaccaccagcaccacacagtgagcactattctaaatactcggattgaaaaagtctctctgccttcaagaagttcaaaagagcaggtgattcacaaatgacttgcattgcattcacatatgggtaagaacagatgacatgggagaatcccactctctatatatctagaccttaactccatccacagcccacctaccttggaaagagggactcagctgggtgatgaatgaaggaaatgtttggccacacttggagcaatgtctttaggaataatacagagttgccaaaatacctgtcaatgattgtagaaacgtattgagtgggaagggagacaccgcgttcttactgtgcgcctccccaggtgtaatcgaatcctggaccggaaaggggaagcagtgccattcaagaataaagacagagatgatatggtacgcactgtcatcgagcccatggcctgtgatggactccggactatctgcatagcttaccgggacttcgatgacacagagccctcttgggacaatgagaatgagatcctcaccgaactgacctgtatcgcggtggtgggcattgaggaccctgtgcgcccagaggtgagagggtgggaagccacccaggagtctcaggaagtggggtactagttccctttctagttgtgaccccaggcaggtaacctaactgcctctcacttagagggatagaagtttctgtgcttcctgcttcacaggactgctgtggagtgccagtatgatcgaatgtggcattcctaggactaatgctgtctgagtgttgagaagcaaagggcttattgggctcattatttggtacttaagtgttgtcaggaggtcaatttagccaggacaccaactttgtctttagctccctcctttcaatcaacacattctttttgagtacctgctgtgtgctgataactattctagacactaggggattgaaaagtctctgcttctaagaagtttagacagatggactattaattctcaaggcccagaggcatgagagggtgtcatgcatgtgggaaattacaaagagctgatatggttggaacatgggccaggtgggtggagagtggcaaaagcttctgctagaaaagaaagcactggccaaatcgcaaaatgccattcatgccctgccgagaagtctcaattgtaagtgaaagagcaagtttttacacctcactcccaaagcaaatttccccttcaactcatggtacaatagggcaaattcaaatgtgactgccgtgggtaggacagaagtgaggtggcacccaacagtatcaaaatgaccagacctagcccatgctgcatggcaccacttctagggtgcctttctcctgtctgccacaaagggacagacaaacagggacagcttaccagggtcatcaccctcatctgcgcctttcccctttcttcactctccataggtgccagatgctattgccaaatgcaaacaagctggcattactgtcagaatggtgacaggtgacaacatcaacacagcccgggccattgccaccaaatgtggcattctgacacctggggatgacttcctgtgcttagaaggcaaagaattcaaccggctcatccgcaacgagaaaggcgaggtgggtcctggctagggggaaccaggacctcacctgacaaggaaaaggcgggttctagcataaggc

SEQ ID NO: 3704 - DNA, 2300 bp, Homo sapien
tgaaaccctgtctcagaaaaaaacaacatcaacaacacgagagcaatcggatttaaaacatacactccttggccaggtgcggtggctcatgctgtaatcccagcactttgggaggccaaggcgggcggatcacctgaggtcagtagttggagaccagcctgaccaacatggagaaaccccgtctctactaaaaatacaaaattagctgggtgtggcggtgcatgcctgtaatgccagctactcgggaggctgagacaggagaattgcttgaacccgggaggcggaggtttcggtgagccaagatcatgccattgcactccagcctgggcaacaagagcaaaactctatctcaaaaaaacaacaacaacaacaaaatacaccccatttcccaggaacgagtgttttttgttgttgctgttgttttttccccgctattatgatgaatcatttcagctacctactttttgttttagtttgtcagtttgattggattttgccccatggggaaggaaaggagagcaggatgaggggcacagccaaggcctggaatcctggcactcacctgcagtctgaggcaggtaacttgggcagctgcctctgaggtggtgatttccctgagatgtgggggcaggagagaattggacaaccagagggaagattggtctaactgcagcagattgggtagataagataagtgaggccctgaaatgatcacatgcaatggaaaagttctttaaaaaaaaaaaaaattttttttttttaattagcagtcatggttctgaggtttggttccatgtgccctttccgtgtactgccttccgaggtcctgattctcacagtcccttattggttccaatggcccaggaccccagtccttgccaccagcatgatggatcttgtgagtagtcctagttcctactcagacctgatccaaaggagaagtgggcagagacccaggttccagctccagcaccagctgcctctgagccatttctgcttcctaccaggtgaagctcctgggagggaaggggcccaggacctggaatgataaagctccctggaaagccagccatggccagtctgcagcccctggggactctgtgagagtctggatgcagacaggccaggggctgccacctcaggaaagctgaggacctcaatgtccactgggaagagatgggagggaggcatggttctaggagggtactgctggtctgcccttccattcatctgggaatccatttccttgtggaaagtgcaatcagagaggttcttcacatccttacaacagtcttagtggccccttctctttggactctcccaagatgcaaagagtgtttccggagattagtaggctcaagaagggaggggagttagcaataaattttgaacaatcttcaaacactttgggtagctcttaaggatgaacttgttcagcttctgagacaggtgtgtgacaagtaagactgtgactgatcttcagaagagccctgagaacaggagatcaccagcagccaggagctgtggaaggttgccttgggggagcaggggtcctgctaacccagcataacttctattcttaaggtagtacccagagcagaggttcccaaaacatgaaacacagatgagctccatcaaaatcacctgaaagctccatcaaattcacctggaaagcatcgatagccaaagcctgccccctctgcagcctccacccactgaatcagaagagggtcccggagatctgcatttcactctaaaaggcaacctccagtgctccttagacttgcttagaaaatactgtaaatctgaagacttatacaactctaagtgtctcagaaactcagggtgaagaatcacaagttctctactaccctgccccatttttaatcacactcatcacagaccacagagcacctggcaaacccaggaacggtgggttgaagatatgttttcttctagcagattaagagctgagcagagtttcctgtgccctgtgcttcattagcacattggtggtgtcgtttccggtgactgactctctgtttccattctggcaaagtggtttgctcttttcactctgctttgggtgttgaaggaagacgagcttctcacggagcctctcttgagcctcttggcagtttccccctctgtgcccctcacgtttccaccagaaacgtgaaggcagaggccacagattctccctgagccacctcacttggaagcaccatgtccggatgagatcgcacttcctgcagtgggcattagccacgtccaggtagaaccaaacctgttgcttttgt

SEQ ID NO: 3705 - DNA, 2300 bp, Homo sapien
cctcaggtgatccgcccacctccgcctcccaaagtgctgggattacagacatgagccaccatgccccgccttggtagttctatttttaatttttgaagaacctccatagtgttttccataatggctgtactacacttaaaactatttctatattaattcatttgtttattaattcattcatttaacaaatatttatcagggccctactaagtaccaagcactgtttaaggcactaggtgaacaggataaacaagtccataacctcctgaagattatagacaagtgggagagtcaaataatgaacagagctgagcgtggtggctcatgcctataatccaagcctttggtagaccaaggcaggaggatcaattgagcccaggagttcaaaaccagcctgagcaacacatggagaccctgtctcaaaattttttttttttaaataaaaaaatgataaacagataagcatatgaatgtataatatcaatcaatcgggctgggtgaggtggctcacgcctgtaatcccagcactttgggaggccaaggtgggcagatcacccaaagtcaggagttcgagaccagcctgacgaatatgatgaaaccccatctctactaaaaatacaaaaattagccaggcgtggtggtgcgtacctgtagtcccagctactcgggaggctgaggcagaagaatcacttggacccaggagggggaggttgtggtgagccaagatcatgccattgcgctccagcctgggaaacaaaagcgaaactccatctcaaaaaaaaagatatatcaatcagtcatcagtgctatgaagaaaaagtggagcacagcaaggggactgcaagtaatagggtgtggccatggaagacgtgtctgaggagatgacatttgacgtttcagaagagacctgaatgagagggactcagccatgcagacagctgggagaggaggattcctgggagagggagtggcaggtctgacacagaactgtgctctgcatgggcaagggatcctggcagtcaaagtcagagggaaagtggtaggaaataaggtcagaggtaagcagaggccagatcatatcgtgccgtcaagtcctctctgaggaaggactatagactttattctaagtcactcgaagccggggagagtgatgagtagaggagggatgtgatctgatttaccatttagaattatcacactggtttttgtgtgaagacaacgaatgttgaggccaagagttaaagcaaggagaccatccaggaaagttattgcaaaggttcctgtgaaatgcacagcagcttagacccgagtggtggcaacagaggagcaagaggtggttgggtttgggataaatgcccagggtaatgcagccagaatctgctggttgactggaagtggggcatgaaagaaaaagagctccaagaatggctccaagatttttgactaagccattagattatgggaaacacctggggagtagcaggtttatgtggggagaacaggagctctgttttggtttgagctgtctgttaggcaactagttagaaatgctcactagaaacttggatgggctgggcgcggtggctcacacctgtaatcccagcactttgggagactgaggcaggcggatcatttgatgccaggagttcaagaccagcctggccaacatggtgaaatcccatctctaataaaaatacaaaaaaaattagccgggcgtggtggcgtgtgtctatagtcccggctactcaggagactgaggcaggagaatcgcttgaacctgggaggcagaggttgcagtgagccaagatcatgccactgcactccagcctgagcgacacagcgagactctgtctcaaaaaaaaagaaagaaagaaagaaagaaagaaagaaagaaagaaagaaagaaggaaagaaagaaaagaaaagaaagaaagttgtataaataagcctaaaactcaaggggacaaaaaccttccctgttaaatgccctggtttctaataattgggggtagcacgtcagttcctgattcccgctgtaacttcagttggcagcttcctgttgcattaggcatagccatctggggttgtaatcatctggatgcatttcaacacccaagcaaaaccgagcagtgacgccagccctgccagggaattgcaaggtagcacagaacatgaattggttaaacttcacacaacagcagtgtgttgcttggagaccagctccacaaattggtgcgggggggggggcggcggggggtggggggtgttattcaagttcatgcaagctggactctgtcaca

SEQ ID NO: 3706 - DNA, 2300 bp, Homo sapien
aaggagaccatccaggaaagttattgcaaaggttcctgtgaaatgcacagcagcttagacccgagtggtggcaacagaggagcaagaggtggttgggtttgggataaatgcccagggtaatgcagccagaatctgctggttgactggaagtggggcatgaaagaaaaagagctccaagaatggctccaagatttttgactaagccattagattatgggaaacacctggggagtagcaggtttatgtggggagaacaggagctctgttttggtttgagctgtctgttaggcaactagttagaaatgctcactagaaacttggatgggctgggcgcggtggctcacacctgtaatcccagcactttgggagactgaggcaggcggatcatttgatgccaggagttcaagaccagcctggccaacatggtgaaatcccatctctaataaaaatacaaaaaaaattagccgggcgtggtggcgtgtgtctatagtcccggctactcaggagactgaggcaggagaatcgcttgaacctgggaggcagaggttgcagtgagccaagatcatgccactgcactccagcctgagcgacacagcgagactctgtctcaaaaaaaaagaaagaaagaaagaaagaaagaaagaaagaaagaaagaaagaaggaaagaaagaaaagaaaagaaagaaagttgtataaataagcctaaaactcaaggggacaaaaaccttccctgttaaatgccctggtttctaataattgggggtagcacgtcagttcctgattcccgctgtaacttcagttggcagcttcctgttgcattaggcatagccatctggggttgtaatcatctggatgcatttcaacacccaagcaaaaccgagcagtgacgccagccctgccagggaattgcaaggtagcacagaacatgaattggttaaacttcacacaacagcagtgtgttgcttggagaccagctccacaaattggtgcgggggggggggcggcggggggtggggggtgttattcaagttcatgcaagctggactctgtcacagagccactccttaactgtacgttggctaatcctctcctccaagcaagccaggaagcccacgagtagggaacaagaaggggcaaggccaaatgactttgactttgcaggtttggaggacagtgtggcagagtggaaagagcatggtctttggacgcaaacagacctagattcatattccttctctgctccttcctacctaggtgatctctgacatgttactttacctttctgagtctaaagctcaggttacttggccacaaagtgtgataggattgttaaagattaaataagtttcacaggccgggcacggtggctcacacctgtaattccagcactttgggaggccaaggcgggcagatgacaaggtcaagagattgagaccatcctggccaatgtggtgaaaccccgcctctattaaaaatacaaaaattagctgggcctcatggcacgctcctgtaatcccagctactctggaggctgaggcaggagaatggcttgaacccaggaggcggaggttgcagcgagctgagattgtgccactgcactccagcctgggcgacagagaaagactccatcaaaaagaaagaaagaaagaaagagagagagagagagagagaaaggaaggaaggaaggaaggaaggaaggaaggaaggaaggaaggaaggaaggaaggaagaaagaaagaaagaaagaaagaaagaaagaaagaaagaaagaaagaaagaaagaaagagattaataagtttcacatgtgaatccctggcacccggtaggcatttgaaaggaatagttcccttctcccctgtccaagtcccctctctccataaagtcaatattcagagataaccctctcttccaccacaccccacctgggctttccttcactcggctcccattccaaatcttcaggctctaactccaaaaggaaatgtctcctccagcctctccaccctcctacagctagcacatgtcattcgattgtttttctagaaataaagaccagatcaccaacatcttttccgggtttgcgggactcctcgccatcctcctggtcgttgcggttttctgcatcttgtggaattggaataaacggaagaagcgtgagtcccttgtttgtcctgagttgagacacagtaggattattaatctaggctggaatttaaagcccagcttatttaccagggataaactattggcctggggagtcctcagttcttacccgatacattggccattgcctcactc

SEQ ID NO: 3707 - DNA, 2300 bp, Homo sapien
gatgtacatcctttcctagcctgtcacctaggctggagtgcaatggcgtgatcttggctcactgcaacctccacctcccaggatcaagcaattctcttgcctcagcctccaagtagctgggattacagatgcgtgccactgtgctgggctaatttttgtatttttagtagaggcaggatttcaccatgttggccaggctagtctcgaactcctgaccttgtggttcgcccgccacaacctcccaaagtgctgggattagaggtgtgagccaccctgcccggccggcctgtcagtttaattggcagttgttggtttttttcttccacttagaggcttgtaaaataaaagtgtatcttacaatcaatgatactttaggtttactgaaatataactataaactctatatagcacactagtcaggccaggactgcatcttggagagtcctaggttggaaaacccttaagctatgtggagagccctctggtaaattttaaaaaccctaggtgtcgtggcacagacagaaattggttaccagtaagagtcacacagaccaaaaaaatgaagaccaaaacaaaagaaaaagaaaaagaaagaaaaaaagaaattggctaccaggaacttgcttattaggtctgttgacatggcaatgccagagcactgtcacgtaaggcagagattggagctaagattctaaagttgtggttcttactttgaaaggagataaaagcccagatatgaggaggctcaggacccctctgctctgataaattcctagtcttgggctgcctgggactcgcacatcaccaacccggcagctggaagaacaagcacacgaggaaataaaaggtgcctgaagtcccatctgctttatcatcaagtgtttcctttcttagtagcacaactatatcctttacccaagttaggtaaaatgttgccacctaattagagttctgctgagccactaccccagggggaccttgggctcctattatatgtgtaatatatttaagtatattttcagtgtaaaagccagaaaggatatatggtaagttaatgagagctatttctcaagaatgagattaatagagattttaactttctactctctatatttctgtattgtttctaaaaaaacttacgtgtattaagttttttactttttttttttttttttttttttgagatggagtcttactctgtcgccaggttggagtgcagtggtgcgatgtcagctcaatgcaacctctgcctcccagattcaagcgattctcctgcctcagcctctcgagtagttgggactacaggcgcgtgccaccacgcctagctaatttttgtatttttggtaaagatgaggtttcaccatgttgaccaggatggtctcgatctcttgaccttgtgatccgcctgccgaggcctcccaaagtgctggaattacagtcgtgagccaccgcaccggccacgtgtattacttttataaccgggggaaaaagtaaaaacattcaaaagggaaaataagggacaatgttaataatgaagcagggatgagactgctgattgcgacctccaactaactctcctgaattttgtcacgagcatgaattacttttccaatacacaaatttgctttaagaaatcaaagaaacacccccccaaagcccaatctcacttcttcaagtaaaaaataaactaacaaatcattctacattgcatgcttaggaaaagtacagtttatttctaaattaaatgtatacatggtttgggagatttactcattaagcaaacactttggtaagaataaattgagcgcttactgaatggcagtctcagttcctgcggccctcccgcttattacctcatttgatttaaaaacaaaaacaaaacgttatgaaagccggcttcgaggcattcctctgaagggaagggactccccgacccagcgcctcccccgtcacgtgaccctgtgacccggagcagccatcttaggcatcgcctcatagaggaactacatcttccagaatcctcgcgccctgcgtcgtgctggcacttttaccggccgggccttagagcggagcctgtagccaggcgccatctttgacgctggcagtcttggttttctgctagtgctgctgctgctgggaggacgacggacggcagcggccaagcaagaagaaagacgtggcagcaagcgggagtcggggatagtgtcatcggttcggtaaagtttctgttctctggtaactagacccgtttttttgattcccgggtggcttggggccggggaggtgggggagagggcgag

SEQ ID NO: 3708 - DNA, 2300 bp, Homo sapien
actcagttcttacttctgtaacatgaggacactggactatttgaattcagaacttagaaaattggaagggaccttaaagccctctaagaaagagttcgggaatgttctccattgctgtcagttttcctccaaaaataacctggcttggaagttattggtccagtgggaatttgattccccatagaaactggagaaaaggtaatgcaagtagagaggaacagctgtatttctgcttgagtaataaacccactaacagattctggtacgaattgtggagacataaagagaatgagtgtatgtactctaagtgtaccagtttcttcactctctcctggcagaagatgcaacacttttagtgattctgggattctgggatgtgttcctattaattctaatacagatgaagaagatgtggtagaggaaaagatggtagcagaaggagtgaataaagaggcaaaacagcctgctaaaaagaaaagaaagaagggtttgcgaattaaggggaaaaggcgtcgaaaaaaattgattcttgccaaaaagtttagtaaggatttgggatctgggaggcctgttgcagatgcccctgctttgttagcttccaatgaccctgagcaggatgaagaaagtctttttgagagcaatatagaaaaacagatctatctacctagtactagagccaagacctccattgtgtggcacttctttcatgttgacccccagtacacctggcgggccatttgtaacctctgtgagaaaagcgtcagcaggggtaaaccaggtagccatcttggtacatctactcttcaacgacatctgcaagcaaggcattcacctcattggaccagggccaacaagtttggagttgctagtggagaggaggactttaccttggatgtgtctttatctccctcttctggaagcaatggaagctttgaatatattcctactgatccattagatgataatagaatgggcaagaagcatgataaatcagcatctgatgccctaagggcagaaagagggagatttctcatcaaaagtaacattgtcaagcatgctttaattcctggaactagagccaagacatctgccgtttggaattttttttacactgatcctcagcacatctcaagagctgtgtgtaatatatgtaaaagaagtgtgagccggggtaggccagggtcccacttagggacttcaacacttcaacgacacctgcaagccacacatcctatccattgggctgttgccaacaaagacagtggtgctgttgcaaatggattagatgaagctgagactgagagaagtgatctcttgagtgataccttgcatggagaaaagtctacaggcagccaagatttaacagctgaggaccttagtgactctgattcagatgaacctatgttagaggttgaaaacagatctgaaagtcctattcccgttgcagagcaaggcactctgatgcgtgcgcaggagagagaaacaacatgttgtggaaatccagtctcaagtcacataagtcaggcaattatccaaatgattgtggaggatatgcatccttacaactatttctcaaccccagcctttcagaggttcatgcagattgtggcccctgattataggttgccatcagagacttactttttcactaaggctgtacctcagttatatgattgtgtcagagaaaaaattttcttaactttagagaatgttcaaagccaaaagatacacctgactgttgacatatggacccatgacccatccactgactattttattgtgactgtacactgggtttctttggaaactgcgtcttttctcaataatggcaggatccccgattttagaaagtgggcagtgctttgtgttacaggtttggctaaagactgtttgataaccaatattttacaagaattaaatgaccagattggtctgtggctttctccaaatttccttatccctagcttcattgtttctgacaattcctctaatgtggtacatgcaatcaaagatggtggttttacccatgtgccatgcttcctgcattgtttaaatatggtcattcaggactttttctgcgagcacaaaagcattgagaatatgttagtggctgccaggaaaacttgtcatcattttagtcattcggtcaaggcccgtcagatactgcaagagttccaaaatgatcaccaacttccatggaagaatttgaagcaggacgaaactggccattggatttctactttttatatgttaaaatggctcttggagcattgctactcagttcaccatagtcttggtag

SEQ ID NO: 3709 - DNA, 2300 bp, Homo sapien
ccgagagtaggactacaggcgcccgccaccacacccggctaattttttgtatttttagtagagatggggtttcaccatgttggccaggctggtctcgaacttctgaccttgtgatctgcctgcctcagcctttcaaagtgctgggattacaggtgtgagccaccgcgccctgccagaatcaagttttagtacaaagaaagcatttcccaagcaatgagtctcaaaggaaaaaaatagaagagcaatgtaattaaactttccttcaaagaaaggacagaaacgtatctgttacggtaaatttggaaagatcagtatttcatagtcccataatatgttttacatgatgtacttaaatgcaaatgtatgaagcagggatctgtggcaatccaaattcatccaccagaactccatccttgtttttgtgacagtgggaacaccttctggaattgcaggtgcagatgctggctcatctaaatagaactcttggtcagccacaagctcatcacccagtgtatccaactctgcttctaggttgtcttcatctaattctgggccgccataactgcgactcagtgcttcttggatttcatttgcatcttccatcatgtccactagctggtcttgtaaattctcaatctggtcagttttcacttgcttgtctaccttcatttcctttgctcccagtttcatagcatcaaccgtggtcttggtatccttcaatgactggatggtgtaattaacttgtttcatgttgaatgactcttgggtgcgattgtcctgctgctgctcatacatccgcttttgttttaaaactcgcaaggctttctgcgtaatcatattctttgtaggaccccctctcatcttgatctggtccttatacttcactagctcagcatccaatctagaaatcttgtcagtggattctgccctgctgtccaccatgccaatgcagtcattcaggctgggcagcggagccttaatttcactttcctgaagaatcagtttatcttgagtggctgtaaaggaacccatacacctttttttctttttcctttttttttttgagacggagtctcgctctgtcactaggctggagttcaagtggcataatcttggctcactgcagcctctgccttccgggttcaagcgattctcctgcctcagcctgctgagtagctgggattataggcatctgccatcatgcccggctaatttttgtattttttaatagagattaggtttcaccatgttggccaggctggtcttgagctcctggactcaagtgatcagcccacctaggcctcccaaagtgctgggattataggcatgagccaccgtgcccggcctaacacctttttttcttaatgcatatactagaacatctggaacagtgttgaaagatggtgaagactgttgaatgggtgtccttttttcgcttatcttgagttagtttacctctagtgttttaccatattgcatatgctgatgatttctggtgattatgtgcatttatgctaggaagtaccttacaatttaccaagtttttgttgagtggatattgcacctcaggttcctttttttttttttttttgctattttacttgataaagactacttcaagtacttttcttcactttttaaccattttttcttttttgaagtctttcaaaaattactacaggattttttttgttttttaccccttttactctagtaaatataatgagtttcctaatgttaacccattcctagtcccagaataaacctttttgattatgtagtgttatttattttatttcaatttttatttagagatggggtctcattgtgttgcccaggctggtctcaaactcctagcctcaagtcagtaatcctcccaaagctccgggattacaggcatgagctaccattcctgaccatgttactattttaatatacagctggttcaatttgctaatgctttatttaggattttttatctgtgtcataaatcagatgtccaaagcagctgttttaaacatttttaaaatttttatttatttatttagagacagtgtcttgctcttttgcccaggttggaatacagtgatgtgatcatagctcagtgcaacctcaaactcctgggctcaaggcttcctccagcgtcagccccctgagtagctgggattacaaatgtgactcactatgcctggctattggtaaaaatattatgactgttttttgggtttgtaatatatgtgacacaaagttttgttttgtcttactgttttttttttgttggttttttagagatagagtct

SEQ ID NO: 3710 - DNA, 2300 bp, Homo sapien
ctcctgacctcagatgacccacctgcctcggcctcccaaagtgctgggattacaagtgtgagccactgtgcccaaatggattttagccattagaaaaggaatttgcaatccctaatgatgcatgatgttgggcaagatttcaaatgcttattttccatctgtataccttctttggtgaggtacctgttcagatcttttgcctttttgaattggggagttgttttcttatttttgagtttcaagagttatatattttgtatatcagaccttatcagttatgttttgcaaatattttctcccagcctgtggctttttcattctttcttaagcttcttaacagagctttcacagagcagacctttttaattttaatgaactccaatttaatgtttttttgttttttgttttttgtttttttttggatggagttttgctcttgttgcctaggctggagtgcagtggtgtgatctcagctcactgcaacctccgcctcccaggttcaagcaattctcttgcctcagcctcctcagtagctgggatcacaggcattcaccaccatgcctggctaaattttaatggtttttattgaaaaccaatttattggttttcttttgtatttaagttgttatccatgttattttttgtgaaaagtataaagtctgtgtctaaaattatttttttatatgtggatatccatttgttccagtaacatatgttgaaaagactatccttttcccctttgtcaaaggtcatttgactatgcttgttatctgtattagttcctaggacttccataacaaagtatcacaaactgggtagctacagaagtttgttgtctcacaattctgaaggtgagatgtctaaaatgttttcagcagggccattctccctctgaagcctgtagaggaatgatccttacccattctggcttctggtgtttgttggcaatccttggcattccttggtttgtagatgcatcactccagccacatggtcatcttctccttgtgtgtcttctcatcacattccctctgtacatgtctgtctctttcattttaagctggcaacattttttgctaagatggttgcctgaatctagtcacacacctaatctccaacaaactgttgcccacccatacccttttctctacagagcatacattcttgttttttttttttgcaatatggatagagtgagaattttctaaattttcaagttcagattctttattcctttttgcttcatagttcttgcctcaatatgtctctctccttgcatttcactgtaagcagcaggaaaagcccaggctgttccttccacactttgcttagaaatctcctcagctaaaacccaagttcattgcttccaggttctgccttctgcccaacacaacccaattctaagttctctgccactttttaacaggaataacctttccggccaggcgctggctcacacctgtaatcccagcactttgggaggctgaggtgggaggatcatctgaggtcagaagttcaagaccagcctggccaacatggcgaaaccctgtctctactaaaaatacaaaaattagccatatgtggtggtgcaagcctgtaattccagctacttgggagactgaggcgggagaattgcttgaacctgggaggcagaggttgcagtgagccaagatggcaccattgcattccagcctgggtgacagagcaagactccatctcaaagaaaaaaaaaagaataacctttcctccagtttccaataacacgatcctaatttctgactgaaacctcaccataagtaccttaagtacctttaacgttcatatgctttagcagcagtttcttctaggccttttctatcaagtacctcaaaagtcttccagcctccacctatgacccaataacaaagctgcttacatatttttagatttttttgtttttggttttttacagcagcattcactttctggtatgaaactctaatggctgtatattgtcacattacatgaatataccgtaatttttttaaatcatttgtttatttttgagatagagtctcactctgttgtccaggatggagtgcagtgcatgatctcggctcactgcaacctccacctcccgggttcaagaagtttccctaccttaggctcctgagtagctgggactacaggtgtgtgccaccacacctgggtaatttttgtatttttagtagagatggggtttcgccatgttgtccaggctgttctcaaactcctgacctcaagtgatccaccagcttccacctcccaaagtgctgggatta

SEQ ID NO: 3711 - DNA, 2300 bp, Homo sapien
agcaagcctcctgcttctgcttctcaaaatgctgggattacaggcatgagctcgcgcacctggctgaaatttttttttttttttctttgagacagagtcttgctctgtcacccaggctggagtgcagtggcgcgatctcggctcactgcaacctctgcctcccagattcaagcaattctcctgcctcagcctcctgagtagatgggactacaggcgcctaccactacgcccagctaatttttgtatttttaatagagacggggtttcaccatattggccaggctggtctcaaactcctgaccttgtgatctgcctgcctcagcctcccaaagtgctgggatttacaggcatgagccactgtgcccagccctggctgaaattttttaaaggaaatagttatcccatgcatttgccagctttgtgtagtttatttatttatttattcttatttatttttttgagacggagtctcgctccgtcaccaaggctggagtgcagtggcatgatctcggctcactgcaacctctgcctcctgggttcaagtgattctcctgtctcagtctcccaagtagctgggattacaggcatgtgctaccatgcatggctaatttttgtatttttagtagagacaaggtttcaccatgttgcccaggctggtctcgaactcctgacctcagttgatccacctgcctcggcctcccaaaatgctgggattacaggcgtgagcctggccgctttgtgtagtttaaaaatcactttcaactcaacccctttctgaagtcgttattactattatccccattaaacagaagccctcagaaaagctaattttgattctgccatttgccctaatccgtgttcccttaggcaagtcctttcaaaagtctaaacttcagtttcctcctctataacatgtgtatgccaattaagtgaaatctctgccaggccacaagccatgacacaatggaaaggtaggtggactttggggtcaggcacacctacaaattccagctgctccacttagtagctgtgttatccagggaaggacatgttctgacactggctgacgcctaactgtgtgcacacatagacaattatttcattgaatctttaagcccctgagtaaagttaatctttactataatctccgttttggaaactaagccaagacatggcgaggctgagtaatttatccttggtcaccaactctaaaagagctggatttgcgcccagcatgtggatttcagcgtcttcctggtaaatcgccaccctcagttgccacctgaacagtaactctccacgaaatggatgagaattgaatccgtaactggagggaaccaggcgtctggctttggaatgcagaccgcctctggccgactgccagaggtgggaggcctgaagtttgggctccttgccgccctaccctttccaccacaacgctgctatcaagcctaaactccagcaaaataggctttaggaaaggcacgaaattaactcattttacacatagagatacacactgggacgattttggcttttcaagctaactcagaaaatggagatacaggccgggcgcggtggcttacgcctgtaatcccagcactttgggaggccgaggcgggcggatcatgaggtcaggagatcgagaccatcctggccaacatggtgaaaccccgtctctactaaaaacacaaaaaattagtcggacgtggtggcaggcgcctgtagtcccagctactcgggaggctgaggcaggagaatcgcttgaaccctggaggctgaggttgcagtgagctgaaatcgcgccactgcactccagcctgggcgacagagcgagacttcgcctcaaaaaaaaaaaaagaaaagaaattggagacaggacggcactcctcctaccacggccactatacaaccgaaggcacctcctcccgcctccctccaggtggcgctgtaggaccggcccaccttccacagcgcagacgcctcagtttggcctccctcggaggccatgcagcgaagaaacgtgacttcatggctagaggggcatttcccaggagccgcccatgccgccgcgtgaccttcacacttccgcttccggttctttattccggaagttgctctcagaggcagcgtgcgggtgtgctctttgtgaaattccaccatggcgtaccgtggccagggtcagaaagtgcagaaggttatggtgcagcccatcgtatcctacgcaggatgtcaggactaggaggttcgggtcagaatacggggtgcgaaggcgcaggctgagggcaggcctgggatag

SEQ ID NO: 3712 - DNA, 2300 bp, Homo sapien
aagtataaaaattagctggggatgatggcgggtgcctgtaatcccagtcactcaggaggctgaggcagaagagtcacttgaacctgggaggtggaggttgtagtgagctgggattgtgccattgtactccagcctgggtgagagagcgagactctgtctcaaaaaaaataaacaaataaaagaagagccagagactagagccctttctccctctctcctccatgatgtgaggacacagcaaggaggcacagcttctatctgcaagccaggaagtaggccctcaccagaaaccaaatctactggctccttcatcttggacttcccagcctccagagctgcgaggaataaatgtctgctgtttaaggcacctagtctatggtattatttttgacagttgtgcttcccccctcctaggagatttctacatgcggcatagcccgtctttcacagttaaagacattgctctggagctcaggcagtcctggtctcaaatcttggcccttgcctcttgctagctgtgtaacctagggtaatatagtttggctgtgtccccacccgaatctcaaactgtagttcccatagttctcacgtgtcatgggaaggacccaatgggaggtaattgaatcatggggatgggtttttcctgtgctgttctcatgatagtgaataaatctctcacaagatctgatggtttcctaaaggggagttcccctgcacatgctctgtcttgcctgccaccctataagatgtgcctttgtcctctttcaacttccaccatgattgtgaagcttccccagccatgtggaactgtgagtctattaaacttctttttctttataaattacccagtcttgggtattagcagcatgagaacagaataatacatagggcatattcacttctctgttcctactgcctcacctgaaaaataagagtggtcagagtgcccactacccagggttcctggaggaccaagtgagataattggtgtaaatccttggcacagatctgggacacagcaggtgagcagccgtgttggccatggttagtccgtcattctgaggacggcaccgctctgctttctagagcaaggtggcgtggcagtcccaggaaggacctgctgcctaagagaggtgggagacctggaatcccctcaccaggggaggctgtgtgtctccagacagtcctactaggggatttcaacccagcaagtgaaagtcacagccccccagaggagacccccattttgtcacagttaaactgcataactgatctaagggggagagtcagggaactcgggttctgactcggacttggcaagtcccttagctgtgctcgttcttacttctcttgtttatgaaatcgggctcatctctgccctgcctcatagaccaggacaaatgaggtcatgctgacaagcaacatgaaatcagtaaaaaatgttttaaaggactctacaaaaataaaacgaattattatcacaaatcataatagaattaatctacatggcccagggcagcccttggagatttatctgtgggtagtagaacttcttctctttcccgttctttttcagggaggttttttccagcaggcccctctgcaccttggggacagagtggagctgaatgtcccatgtaactcacagtcctgtcttccacctcccactcatccctccactgggaaatctcaatgtatttttagggaacctcattcctcccgcccctgtttcctttccagggcatgcctgggaaagttcttaggaactcgtgaaccgaggctgctgttaaggacgctgtctttggcctgggctttggtccctggcccaggtccccaggagggctgagatgccccgtggcagtgaagagaagagtgagaaaaatccatgtgacgtgtcagggaggggcagctgccagaggcccccaaggagggagaatgagtaaacagcccagccaccacccccagtccccctgttccacttgggtgcaggcggttcagcttcagaaagctgggggtggggcaggcgggtgacacatgctcctctgggagtgggataaataatcttcagctgcaacaataaagatcaattatgacctaatcactccgcccgattccaaaagcccagggggtgggcctcgcccttcctctccctccaggtttaattatctgaagagtcttggactttcatttcttgttttttgcttgtttgcttgtttgtttgcacctggttgatgtataagtcttggactttgggagacccaaaagagaaggaaggtctgcaaataattaagccaggggat

SEQ ID NO: 3713 - DNA, 2300 bp, Homo sapien
gggtaaccctttcatgatttctaggatggcttcatccatagttatccaaacatcaagcctttaatgttggcttctcccactctcttacacccacctgttttctcctttccattccccctactcccagcttagctcaggcctgcatcatttttaccctggccactgccattgtctggtcactggcctccttcctacctccagctagattgatgccatctgagaccttgcttagaatccttcagtggctccccatttccttccatcaacaagtattgatcaataagtatttatgaagggcctgctctttcccaatctctggctaggcacactggagagatacatccctgcccttgtggagcttacagtccagggcggagacagacaaatgaatggttaccatattatttacaaatggggtttttccagagcccacagatggggcacctggcccagatatggccatcaagaaaggcttcagggaaagttgatgtctaggctgagacctaaaagatgaataaaaggagttagccaggcaaagcagtgggcaaggatgagcccttagaaggccttcagagccttgctgaccatcacctttgaacacatgctggccacccacactgtgggcatagacttattagtaggtccatgattgtcactcctttaatctgccctacacccacaggtccttccaagacccatttcagatgccacctcccccaagaagttccagtccccatatcccagtgtctttggtggccctgtgcccatttgcctgccctatcttagccctctccacttcactgcaatggtatattcacccattcctttacaaaatcagaatccagaaagggcaggacaccgtctcatttgtcttcgtgtccccagcaccccggtaagccaggcataggtagacttttttttttttttttttttgagacagagtcttactctgtcacccaggctagagtgcagtggtgcgatctccactcactgcaacctctgcctcctgggttcaagcaattcttctgcctcagcctcttgagtagttggaattacaggcatgcaccaccacacccggctaatttttgtatttttagtagagaggggttttcaccatgttggccaggctggtctcgaactcccaacctcaggtgatctgctgccttggcctcccaaagtgctgggattacaggcgtgagccactgcgcccggtcatatgtagacatttgataaatacgttgaatgaaaggaaaccaactctccattctcccccaccctcccatataatgggacaggagaaaataagatttatttgagaggctgcaaatgacaggattagggagtggttggagatatcaggaatccgtctagctacaggtgagatcaggttttgttttttttgagacggagtctcgccctgtcgcccaggcaggagtgagtgcaatggcgcgatctcggcccactgcaacctcccactcccgggttcaagcgattctcctgcctcagcctcccgagtagggggttacaggcgcgccaccacgcccggctaattttttgtatttttagtagagacggggtttcaccgtgttagccaggattgtctccatctcctgacctcgtgatccgcccccgtcggcctcccaaagtgctgggattacaggcgtgagccaccgcgcccggcagagatcaggttcttaagggaagtccggagaaatggggtttttaaaaaacccgagtccaggctatctgtttggaggggttgggaggcttggagctggaccaataacttcttaggtcttgctttaaggagtgaagattctctgtagcgaccctcatacctgggcagtgggagcgggcagaatccttctttcttctcttctctacaccccctcactccacccccacccttccccgccgcccgtaaaccttagctttcccctttccaacagaggtttccagctgttgatgcctggatggacccggctgcagggaggaggaggaaactctctgtccctcccttcttctgcaagtccccaccctccctccctcctccccctgcgcgctctcggtctccctccctctttctcctctaggctgtccagtcgcctcgcagcagcgagccgcgagcgcccttctccagtcccggcttggaactgaactgtgtgagcacgggtcctggaacccgggcccagaaccggcgagcccaggtctgagcccagagctcagcggtcagcctcgtaggccctgactcggaatcgagccgaggcgctgaggttggagccggagagcgtgagagccga

SEQ ID NO: 3714 - DNA, 2300 bp, Homo sapien
gacaaaggagtggaggctgaagtcatcctgtgctgtgctagccaagctgcagcaatcgtctaagctgggtctgcctggaggaaggggtctttttctaattcatgtaccaagctgagttaccaaagtgccatatgggctaggagaggtctgctctgtgtatgtgagtcctgtttcctccaatgagacttggaactctctaaaagcaggctgtgccttaaccccttaagctgtgatattttggaggacaagagctatctagcctctaccctctaagtatagaaccacctctggccttccccataccctggccctggtccccatcctaaagagggtgctttgaacgttggtcaaatatagtcctgtattgcctaatgacagggataccttctgagaaatgcaccatcgggtgattttgtgtgatcatcagtgtacttacacaaacctagatgggatagcctactacacacctaggctgcatggtatagcctgttgctcctgagctacaaacctgtacagcatgttactatactgaatactgtgggtaactgtaacacaatgctaagtatttacgtatctaaacatgtctaaacatagaaaaggtacagtaaaaatatggtacctattaccgtaaatatacagtaatctcataggaccaccatctacatgcggtcagtcattgactgaaacaccgctacaaagcacatgactgtagaaatgcccctctcacctgcaaactcattgaaatggttgccaatgtcaaaagcttggtagttgtagccagcatattcatagtcaatgaaccgcacgtgacctatgaagtagaggagaatcgatgagagttggcccaggagatctggcaacagagcctggtcaagcttccacagacctctgggatgcacccactgagtgatgccggcctctgcagcaaccctgcccaatcccatcactgcagcagtcttccaagctacttccattcatccatccatccatccatccatccatccatccatccatccatctgcccttcccagctcccagtgtccctctcacacagctggatcttcaggctctcctcatctaaagacagctgtcctcagcatggctaaggatcaggaataaagctaagtattaatacgccctggggtgatgccctcatcagcaacaccaggatgtgttcgttctctctctttcttggcacagatttttgtttgtttgtttttgtcttttttttttttgagacagagtctcgctctgtcgcccaggctggagtacagtggcatgatctcggctcactgcaacctctgcctccctggttcaagcgattctcctgcctcagcctcctgagtagctaggattacaggcgcacaccaccatgcccagctaatttttgtatttttagtagagatggggtttcgccatgttggccaggctggtcttgaactcctgacctcatgatccacccgccttagcctcccaaagtgctgggattacaggcatgagccaccgcgcctggccagactttttttttttttttaaatagggtcttgctctgttgcccaggctggagtgtagtggctccatcatggctcactgcagcctccacctcccaggctcaagtgattctcctgcctcagcctcccgaggagctaggactatagcatgtaccaccataccaggaaaagttttgtgtattttttttgtagagacagggtctcaccacattgcctgggctggtcttgaattcctgggcttaagcaatccacatgccttggcctcccaaactgctgggattataggcatgagccactgagactggcccttggcacagacttttcaaagtgggaattttttatttcctttcccccttccctcctacaaattaacttaagacctaaatcaaggtctaacttttgcttgtccaagtgccagccggaagaacagctccgtgaagccagctaaccaaccaaccaaaaccctgctgctgccccagggccagagaagccatacctttgatgctgtcatagatgatattcttgcagagcaggtcattgtgacaaaacaccacaggggactccagctgggacagatgctccttcagccaggccagctcccgttccaacacctctaccttagggacatctgcagaaaggctgggcagtggcaaaaaaggtagccagtgaaaggagggctgatagacaggtgcttggcctcaagagccctgaatctgagcctcatcactccctctgtcttactgcagggggccttggaaaaatggccaatctcttagaccctcactttta

SEQ ID NO: 3715 - DNA, 2300 bp, Homo sapien
cacacactgctatcctccatcccatccacctgggactcgtcaggctgaagtctcttctcccactctcactccttgggctgtcttcagggcacatgtaacttggggaatgagaaattagcatccacctggagccactgaagccatccctcttcaccatagttgctcacctctcttttgacagaaagtcgtgaggcactgaatggcccaaccaggccctcagtacctctgggagccatctgcaagagtccctgtgtagcgccaagagccggagcctgggcttcaggaccctggactcccactgattctccatgttcccttgtcctgcatagctgtacttcctcactgcaaaggaagtgttggtggccagtgtcttttccagctccatcctggagctccaggaccttaggaaggcaggcacgacccccattatctccttcactatccaatatggtaggcacatgtggctatttacactaaaattaaaattaattaaaattgaataaaatcaaccgggcgcggtggctcacgcctgtaatcccagcactttgagaggccgaggagggtggatcacctgaggtcaggagttcaagaccagcctgaccaacatggaggaacccccgtctctactaaaaatacaaaattagctgggcgtggtggcacatgcctgtaatcccagctactcaggaggctgaagcaggagaatcgcttgaacccaggaggccgaggttgtggtgagcagagatcacaccattgcactccagcagcctgggcaacatgagcgaaattctgtctcaaataaaaaaatttttttaataaaatcaacgtggctagtggtcactgcattggacagtagatatagaacatttcaatcactgcagaagttctgctaggcagagctggattctggaccgcagtaagcataggagccttgcggttgagaggttccgggataggccaaaggggtaactgggaaaataggaaagggccccttctctgaaggcgcttttctgggtggggcagtgagagatagtgactagtgagatccctgaggcctcactacaacaaatagggctggcagccaacagagccctgctcagaaggtggcagagaatgaccaaaggagaatctggctagtagagggacttgccccctgagccggcctggcctctctccatgtctcctccccacagcaacctgccccgggacaccttgtcaccccttccccttccttcccacccccagccatcaccatgccttgctttggcccttagctgcgccaggcatttggctgtcctccccaggacgcgcgagggtctgtccacttcacaccccgaatgccaagcaaagcactgggctcgggtacaccgctggcctgctacctggctccattcacacgctcaggatgggagggaggctttaactcagtctggccccaagtcctgcccaggatgtgcccaaacactccaacgccctggctgttcagtggcctgccaggggacagcgcagtctgctggactggcacactctcaccccaacgctatcacccaatgtcccctcttcatgcagtgtgtttctgtcggggatgggaggttgcctgggtgtgggggggggctctctgcagggaaggacctttgagatgcagcaggggccgcccctgcagagccatttcccggggtccggggactgggggcacggagcaggggcacagaggggcgagcccaagctgacgtcgtgggagcagcggatctctctattccaggatgaggtgggggcgcaggacgagccctcccccgcctccaccccaggctaccgggagagagctggagtctcgcggcctcggaggccgggaagccagccccggcggggacccgggcggggcggagccagcggaggccccacccccggcgtcaccggcccccaggggggcgtcgcccccaccccgcgctccaggtagcggcggcctcagctgccggcggtggctggctgagctccccagcggcccgcgggccggggcgggggcgggccgggggcgttcccgcgggccaccgcccgtgatgtcacaatcgcggcgggccgcggcgctccggggtcggcggtgggcggcgggccgcgagccggcgatcgaagcgggcagctcgcgcctgagtcatggacttcccctggcccctcctctaccactcccactccctcgccggacccccccgccggggctagcgtctgccgcggctccgagggggtggggctgctgggaatggctgtgcccccttcggcccctcagccgcgcgcgtcctttcacctga

SEQ ID NO: 3716 - DNA, 2300 bp, Homo sapien
ctggaaaacaaaacataaagaattagcaacatttcaaacttaatttaggattagattttgaggacatttgtcaaaatgttaaagcctcaaaccatttgatcaaaacagaaccgccggtctttgtaaaataataattattcatttcacaaaagtgataattaaaagactttaatagcaatacagaaagttacatgaatataaagacttaacctttctaaagctcagttttcctaagtaatcaaaaacctgataaagataacaagaatgaggaattatcttgagaaaatgtaaaatctttccttttattttttgagacagggtctcactctgtcatccaggctaaagtgcagtggcacaatcatagctcactacagccttgaactcctggactcaagtgatcctcccgcctcagcctccccagtagctaagactacaggcacgcaccaccacacccagctaatttttttcagagatggggtcttgctatattgccctggctggtcttgaacgagcttcaagtgagcgtgagcctcctacctcatcctcccaaagcactaggattacaggcatgagccactgtttcccagcctaaaataattgtttcttaggccagctaccaaaaacgcaaagaaaaactttctgtagtgtgattgcttcttcttatgggaagcccatttagataacctgtaagtcaaacctgatgaaaacaatacttgaatgtaatcagacacagaaagactgttcaaggctatgagtagctgagtccaagctcgtatcacttgccacacaacagccaataagtctagagacaaggtattgtggcaaggaaagctaccttattcagagaaccagaaaaccaagaagatggtggaccagcatcataaagaaccatctgaagtcagcatgaacgttaggctcttctttatgttaagggaaggggaagaagaaggggattgggatcaagaggtgactgatgaccacagacacctgggtgccagcaagggtctgaggacgttgtaaaacttcttttttctaggtcaggtcacaatgttcctatacatctttaacataacattgttatttgtctgtatatttccttatctccttgggggttagtttggggaaaggaactgttaccattttttttaaagttgaactgcaagctaaactcctataattagctggtctatgtacagagctaagcagaagcttttagcctaaaggataatacccctgggggtcagaggcaaaatggagtcagtcatgctaagtctccctccactctctttcttttttgagatggaatttcactcttattgcccaggccggagtgcagtggcatgatctcagctcactgcaacctccgcctcctgggttcaagcaattctcttgcctcagcctcctgagtagctgagattacaggtgtccatcaccacacccagctaatttttgtagtttagtggagatggggtttcaccattgttggtcaggctggtctggaactcctgacctcaggtgatctacccaccttggcctcccaaagtgctgggacaggtgtgagccaccatgcctggcccctctactcttataattaaaccagctgttgcttttcctgccaagaaaccagtcatgaagattcacccatgttctagatgggaaaactgggctgtagcctgggagaggccagtcagggacaaagccaaagttaatatagagaatggagcttccagggtataggggttgggtctgggctagggagctggaaacctaggttttacgcttgtcccagttttgatgttagccctgagcagtgctgtttctcatcagcctctgcctgctccaggggtcacagggccaagccagatagagggctgctagcgtcactggacacaagattgctttcccacagctgtccttcctccagcccctctgctccccatccggaaacctgggtacccttcacccacctagctctgtcccgcagtgagatttattgctgactgccctgccatctaccccagggtaataaatcagggcagagcagaattgcaatcaccccatgcatggagtgtataaaaggggaagggctaagggagccacagaacctcagtggatctcagagagagccccagactgagggaagcatggatggatggagaaggatgcctcgctggggactgctgctgctgctctggggctcctgtacctttggtctcccgacagacaccaccacctttaaacggtaattggtaactcaggcagagaaggggtgggaggggtgcagggttcccaccttccca

SEQ ID NO: 3717 - DNA, 2300 bp, Homo sapien
tcttgttccccaggctggagtgcaatggcgcagtcttggctcactgcaacctccacctcccgggttcaagggattctcctgcctcagccttcagagtagctgggattacaggtgcctgccaccacgcccagctaatttttgtatttttagtagagacggggtttccccatgttggccaggctggtcttgaactccagacgtcaggtgattcgcccccctcggcctcccaaagtgctgggattacaggcgtgagccactgcacctggcccatcagtcccttcttcacctgtctgcaaaaacatctaattacattcattcacttcttaatgggtcaacagcttcccatggctcttagggtaaacacagaacttcctaacatgggatgcaagaacctttatggtttgacactcagcgcatctatgtactgggttctgggccacacagcctaaacttactgtctgactctggcccttattgccagtgggaccttgggcaagttaccttttgaatcctcttgggcctcaatgtcctcatctgtaaaatagtgatataatgctacaacctcatatggttattgtgagaattaagtgcattaaacacctagagtggtatcttgcacatagtaagtattcagtaagtgttagctctttcagctcctgcctctggccacatgtctcaccccgctctctctcatctctctgttcttgatatgttggctttttttgtttttattgacatcatcctctctccacagggccttcgcacgttctgttcctgctgggactctatttctttgtcttcagctattcattgccaatgcagccttcagatcacaatgcgagtataattttgggtgggagggaagcttcctggagttccctgactggcactagtcatcagcgctattttatatttatgcatgatgataataatctatctcttccacaagacggtgggatccataaacaagagcagaaactgtgtttatttttgtgaactttgtaactccagcatctagcagagtgcctcacattataataaaggctccatgaatatttgctagtaaatgaaagaggactgaaagagcaatttaggggtgcttcataaatgttcatttattctgacaagatacccctaccatgaaggatctaaaagtattcccctgtccccaaataattcccccactcccaaccacagttcctgaaaaatcaccactagggtccatcgtttggaaagggccttatcatctctgaggtcaaaacacattaattagccaaaacattagccacagagatgagctcctctcattgtctgtactgcccacagctggtgtggagctggtgtagagggcagtaccctggaggcacagaatattagaatattagggtatcagagcatgaagacacccttggtgccatccagccatctgcttcactgtacagatttggaaactgaggtccaaagaggagaaaggagggatccaacatcacatagcaaatttatggtagaatgaagactaggatccaagtccctgaccaccaacccagggctctttgcactgcccattgcagttcactagttcatccacttaataaatattaagcaccactgtgggcaaaaatcatattcatacatacataaagaactctgctgcaaaagcagctaagttggtgctgtcatagaagggcttgtagccatgctgtggaagcctacagcagaaagcagtcaattccaggctgagtcagggcctgcttcatggaggagggggtaatatttgaagtgggccctaaaaaataatcagggaaaagccaagataggcatcttagcctgaataaatagcactcatcctgggatttagggaccagatgtctgtctggggagctgtacttgactgcttgtaaagctacagggaaaaggaaatgaggcagagaaccagggcctaaaagggagttagagccaagcagaaagaggagaataagttggaagatcagctgccctacctctatttagcagaagccaaaaccctgaagactgcccttctctcccacccttactaggtcaacagaggatagacaaccccctcctcccccagctccctgcttccagaggattatgtaaccaaatccaagcacacaccactcaccacacaacagcaagtaagctgagaggtaaggtgttggggcaaagaaagcgaccctattcagaaaaccaagaagatggtggactagcgtcataaagaaccatctgaagtcagcatgacttttaggttactttttacatttaggggagggggaagagga

SEQ ID NO: 3718 - DNA, 2300 bp, Homo sapien
tgcgcctggcacagctcctggctctcaaggccagctctgtaataactagatattgcatctgctctctaccctttgtgtggagtaatgattcttggctcccacagctgttccggagacttcaaggcactagctcgatggtctgaaaaacagagatgagctccttgaacttggatcattggttgagggggctagagggagaatgggaaccaccccctcagtcccctgcactgactcactccccgacatatccggacctccccaagtccagaaggaaggaatggagctgagcaactgacgtcaaatccccaagtcgactcaagaggctgccaggaagcagagatgcagaccccaaggagactgggctggggctggtatcacaccctcactctatatttatgggaggaaaagtgaagattaaattcccaagttgtgcgtgtgtctaaggctcagagttggcgtctttggccgggcgcggtggctcacacctataatcccagcactttgggaggctgaggtgggcagatcacctgaggtcagaacttcgagaccagcctggccaacatggtgaaaccccgtctctactaaaaatacaaaaattagcggggcgtggtggcaggtgcctgtagttccagctactcaaaaggctgaggcaggaggatcgcttgaacccaggaggcggaggttgcagtgagctgagatcgcaccactggattccagcctgggtgacaaagccagactccgtctcaaaaaaaaaaaagttagcgtcttcagcccattaagaccacctcctgcttcaggacaggccaacgtacacatcatccccacagcgaagttttggtctatgagggtcagtgctgtcctcataggctatcatttctgtcctggtgtttaacagccctaatgggtgtgataataatatgtttgcaatcccctgttaacagtaagcatcagacaagtgaggggtgctaacctgcagactgccggcatgcttctccagcattaggggacgaccaggttgagcttgtgctgggagagcgtcctgtctgagggtagagacatagcccctgccttcagagactcccagcctgatagaagaaacagtctctgccctggagagccccttgtccaagggtatagagagttattgcaggctcaagaaagagacaaaagtcacttgcgatgcatgcagttagcaaatatctattgagggccctctctgtatgtgcccagcaatggagtgggtgccaagggtacagggggaagggggcctgtccctgtcctcaaagtgctgtacctgagcagtcacaaaatagtatggtggtgggtgccacgagacaagaaggtggggcccccaagcaggctgtctggatgtgctgccacctggaagtcccctctctgcacccctggcacttcccaggtgcatccaccttctgcagctcccatttcgtcctccttgctcatagctggttgcttacctaaggtctctgaccagtccatagcctattcacctcaaaaccctgcgctgaggaagcgctcagtgaccgaggaaagaagggaagcaggaaggaaggaaaaaggagagaatctctgccaccaccaccctgtgccagtcacagggcgcagtctaggagccgcctggagacccacgctgacctggctttccctcagagctgggagcatgggatgtgaggagcccctgggtcagcctgtgcccttctcctcccctcttcctgtcgttttctacgtctaattcagactaggtgtgtctgtggctcttcggagaggaaacaagacatttcacactgacacttctccccaccctcctcagatagcccatttccacgttgtttgggggcaggatgggtcctctgggtgggaagagggtgtggaggatggaaagagccggtaagaaggagaaagtcccgcctcggagggctcgggtggggcaggaggagaggctgcctccagtcacagagcccggaggcagaggcctcccaaggtgccatgctcttcaggagggtctgaggaggagggaggggcggcagagtgggcctgtgcttggagacgtcaccccgggctttataaaagggatgtgatcagggagctggggagaactcttgagaccgggagcccagctgcccaccctctggacattcacccagccaggtggtctcgtcacctcagaggctccgccagactcctgcccaggccaggactgaggcaaggtaggcacactgcagtgtccacccctgggaagggggtctgccctgacctggggatgctctggaggggagcaggga

SEQ ID NO: 3719 - DNA, 2300 bp, Homo sapien
gagatggttattatggagcagaagcttaaaaggaataaagacattgtcttaaaattattgaataatctactccatgcattgtctacacaaaggattataagatttcagctactatgtatttgattgaaaacagttctgatcagtaggtgatactgaataaacgaagaaattgactgaaaatatttaacagaggatatgtgagagaagcaaacatggaatcagagacacttgagatgcagaagatctcactgagtttccttaataaaagtttttagggtttatttcatattattgccatcctttatatgtttagtttttttggagcccaaggatgctatgttgtcataattatgtgtggaaatgttgtgtcctgtctttacaacactgtcccgggtgtccacatgcaattgctctaaaccacttttatcttcttttcttttcccaatccatcctctatcccccattgcccattggaaatatgtgatctctaaggccttttaagatcccagagactgaattttacctcaacgctgatatgtttcaagacagaggttgatgtgtctgtggtactctatggcgaccccattccatgggagctattttgacaatacacacatacctaagactgagttcctttgcatgcacatcatacttctatattatctccaccttgtgctctctaatttgccttgctatgttatccctatttcaattaagatgctttccctctcatcatatgcaagtacgtctggtctgttattccttatctaacagtttttattctatgttcacttcctgctactctttcattttcttgcatgtgtgtgatttttgtttttgcatagaatggctcatcttctatttctcttaaattcaaacatatattatgtgtgggtgcaagcaatctgcctatttcatttatgtcttctggtaagtcttgcctgaacatttatatattgaaagacatcatgttttattataatttatctttttgtttctttttaaaaaattatgttagctttccttggttttgttgttgttgtttggtttgtttttttttgagacaggatctcgctctgctacccaggctggagtgcatggcttgatcacagctcatcgcagcctcgaccttctgggctcaagcaatcctcctaccttagcctccccagtagctgggactacaggcaggtaccaccacatccggctaattttttatttttattattgtagagacaaggtctcactatgttgctcaggctggtctcaaactcctgggctcaagcaatcctcctgccttggcctcccaaaatgctgggattacagacataatgcattttgtatgccaggcctatttgcatttttaaatgatgtatataggtagtctttgaaattcatttcttcatttctggacacagaagacattgcaaagtggatgttggctctcctggcatcaatgccacgtcagaaccactgctctgcgatgggaaaaaaggatgttaggaactaactgcctctctttttgcaggcccaaaggacgaatccatgtctacacagctggtgggtagactagaaccaggcctcctaaattgtgcagtcctgccccaaccccaaattcagggctttgtcttccatagctcaacatcacagtcagtccaaagcttggacgccgcttggggaaaggaggtcgaagaccttcacgtctaacttcccccatggcgcttttgccattgatttaacccgatctggctctgccattaggtcaacaacaggctttgtgctcagtcgctcatcgcctcccagcgcctagcatgtgcaatagcagagagcaaaaagcttgactttcaagatgaatttagtacattcccaaagggatgcgcagatgccaactcttcccacactatcaaaccaagcaagaaacttgagcaccccctagattccaatgcttccacatacaatctaagtttcgcggagcagacgagagccgcagaacaccgcgaggtgcgaggaaagggtcaggtgggcggtgccttccccgggcaggcgcggcaggtggaggggcggggcattgccctaccggaaaacgggaggagggagctggcgagtagaagcacctgcgtggtgtgcgggggtggagcgggggctggagggagagttaatgatttgccacaggctcatttcgcaacttaaccaagggtcagcttcccgtgaccatgtaccagctgcgtcctctgggccacgctccacttgcccgcttccacccggaaagccccccaggctgagtgcggcatgatctccatcac

SEQ ID NO: 3720 - DNA, 2300 bp, Homo sapien
cgtgggactcgtctgcggcccttgccctctgcctgccagagaggaaacccgcccagcaggcccatctgttggtcgcctgccttttccagctgcctgaggattgtgggggcttgggctggggtctctgtccccctccccggcctccctctgggatgctgtaatctcttgcctccactcctttcctccactggctccgcagggtcagagacccccaagagcccctcatcttggctgactgaaagcagactctccccctgcctgcacctggcagccttgccaagtcctggagagccagggcaggtgagttgggcttgatcggtcctgcctggcactgggccctcatccacaacttgtctgccccttcagcagagcagctttcctatagccaatgcagggctggcctgacatctcagctgggcaggggaacagtgggaggtgaccaagagtccccctccccaagagtgctgctgagctgcgcctgctgccctaaccccagattcctggctccagcctggcctgccctggggtgggaaagacagtcccttcagtagctctctaggtccctgtcttcctccaatgctgtggtgtgtgtgagtggggtgtggagccacagccttcacaccaaccagccaggttcctcccaggccctgggagggaagtctgtgctcctgttccttccgttgcacattcctttacagataagggcttcagttggtaaaaatgatatatgtactcagatcacactaagagagacccacttgtattggagtcaagaggcttaattttttgatcaagttgttctaataataaacaaaaaatgcaatcaccaggtgagtggggccttgcagacaccctttctctagctcctgcttcttgacatatttctctattcagaagtgactccagaagctcatctggttcagtccccagtttccaggtttaaggggcagatgggactgagaccagcgagcctgcctggaggttgaggtgggaatcttttggttttttccatctttctgatcctgtttatgaaatcagtgtttttattacacttgcccattgtcacagagaatccgtggatagaggaaaactgagagagatgtggataaagggaaactgaggcagaaagcaatctttgtctaagcagaaacagagctacgaccctattgtctgaagtccttccttctgcctctgatcctgaataatacagaacccaggtaccccgtagcttggctagcatccttgctcagggttatcaagaccgatttgggcaggagctagagaaagggtttctgcaaggccccactcacctgataattgcattttttgtttattattagaacaacttgattaaaaaattaagcctctcgactccaatacaagtgggtctgtcttagtgtgatctgagtacctatatcatttttaccaactgaagcccttatctgtaaaggaatgtgcaacggaaggaacaggagcacagacttccctcccagggcctgggaggagcctggctggttggtgtgggggcagtggctccacaacccactcacaccccactcatcctggcatctcatagtggcccccaaccctctccaaatgttatttctctaaattcaccatattggggggggggcgggggatggggaggccccagggccccagccaagccctcttgacacctagagacgtgcccctctctggagtagacagccacagaggtgaaaggtgatcaccaggctggctgggtgaggccccacacatgattctaagaccctgggcagtttctggctccctgcagtctcttgtgggggactctaaaaatgcagcttacccagacggtggccctgctcccctttggggggcagccttctcctggtggtggaaggcccaggaggctgtgctgagccaccccatcctctcccgggcaggcaggctgcgtggatggttagcagcttgtcgctggtgtggatggagttaaaccttttcggggactatttactcctgatcctaagtgacagcttggggagggagagtcacgtggccctgaaatccccgggggagccgatggagcatgcccagctgcctctgcctgggaaagatgctggatcctgcagtaaccacaacagcatcctctccctgcgccagggacctgccagccggagagatgactgattagatcagattagatccggagccccgctctgcagaagggggccccaggggcgggggaggaggaccccagctggcctgagctggggggaggggtgccttggggctcgcagagttagagctttccagcg

SEQ ID NO: 3721 - DNA, 2300 bp, Homo sapien
tgtaatcccagcactttgggaggctgaggcgggcagatcacaaggtcaggaaattgagaccatcctggctaacatggtgaaactccgtctctactaaaaatacaaaaattagccgggcgtggtggcatgtgcctgtagtcctagctactagggaggctgaggcaggataatagtttgaacccaggaaggcggaggttgcagtgagcagagatcacaccactgcactatatcctgggcaacagagcgagactcgtctcaaaaaagaaaaaaagaagtggttgttccttgaacaggcccagtaaggcaggaggagctgctggtctcctcccagctccctaaagatttttctgctgtccctagtgctcataactgccaccctccctctgtaattggtacttgacttcaggggtatctattacagagttttagcagaaataaagaaatgaactaagaccaaactcacaagagataatcaaatacagcaattaaaattaccagccattttttttttcaaaggatagtggtccatgtttcctttttggctgttgtattctgtggttctggttgctaaggaagtattaataaatatgaattgaatatgttgcctgcttggaagcataaaagagagtaaatagttctggggactgagctgcttctctgtgagtttagtttgccccacaccagacatgtatgtacgcagcactgcccaacttttacataagatctcaggttgatggtctacatagtactgaacaataggagaaccctgaaatatctgtcaggctgggcgcagtggctcacgcctgtaaccccagcactttaggaggccgaggcgggcagatcacttgagctgagtttgaaaccaacctgggcaacacgacgaaaccctgtctctataaaaatatgcaaaaattggccgagcacggtggctcacgcctgtaatcccagcactttgggaggctgaggcgggcggatcacaaggtcaggagatcgagaccatcctagccaacatggtgaaaccctgtctctactaaaaatacaaaaaattaactgggcgtggtggcacacgcctgtagtaccagctactagggaggctggggcaggagaatcgcttgaacccgggaggcggaggttgcagtgagccgagattgcgccactgcactccagcctggcgacagagtgggaatccgtctcaaaaaaaaaaaaaatttagctgggcgtggtggtgcgagcctgtagtcccagctcctcgggaggctgaggtgggaggctcactggagcccaggaggttgaggctgcagtgagccgagatcgcactactgcactccagcctgggcgacagagctagaccctgtctcaaataaataaataataaaaatctaagactacgataaccctacagttggcccgcggggcattcaaccttccatggattgaaaatattcgggaaaaataaagataataaaacataatacaaataaatacagtataacaactagttccatagcacttgcattgtattaggtattatacttaatctaggggatggtttaaatatctgggaaggtgtatgcaggttatatgcaaacactataccattttacataagggacttgaccgtctgcggattctggtgtctacggggtcctggaactaatccccatttcatgagaggggatgactgtacacacgtcagtgtgtattaggccatcaaaacgcctccgggaaattctcgggttattttgaaaacccctcccctccccaagacctttaacctagagggctgttggggcggtctcctaggagaccacacagaaacgactgcgcatgcgtgcattcccccccccccccccccccccccccccgccccggctgatgcaacctcacgctgccgtgcggctctacctcgagtaaggaagccgacagggaaatctggcaaaaccaatcggcggccacacggaagtgggcggaaaggcccgccccccggggattttgcgagtgacgttgggcggcgcggcgctagggacgtagacgcccaacagtcctgcgtctcttccggcgtctaggggggtgtcctgccggcgcgcgggccctgcggccattttgggcttcgcttccaccgcaccagccggcctacccagtccttccggtatcgcgttgctcaggggcttttcaaccctctgtcagtcggaaaaccatcgccgaggccgtggggggactcctatccatggtgttgaagcgtcgagccgactagggaacctccttccccgccaggatggaagtcgcatcagtcgccgcct

SEQ ID NO: 3722 - DNA, 2300 bp, Homo sapien
taggggcttgtaactagctataaggttcaggctcctcatgttcccaggatgtgaacttggacatcataatgtgaagtagtagagaaaacagtgtcttggtgtgactttctttttagctatgtgagcacagacaatttgtggacctaagatttagtttgtatatttgtaaaatggaggtgggggagtagccatggctcacaggattaataatgaaatgctgcttaccaagaactaaacagaatcatgtgtgcaaaagtaccctgaaaactacagagtactttacaaatgattattcttactgggtttagcctcccacataagggagggagatctgtgagggatggggatagggtgggatctgagggccacatggagtagggaatgttttgggaccttttctttcttgctaaggaaagagtagtgtgacaataccaaggtaactgctgtattccttgggtatttttctttaaatagtgttggcaggatgggaactgggagagaaggaaaggatgcctcatgatatttgtaggaattgaggagggataaacaccttccaaaggctggctactgcctatagagaggataatgctgagctggcaagtaatgtaatcactaacactcactgatgtcagccagctagtaaatgatagaggtgggatttgaagcaagcagtctcactccttaccctgtgttcatagcctcagtgctactcagagagatattgggtcttgggagaacagaaagggacagcaaaattgtggagttcattctttttgtttgttcttgagacagggtctctccctgttgcctaggctggagtgcagtgggctcaagtgatccttcgacctcagtccccaccctgagtagcttggactataggcatgcaccactacatgtggctaattttttaagtttttgtagagatggggtctcagtatgttgcccaggctggtctcaaactcctggcctcaaaggaacctcctgccttggcctcccaaagggttaggattataggcatgagccactatgtccagcctcagaattcattttttttttttgagacagagtctcaccctgtcacccagactggagtgcagtggtgtcatctcagctccctgcaacctccgtctcccaggttcaagggattcttgtgcttcagcctcccgagtagctgggattataggcgtgtgccaccatgcctggctaattttttgtatttttagtagagacagggtttcaccatgttggccaggctggtctcgaactcctgacctcaggtgatccacctgcctcagcctcccaaagggccaggattacaggtgtgagtcaccatgtccagcctcagaattcattcttaatggattccttgaatgcccatgagacgtcaccagcctgggacatctcatgggcatgtaggcataataaatttttctgggcctcatctgcttttctatgcatttttatttctatgtctaccttccaaggaaggaagagatgtgggataatctgatcaagtcatattgctgccttctgagcaacactaatagaaggtttgggacttggaggatcctggggaaattaaggcagatttcttgttttggtattttcatatctgctttattttgcatctgttttataaaatgaaacttgagggactattcttgccttttttttttttctttttctgttgagacaggatttcactatgttgcctagactgatctcgaacttctggtctcaagtgatcctcccacctcggcctcccaaagtgttgggattacgggcatgagccacctctcccagcttgttcttgcattttgtaagatcacatagagtatcaaaactggaaaggacctgggccatcacttccctgagaaaaagtgactttctcaaggtcatgcagttagtagcaatgctggaactgaacgcctaccccgcagatcacaacatgacccgtgaaaggacctatcctgcaacactttggagtttcgtgccgacccaattagtggctttgtctttgggaaatttacttccccaaaacactgggacattgggatggaattcactcaccccaaatcatcaccctggttaaggagactaaagaatcagaagacatttgtgctttggggagcagaggccctcagggtatagagaaggaagaagagagaggttcactgtagtcctgaagcagaaataagacctgtggctgaaggaagccttagcaattcactccttcctcttcctgagaactctctgtaggaagtctcacctagcagaggcttcacagtatttcagagaag

SEQ ID NO: 3723 - DNA, 2300 bp, Homo sapien
attcaatcttcagccatggcccccattggccaacccagtctaggaagccagagggccaggaagatctggaggggcaaacggaagacatgcagtgcatcttccaaatccttctctataatatgccaggaagtctttttctggtcacactacttcccagttccatttgtgcacagcaggttctctgtcacctacagcacctaaactttttggcatgccctggtttctctttattcaattttttccttaccaaaatgcatgataaagcctgtgatctgatcctccactcagctacctatgcctacttcctgttagttctttccttcagacttttcaccccagcagcatagaaccaccagtggtcgccgggcgcggtggctcacgcctgtaatcccagcactttgggaggccgaggtgggtggaacacaaggtcaggagatcgagaccatcctggctaacacggtgaaaccctgtctctactaaaaatacaaaaaaaaaaaaaaaaaaaaagaaaaaattagctgggcatagtggcgggcgcctgtagtcccagctactccggaggctgggccagaagaatggcgtgaacccgggaggcagagcttgcagcgagccgagatcacgccactgcactccagcctgggcgacagagcaagactccgtctcaaaaaaaaaaaaaaaaaaaagaaccaccagtggcccctgtaacactctgttctctcaggctcctgagcttgacctgatgacagacacagagtaagctgtcataaatatttgtatggtgaagaagtgcacggacacgttttttaacccctgtggctcctgagatcaggagtagcatcatatacattatgacatatgtgcagaccaagctgccttcagttaattatcaagatgtttcacctacattctctcctttgatcattacgaaagcgtgataggtgaggacgctattcttgatattcagagggtgaagtggaatactgaaagtcacaagcattgggtacagaaggcactgtaggatcagaaaggggagtgatccctttcctccccatcataagagtcacagccgacacttctataacaaaagacaagttaaccagagaaaagcataacaaatttatttaatcatggttttacttgagaggctgaggaccaggtgttaatcttcatagtctgtcgagaaagaaagaagaaatgagggcagtggaggaaaacacgattcacgtttttaggaaaatatactttgagattagtgatcgttggtactatgcaaaccaaatgcaaacgaggagctggccaactcatggtttcttttgggtggagcctttaggaaaattcttccagagaccactgctggaagaaaggtatttagagtagaaaatttaaatataacatattgtatgaaaggttttttttttttacttttttttctcactaccctagttgggttggaggatcctctatctcccctccctacttaggttgactgctgtttcctggatcgcagctcggaagatccacctgggcgaatacaaaaacaaacgagactccccttccagaaagggaggaaggaaggagacagaaagacgaatgacactgagcgtgtaaagcccggagacagcctctctctaccccaacctaaccctcaaggtaggggatcccccgaacatcgctaccgtaattatggtagaaattcctgaaacggataactggacctcagcaccgtcatttctagcagaatgattgagctttcctctgacccaaagccaaggggttccagcaggggaaactaacgaccatccgcaaaaaccctcacccaagtggggagtggaaatcctggctcttgggttgcagagcacaacttgacgccagcgcgtttctcttcccccacgcaatggcaagtggggcgggagtcggaggggagaggaggagaggagaagagaagaggagggggaaggggaggggagaggcgaagggcggcccgggttccagcagccgccccgccctccggctcgcggcggattcggcgctgcggctggagccggcggccgggtgcctgcctgtccaggcagggtctggccgagcgtcgcgtcgccgtgcagtgcgccgggtgtccgggagatggcttcccctctctcgcccgctgctgccgctattgtctcacccggggtggcctgactctgcgagctcgcgcacgctctcggcggagagcacccctccccacccccacaagctggtccttgcgccctttgctgcctctccctctgccccttggagcctagggtctgtgcggagcctgg

SEQ ID NO: 3724 - DNA, 2300 bp, Homo sapien
cagatttcaggtcttgttttggaatcctctagattggtgcttggcacaagtaggatgctcagctaattaatttttttttttttttttttttttttttttttgtagagatggtgttctcgctttcttgcccaggctggtcttgaactcctgggcttaaacgatcctcccaccttggcctcccaaagggttgggattacaggtgtgagccactgcacctggcctcaacaaatacctgttgatctcacacaaactgaattgcatgaacagatcatattccaaggctccaggagacattaggaaaggatccaaactaaccagatgctatttaaaagttacaaaaaaaaaattcctgttgaaagttttaaaaaatactaattgcacaaaaggacaggggaaatagttgacagtggttcacctaaaaaagcacccttgacctttttttttttttttttgtgagtgaggtggttgcagatttctatgaaaaagaagttaattcttcagctccttaatggaaccctggatctcccagctatgcaggaggttatgctagaagtagaacaaagcggaatgtacaaatttaaggaaggttactgccctgtgttcttttgcatgggtctgtatctagcattgggagccaggttttgttgttgcttattgggagagataagaatggtatatacacaaataactaaaaaaaaaatacgtggtaaatgctaaaagacaggtgcaaagaacactgagatggagctttcttgggttacacagccagttttaatgtttcctaatatagaagagctttcaacaaacctctcaggcaggctgtcttcaaatgacattacttcccccaaatacctaatttcatttatttcagaacaactctaaatgttagaggattttctgagcttaaaaatactgccttgtaatttctattggttttagttctgcactttggagaagagaataaggctccgttatttccaatattatactattcagttatttgaagacagcttccaatttctatgctcaaccctttccctctttttttttttttttttttttgagatgcagtttcgctcttgtcgcccaggctggagtgcaatggcgctatctcggctcactgcaacctccgccacccgggttcaaacgattctcctgcctcggcctcctaagtagctgggattacaggtgaccgccaccatgccccgctaattttttgtatttttagtagaaacgggggtttcgccatgttgggcaggatggtctcgaactgctgacctcaggtgatccgcccgcctcggcctcccaaagtgcgctgggattacaggggagagccactgcgcccggcctccctcgtttatatgcaggttaaaaactcccttgagccttcaactatttctttttcttttttttttttttttttgaggagtttcgctcttgttgcccaggctggaatggcgctatctcggctcactgcaacctccgcctcccaagttcaaacgattctcctgagtagctgggattacaggcatgcgccaccacacccgactaattttgtatttttagtagaaacagggtttcaccatattggtcagactggtctcgaactcctgacctcaggtgatccgcctgccttaggcctcccaaagtgctgggattacaggcgtgagccacagcggctggtgctttcaactatttatttgacatggcttcaagcttccttgccaccctagtgccgccatcgctccgtttcccttccctaccacccttggggagtaagggtgaggactggggaatggcagaggaagcgtagtttttccgaagagctgaaggcagcctgtgattatgaccttagctcttcctcttctctgttttctgatctcctaatacacgtctgtaaatatcacaagaccctgcaagtccctcacttattatctcttcaaatctgacgactttcaaccgttcgggccccacgactctctccccggactaggatctactctatggtagtgagctcagcctttctagctctctagtcctcccattgctccatctatggtttccggaggcctcaccggaagccctcgtgtgaggccgtgtgggaggccggaagttgcggcttcattactcgccatttcaaaatgctgccgaggccctaggatctgtgactgccacccctccccccacccgggctcggcgggggagcgactcatggagctgccgtaaggtgtggctcttggccttcgtcggcggggtgccgggagcgggagctggagagtgaggagcaggcggccgtaccg

SEQ ID NO: 3725 - DNA, 2300 bp, Homo sapien
tgcaagaaagagattcagctggttattaaggtttttatagcataatggtagtacgaacataaaaatgcatttattccgttcacttaccacattatttgaaaatcaatcctttatttaattttatttccaacctgtcagagaatgttcttaggcatcaaaatccaaggtagctgtaagaaaaatactggagctaacaatgaagaacagaagtaatctgattagtcaaattattaagtgccatggattactttatgcagcagtcaggtacatagttaggtgaacccaaaagaaaaactcttgaaaacaagagatttcttccatgcacatttacaatattgaggtataattaacatgataaagtgtttccttctaacgagttgtagaaatctgagtaaccacccaaaaaagcaatagaatgtttctgtcaccccaaaacactcccttctgcccctcttcagacagtccttcagctatttcatggctctcaccctagttttttttttttttgcacttttttttttccgggggtataggggaggtgtggggcgacagggtctgtcttgttctgtctcccaggctgaagtgcagtgcagtggtatgatcatggctcactgcagccttggtttcctgggcataagtggtcttcccacttcagcctcctgagtagctgagactatagactagcataaccacactggctaattttttgtggagatgaagtctcactatgttgcccaggctggtctcgaactcctgggctcaaacaatcctcccgcctcagccttccaaattgctgggattatagtcatgaggcacctagtctggcccttttgcaagactttaatctgaaatctaaatttttaaaatttaagtacttacaaaggatatactatccaacatattgcatattatatatgtgctttaaagtttttttttttttttgagagacggtctcactttgtcatccaagctggagtgcagtggtgcaaacacggcccacctcctgggctcaagtgatcctccagcctcagcttccctcacaggcattcactatcactcccagctaattaaaataatttgtagacggtgtctcgttatgttgcccaggctggtctcgaactcctgggtttaagtgattcccccgcctcagcctcccaaagtgttgggcttacagccttgagccactatgcttggctcaaagatatttttatgaaagccctgggactatagatttagctgattaaatttatagaaaaagtcctgtcatataaactggcaaagtctgttcttaatttaattagccaaatcagacttaacttccgtcagaacatgtcttggttttaattcagataaacacacaaacatacttctctggcacagccttcagaagcatcagtttttgttttgttttgttttgttttttgagacagggtcttgctctgtcgcccaggctggagtgcactggcacaatcacagttcactgcagcctcgacctcccagatccaagcaatcctcccacctaagcctcccaagtagctgggtctataggcgcgtgccaccaccatgcccagctgaattttgtattttttgtacagacagcattttgccatgttgcccaggctggtcccaaacttctagcctcaagcaaccctcctgcctcagcctctcaaagtgctaggattgcagtcctgagctactgccccctaccctctttgcgtcttaggagtcatttagattttttttgatccttttgtttagtgcctctggagctgcttacaccaaggcaatacgccttgatatactggatggttgagaggcagcctctttttttttttttttttttttttttttttggaggatagggagtatggctgttgtgaaaagggaggtaaagagaaatggtagatctgaagaggcctcatcagagcacatattttaggacaacacatatggaaattggacatctttaagttggtttccatagagctatgcatgtatccttacccccatgggaaaatgttggtgtgttctcaagggtatgcatgtgtcattttgaagaccaaggccctagaattgtcaaacttaaggatcataaaaatcatgagggttgcttgttaaaaatgtccaaacgtgcagagactgatctttgagatctggaccaggaatttgcatttgaacaagtgttcctggaatctctatgcaagttttatacagaacatacttttggaatccttgccctagacaggggtgtccaatcttttggcttccctggtccacaatggaagaagaattgtcttgga

SEQ ID NO: 3726 - DNA, 2300 bp, Homo sapien
ggaaaccaggcccagagaagggaagtgttttggccaagggcacatagtgcacgaggggcagaacccggactaagtctgccctttcctctctgcatagttaccatctaataggctgggtgcccagaggggccccttcttgcctagggaccagtctgcctttgtaggactaacaaattagctacaagattagaaattacagtttaggggtcatgtcgcctatggctccaagagtctgaacctccccaaattgttcctgggaataacatcactattgtaaaacctaagatcagtgcttgagatattttgcagaccctgcactcgatggatcagctgacaccaccaagaccagtaatctggcttcaccagttctgccatcccacccaggaacagaaaacagcaagaaaacctcactccgaccccctatgattccatctctaacctgaccagtcagcactgaccacttcccaagcccctacccactgaattatctttaaaaactctgatccctgaatgctcaaatgcttggggagactaatttgagtaataataaaactccggtctcccgcacagctggctctgcatgaattactgtttcttcactgtaattcccctgtctaggcagcagggaaggtgaacccactaggcggttacactgtccttacagtctctaaggctcctcctgccccaacgctcagggactcccgggcattcagtcgaggggtgtaagatcaagccaggcctgacatcctgctgacttgcctgtcatagaacaaaggtcccagggttatctggcccatcctcctgctcccggctctgcccatctcctctctgccgcctgctcccaaaccaacctgtctgtccaccccagttagcactccagctagctggaggggagggaaggagaggctgcattcattgcagccttgtacatataagcaagtttgtgggcccacagccttcaccccaccaccccctgctctgccactgcatcatctccagtctcttctctcctccctgcacccatcccccaaccacagaagcctaacagattccaagggaacagctggaacctccttgctgctggaacttttgctggtgggaaggggtagggcatgccctgacctgggcatctcagggacacactgctcgggcctctgccttctgggtctcctcttggttccatttgtcctgtagcctctccctgtacaggaggtcaggaggagcagtcacaagtcgccctgtctgatgcattaggacacagaaacccaggaaggttgaatggctcactcaagttcacacacaacagcccgaggaggaaaccactcagtccaacaggagctcggccaagttgccagcttgccttgccctcctccctgagatggccagcatcctgtatggattcagggagaactcaaacatcaaaactggcagaggtggaagtggagagtggcaaagggggaaaaagatgaatcaaggcacgcaatcccactaaagaaagaaggcttcaatgtacccggtggccccctgccggctcccaatgccagccacagcgccatcctcctactgaatgtttaattaaaagaacaggactaatgggatgggtgtcaaactacacacttaatctgcaccagagacagcccctctgggagccactgaaagagatcaaagctgcttctgtgaagccctcattcttcagggacttcaggggagtcggcagcaggaaaaagatttggaaaaaccaccaaaaaaataaaaataataataataaatgaggaaagagaggagagttgggagtaggagggtgtgaggagcgcgggccaaggaaggcagcaggttccaggccatgcttagtcccctagtgtctctcctcacatccagccccagtgacaactggtgtcctcagctcaggccatggcggtgagcccctgcctccctgtgcctgacccaattgaaggtcctcctgtgacttccctctgtctctctttccagtaacttagaaccctccctgaccgctttccttcttttgggtctccaagccttgcaaatgctgcttccttgcctggagcatccttagcttgggtttctgtcacttgcattcaaaagagtctaacataagagaaatggtcagataggagggcagaatggatcactgttaattatgaggactttggaggcaaactgcccagattcaaatccctgttccaccccttgctagcagtgtgaccccaagcaagtcatttaacttctctgtacttcatctgtcaaattcactcatcacaatacttaactcacagggctgc

SEQ ID NO: 3727 - DNA, 2300 bp, Homo sapien
gtgctcctgcctggtattggtggatgcagagtctcctctctcctctcctcctccctcctctccctggcggttccccccccacccccccccccgggagctgagggtccagagggagggtggcaggtggtgatcgattgcctggccttggctgcttcagtgccaggacacccttctccccacaaagctgcggagagagatgggcggcataattgagtgtagcgttgataaactccggcctcctcaccagcagataagcgctgggtgggagggatgctgagggtgaggaaggccagtcctccatctgcatacctggcctccagctcctcctgggaggtaagcctggcccctcacttccacctcccatttaatcacacacaaccagaacctcagagctggaggagacctcagcctcagcgtttatctgctcttccagagtctgaattccataaataacttatgtgaaggaggagtggtggggcgtgagcctggctctgctgtttgctgtgtgaccttgggcaaagtacttaacctttcgagccccaaatccctgagctgggaatggggataatgcctgcaccccttctggaattgctgggaggagtacgggatggaaggtacatgaagtgcctgttagttccctctgttgcttcccagcattgcagcctctcctttcatcttaccatacattggattggagcaaaagtaattgcggttttggccatgaattttaatactaatactaatacctaatacttctcatctctcaacttttgtaataaacttaaaaaatattgttgaggtataacatatgtacgggagaatacataaatgtccctgatcccaacatgcataggtacaagtacaaccaccacccaaatcaagacataaacatttccagcactccagaaggttcctacgtatgtgccccttcccagtcaatatccagcccccacctggagctaaccacggtcccgacttctatcgccgccaagcagtttcatcttgaaaacccagaattccccttccttttccatgacaagttgggaccagggtctttggaattaggttactctggcattagggaactttaaatccacttcattcctccccctacttcaaagtgggctatagcgtcttagaatctcatgtttaaccagtgatctccaggaagagaggctgattcttctctctctttctagagttcccgtatctaaaaattgctctcagccttggggcccagctctggccagcatcctcatggcctgggcctgggagtgccatgctgccttgagggaggatgatgtgggtgacctcctggcccccgtgccctctaggccttctcatcacagagttctggagcactaggcaagaggatggattgggggtggccaggaaggaggggcccagacctgcactcctaaccatccatcccctgggtcactctactcggcagtctcagaggctcctcccattctgcttgtcctaaatgcaacatctcctcccactgcctggctgtgctgcattggtcccattgccatcagcaccaccgtccaccaaaggctggaaatgcccgccctcttcatctgccctctcccacctcacaccccctaccaaaatgctcacacctaccttctcttttcacttctggccttgtcctgtacggtggcctcttttgggctttcctgctcacctgagagagccacacttcccctgactgcctctcattcccagacacaccacaccctggctatttttccttccacaccttgggcctctcactgtgcctgccgtgccctttcccaacttcaactattcaactcctcttcagccatgaaaacccatcccaaatgccacctcccctgtgacgctttcccttagagaagagtggttcctcccacagctgcccccgagactctctgaacaaaccacagtggcaacttcctcactgttaggccatgagtctgtcttcccaaccagactgagagctcctcgaggaaaggatggtttgttacggatttttgtgtccctagagcctagtaccgtgcactttcccttgcaggactgaggggtgctctgccgtgaactgtgaatcacaacccattagtaggtcatgaaaacaatttaacgtgggtcacgatctacattaaaaaaatgaatagaaaatatcatactgcattgtatgcggccagactaagcattgttttgagatgctgccccctattttatacacacgcatttgtgcactgggacatgatacaaggctttttcttttttctttttctttttttttttgcctaggg

SEQ ID NO: 3728 - DNA, 2300 bp, Homo sapien
ttcaatcagtcagtcttacagttctgccaagtcttctttacaaaggcccatgcatttactctattctcactgctcccctcctcctagattcctgcaacagctacctcaatagtctcccatcctcctgcctctttcatcccaaatcacctgaggatgggtccacagataaactgctgagcctggcaattcgggcccttcatcagctgctcccaccctgtatactcaatgtggcattgtcgcactgtgaaaatgaggtctcacattctgcctacagattttgggctactgccttaaacgatctgggcctccatcccccggtctgttaaaaggggatattagtcaactcagagtctaagatgacagagatgagaaaaggctggcatctaatagtagctctataattttcctcccttgccccctaccctccagacaacccattctactctgcttgtctccactttcctgcctttgctggtccccatattctcttccagttcaaatcctatccctccaactaggctcagttggagactcagctcctccgttaaaccttttgtgaataatgctagtccattaaggtggtttctttttgtatttctatggcacttccatcgtcttgaaatattaaaattggtttcatatagttccaacctgtcactctgagctccttgaggccattatgctccgtagcaggggtggagagtgggaacatgggggtggtttagtgggaacttaatatgtgctcattcaatatatgaaggtgagaatcccctctgtgcatacagaactcagaccttcaagccaacttcacaaaagccaccaggcatggcagtcaccactggctgtacccttggaaaagacagggccagaagctcaagcactggatgacggcaggcagcccagggaagccactcctcacaggactccacaccttggcctccacctcatccattcccctgttgttggttctgcaggctctggtccagacccatcagtagggtgtggcctgccatggagccgagtttgtgatgtctgttctgagtggtccaggctgaagtccccaccaaggcatgggtgttgggcattgggcctttgccctcctctagtggcagtcacccagcttttctaagccaccaggcagcagcctagcacccacctttggcaccttcttactttcctcccccagtcttcatgatgtccagctggcagagtggggaaccctgaagccaaacccctaactgggcctgccagttcctgactgaaattgacctccttcattgagagccaggacggaatcttccagaatgctagagctgcacggctcaggatgcaatgctggaaaagcatgacaactaaaggggtcttccactccattctttagggtgagaggtgcctgggcccagtgacaaattctcacccaccccactacattccttagtccactgttaacttcgggagggtagcaccatgcaaagcaaaaatgtgatcttaggtgcatgctgtgactgtgagctgcacctgtcctcacaaagctgctgaattccccattcgtctcctggcctttgcaagagggtccgaggcagtatgagagaagccaacccttctcttcccggacccaagggctgtgccccttctctcagccaagccttgtgtctctaggcacaaggacagctcaagcgttagcgtctggccccacccaactccttcctcccgggtgtgtgtgcgttaggtagagggggcctctggccactcaggagttaaaatggcagcgggactggagggggttggcgtggcatgcagactgggaggaggcgaccggagtgggctggggaggttgggagagcggcggagaagcgagtgaggagggcgagcgcgaagccgggaagaggggcgcgcgtggagggggtgccgggcgccgcgagggcctgctccgggcacctgcgaacgcgcggcgctctcaaggagcgcctggctctcgcccgccagcctccggccgcgacgcgcccagggcgcggagagggggtggggacggattgggattctgccatcgccctcaccggctgggccctggagccgctcccaggataactccacgttggggagggcgcccgccgagcctccccggcctgtgcagacggcgcgcgcggcgggagggcgcggaccagcgtccccagcccggccccgggcggaaggcgagcggagcgcggccgcgcgggcagcagacggcagacggtgcccggcgcccacggggtgagtgtgcagcttcggggctgacctgggcagcgccgccgccgccgggg

SEQ ID NO: 3729 - DNA, 2300 bp, Homo sapien
cactgagtatccttgtgcatacacatctttgtggattgggccagtgattctgcaggctggattctttgaggtggcattgatgggtcaagggtgtcattaaagtcttgatggtactgctgtattgctctcccaaaaaggccataccaagttaaacctccaccaatgatgcacgaatctgccagtttccccacacttcctagggaccagtgtggaagaggatggcttcaagtgcccgagactcatacctggggctttctcttggtctgagcccaggatgaggcagggcttatggaatttcattgggaggaatgaaacactagggaatgtgaaaatcctgtgacttgccattcaccatgacagaggacacagtgagtgaggtttcaggtctgggttgaaagtccatgcttgctgagggttccagccagaactagaggtgcaaacccagggaagaaaaagaagcaggaaggccagataaatgtcaggaaagaaaaagagcaaccactttctgccctcggtcctgagtgagtctgttcctgacacagcagcagaacagcctgcaaggtgcgtaggctcttcttagtccccagagtccatcaccagcagggggtgcctctccctccatcaggacttgcctgcagctctgggacaccaccgaggccaaggaaacaccttcaccctcagggcctctgggggtcaccatgctccctttaggcccacacttaatttctttatactaaggccatgaaacttgagtcccagttcagtttcaaccaccaaaccactgtgtggggtccatctctctagaccttcgtgtatttgctgtttaaaagtaatgaagaaaggggagggaaggctgaacaataattaacatttgtaaagaacagtttggttcagtaccttatctcattgatgctcactctatgcccattttacagatgggaaaaagaagacttagagaggttaagtgaactgcccaagtttaccctgctggtaagccaggactttcttggcaaatcctgtgatccttcaacttgaccatattagaagattctagtattggtgaaatctaaaacttgtagggcccatcttaaaatagcaaagtagttttaactaggcactgtcagatgcatctgggctttgaattattacttgggcaggttccttgaactttggtgttctcatccagaataaaagacagtggtgccagggtaggagctatgagcacagagaaagtagcccttgaatggggccacagagggatgctgcaggggactgtagttttggatgaggagctgaactagaagcttccaagtgctcttccaagacaaagattctatgattccctaactgggatctttccactgtttcaggtgataattctgagctcagatcctgtgcacagaacctaatgcagtcttcgtgtcagagctagaagagaccttgggcgaccacccaatcaacttttcatggttcagttgtggaaactgatgtccacagataaatgtcttgctatcatgtcagatagttctccagccacgactgaggcctgagtccccctagggcagaggaaatctcccatttctaaaagaaagccccgcactgttcatagcagtcacaacctctctcacatccctgaatcaggatccaacgacttgccaatcaacaaatgttgctggagagtttaccacaaacaagtctctgtgctaggccctgagaacacaagctgtccggcaacttcctgctccctaaagtcacagtctatggtggaggtgcaaacaagcgatcctgttggggcttcagggtacttcctcctgtgtgctttgcacgtagtaggtgctcagcgaacggaaacggggagactagttatcactctccaggcaagcccgcaaagaggcctcaggtgaaaagagaaaggaggatttttttttccggccctggctctgcgcaccgctccccagcgcgccaggcggggctgcgtccggagcatccttccctccgcctctgtcctggtccccgctcagcggccgctaggagcgcgaagggaggggcgcgggggcgcgcacgcagggtgtcgggggcgcgccggccgcccggggacgcgcacgggctggtctctgccctaatgcggcggctggcggcgagaggcgctgcaggggacgcgggggaagtggcggcgccggcagcggacagctcggacagcgcccagggccggagcccgagcccttggaggtaggcgagcgcgaacaccggagagatgggggtagagagtcatggaaacccacctagcgacacccccttgt

SEQ ID NO: 3730 - DNA, 2300 bp, Homo sapien
tttcattttatcttcatttttacataattctttgaaactttttttttttttttttttgagatagggtcttgccctgtcacccaggctggagtgcagtggcatgatctcagctcactgtaacccctgcctcccaggttcaagcgattctcatgcctcagcctcccgagcagctgggattacaggtgcccaccatgacgcccggctaatttttgtatttttagtagagacagggtttcaccatgttggtcaggctggtctcgaactcctgacctcaagtgatctgccaaccttggcctcccaaagtgctgggattataggcatgagccactgtgcccaccctctttgaaattttttaattatgttttgtaattatgtcaaatatttacatagtccaaagcaaatccatgtaacaaggtctgttcaaagtccaacttctgtctgtcccctgcacttcttgtctccctctccttgtagggttttttgtttgtttgtttttgagacagagtcttgctctgtcacccaggctagagtgcaatggcatgatcttggttcactgcaacctctgcctccccaattcaagtgattttcatgcctcagcctcccaagtagctgggattacaggtgtaagccacaacgcctggctaattttttgcattttagtggagatggggtttcactatgttgcccagggtagtctcaaactcctgagctcaggcaatctgcctgcctcagcctcccaaagtgctaggattacaggcgtgagccaccgcacctggcccctgtaggtcttttaaaatgtattttatgcttcatcattttattgtcttttttaaaaatacaagcaaatgcatatatatttttgcattcctcctctctttcctaaataaatggtagcatattaaacattattttctatcatgtgtttttcacttaacaagaaccttggagattgtaggtatataggatatattttaaatagattcctggaattgggattgttgggtcaaagagtaaatgcatacttatttagatagctattgccacattcccctctacaagagtggattataccatttcctgcagacactttttttggggggcagatggagtcttgctctgttgcccaggctggagtgcagttgcgcaatcttggctcactataacctctgcctcccgggttcaagccattctcctgcctcagcctcccgactagctgggactacaggtgtgcccggctaatttttgtatttttagtagacacagggtttcaccatgttggccatgctgatctcaaactcctgaccttaagtgatccaccctccttggcctcccaaagtgctgggattacaggtgtgacccaacatgcccagcctcctgcagacacattctaatgttataacaaatgactaaatggaatatgttattgctaccaagaaaggttatatgattgttcagaactggtcttgaaccctgctaactaatgatctgatcctgtctatcatgccttctccccatgttacagattaagaaattgagtcacacatagagaagtgtcctactctaaatgacataacaagctaggatttaaaatttgcatctcctgaccctaaaattgggtccccttttaatgtgttatggatttatttatggtgagcttggtttgtttatctgtagacagagaagaaaaacatagttctcctaggaagctaaaaaattaatgagatgattatgggtaaattctcccctggtggaggagagattcttcgaggtatggctgaacttcttgtggtgaatagggaatcagcaattagactgtggtgtcagggcactaagaaatgatcttacagataagagagacaatcacccttgcaggatctgtccttttttttttttttttttttcttccagagtgctttgaacttctttgaacaaagatgctgttatgctatgcaaaactttaccaatggatgtggacaaaaatgtaatttccccagtgaatgagcaagctgcaaaccacaaaggcttttttttttcttcctttcttagagtaaccctggggttctcctttgtgcttgcttgagacaggttgattgacttatgtgcaatttgggacgctggagtttaccttccctccgcagcctggaacagagcctcctctggtgttgcaaggaagaggctgaatgaggcagagaaggtaagcaggacttgggcctggggtatgtgtcattggaggggtgagaatgaggggacattctcgcctcctgccccttctctttgataagggaagcctgtttgcctgg

SEQ ID NO: 3731 - DNA, 2300 bp, Homo sapien
aaaagataaaatagaagcaaactctatgaattgcactccaccagtgccgagggagagagttgagtgccccagaacaggagccccgccggtgcagccaggccccagcaaacccagcaagctcctttaggaagcaccagttacatctggataaagttcccccgcactctctcctcacgctaccagcaccgattaaaccctggataagtgtcttcatcctcaccccaggtgtctctgaggcctcccagctcctggcagctctgcctcccctccacctttcccttgtcctgctgagtctaagaccccattaaacccatgggtgggctcagcttctatttttgtttttagccattcctatgtacgatcgtacaccttggccagggggtacttcctccagtttcccttttgccttggggtttctggatggaaaattctcgttcttttcccttccatcttacccattcccctagagctatacaaagagctctgggggaagaggtgaggctcggggaaggtggaattcactctgtcatgggtgggcccatgctggcacaacccttctacagggaaacagccatcctgaaaatgccaatctctgtgagccacctggccttcaagacctgcatgaatctcattgatttcagacccatgactgttccggcctagttgcattatagatcatcacctcctccaacttggcggccacttttctcccaccccctccccgagcagctcacatgtaattactactctcctccccagctgtcttcccgagtcattagtgaggaggcagaatggtcttggccccggagtgatttcctgtcatctctgttcattaactctctccatgtctttgctaagccattaataactctccctgcatttctgattgattgtgcgggctttgtgactccatcccagcaccttgttttcagggtcctaaagagcaggttgtctgtcctgtggacccagtacatgccttctctgcttccagatccctgcctggggagaaggaccgctgctgagatggcctgccctgggggccacacagtggcctctgggatcccaacacaagctgctctggagtagatctcgcactgctcagacagcccctccccgttccagggaaggggagattccctgaacctgagggaagctgggctcctccaggcagatcctttcagaacctagagctcctctctctcatgtaggtggggctgaggagccctgggcttcctaacacacctcacttaatgatgcccaagtccttgggatggtttcagctgggaggatccggcaggggcggtgatgccacttctctctagcctgacagcgttggcctagtggggtctgccttctggaaggaggctcatgggagtttgttctctcctgtttcagcccgaggagttgcagaaagaacaccaagcttcatgtatccccagggcaccgcgagcagccagatggtgcttcgtggcatggacctcctgctggaatgcatcgcctccggggtgtatgtgcggtttgcagcccctcttctagccaccctccaggaggatggggatgggagcttgttcatgctcttgttaatgccacatttagtgcataccagtagcacagcaaaaagagaagcaaacagcctctagtgagcagggtgttgcaaaccatagtcatctccatcctatcctggccatctctgttttggataatgaggaaagaaggtgattaggcatcccgtagatgcgttagaatctcgtgggaccttagctaagccttcaggctctctgtggctgagcatcctcctctgcacaggaaagatcagcttttagaggacatgcatcctcctgggcccaagtatacttttaggccacctgggtgtccccagctgtatagaagaggagaaaggccacgtttagtgataacttgtttcctgcttggcgcctctcctagcccaacaccagacatcgcatggtacaagaaaggtggggacctcccatctgataaggccaagtttgagaactttaataaggccctgcgtatcacaaatgtctctgaggaagactccggggagtatttctgcctggcctccaacaagatgggcagcatccggcacacgatctcggtgagagtaaagggtacgttgtgtgtatttatcattatgattatgttgccaaccctgaacaccatgcccacccttccctctgagggtggttgggggcagagtgagtcggagagacttccagcccactgctcagtggcaatggcgatctgccatggatggtgtcactcgctggacgtgagagggt

SEQ ID NO: 3732 - DNA, 2300 bp, Homo sapien
aagaggtacagcagaaatacataattcagtgtgagaaatatataaattggtattacatcagatttcttttcctaacactcttgggtaatatttggatttctgaaatcacaccagctcatagagggtagagatgctgcccaaaaaaaatgttaaatgccagggataagccagtctggtatgaaacacatttagtggataatccacaaaggagctaatccacattgagttggcttactgaccacccacagtgtggaaagccttatgataaatgctgtctggtaaaggattaaaattcagaagaaattagccctgctctgggagtttaaatctcagctcaaaaggcacatcatgcacagagtaagctcatttacataccagaccaagcgtatacatagatgccgaggaaagacagagcatagaacagacccatcaggtaggacagaggaaggttccttaccttgccctggaaaggcacaaattggacttgagcctgtgtctgtttgggttccagcccccgagtccaatcctggtgacgtgaagggagaggggaccagaaagaacaacatggagatcacgtggacggtaagaggccctcccagccccagtggagcagctcaccttgccgcatgcaccgggagcccctctcccttgatgccccgacactacgaggccatgatgtggttcagactctctggctggtcttggtggccattcttctttgagaaaccaagctcctctctgagttgggcatccagaaaccaaacaggacaaatgtctaagtgtaagatttcagagaggagacaggagcagaggggaccagggtccaccgactgccagtctagcaaaacgcatagaggatgcagcaaaatcaagcagacttctcttgaaggaggagggactggggttagactttagaaaagatctaagcacaacaccaaaccaagttctggtgtgtcctagggccctttcactggagatttgtgggagctggggagagaccaacatctgagatgtgtccagtacaggctttcttttggtccaagaatggactaggtcattccaaagactccctctggtcttagaaaatcccatcttcatgctggctcactgactacattttccaaaccaaaactggagtatgtggtctcaaaatgacttttttcccaaaccacttcccagtctgagaatgcaaacgcagccactgaaatattaacatttctgagcttctgccatgagtaatggaaactgggagatgcagtgtttgggatcatgaccttccctgtctttctgaaggctgctcccacagcagccttggccaaacagggcaacggcagctgggctgagcccagattcaggaccctggtctgtggctctgtatagcaggctccaagaggactgattcctgggccaggcccttagaaaataaagagcagaatcacacccatgtttaaagaactctgacctcttgggaaggacaggacagacacacacaaattcggtagaactaaagtccattctggaattttgagttcattagcaggagccatgctgtggttaaccacaactcatttcttctgactttggagaagtttaccttttgtctatattttgctttattggttgctcctgtcacaggaaggagttttgttgaaaataaaacctttgcacctacaaatgcgggtggctctcagagtcagagtaactgggtctcaggcgaagcctgtgtcacagaaaatctgcatgctgctgggttcacaggaccttgggcttttgggggactcactggggtgggggatatggtcttccctaccctgcaagggggcaggccagtgttgggcacatctggaagggatgcctggcacagcaagagagggcaagctgtgggtggatctgggcccctctctggcagcctctccagcctgtctgtccctctgcccagcccatgaatgccacctcggcctttggccccaacctgcgctacattgtcaagtggaggcggagagagactcgagaggcctggaacaacgtcacagtgtggggctctcgctacgtggtggggcagaccccagtctacgtgccctatgagatccgagtccaggctgaaaatgacttcgggaagggccctgagccagagtccgtcatcggttactccggagaagattgtgagtagtctcctccccgtccccccatcaggacccttgtggctaggtcgcacgaggccacgctcacaggccaggaaccttggggtgggtatgggaggacagccagttcccaggaaggaaaaatgttctgtagtgacc

SEQ ID NO: 3733 - DNA, 2300 bp, Homo sapien
actcccctcccctctcccaatggcccctactgggctccttatctcctaagccacaactaacaggcaaagccactgaaagcatgcaaatgccctccctgttgtcgcagccaactccagataacccagtatatggactatcaaggctcttggcttctcttggtcctccctgcctgagagcagtttctgctctatcatccatcctcttcaaaagggtgagctcagatgggaagaagagagagagcacccagggtatacacggcgctcccttctgagtagcgctaattaaaagttggctggaaagtgagggaggcagtaactgtgattaatgcacgttctgtggcctcagaggtcatcaggagttggctgatggacagttggaggcagagcaagagaggctagtctcttcccaggaaatgaatttggccagtaggggaaagaaggcaacgtgatgtgtacacttgaatgagctcttccccacagatgacttgcacccttaacctacttgcttagagatttttctggctaaagcttccccatgggtccccctctaagtctggaccccttcctaccttgccacaggcagcctgggagacactggcgtggccaactgacctgtggcttcttacccactgctaattagagacttcttgttgcccaaactcattccactgccccctccaacaccaccatcttccatagctgtcccttcccatccaagctctgctaccatgcagcctggcatcccactgacttggacatgtgactgtctcatccctaaagatcttccaacaatatgaaaagaagtcattttacttcaaaggattaaatcaaccctttctcatattcagacttccgggggtaacttgctacctttcaactgctgcctgccgtcaatctaaaccatactaatccaattcaaggtgatgtggtctttgagcacagagtggagctttccatgcctggacccttggctcactatttttggttctggcacggactccctgagcaacctggtacccaccttggaaatcagtctcatgatggagcagctcagatgtaagtttggccaacttgctcattccccaaagacgtggcatggatcagaaaataattggaaccaaaacccttatttcttgtttaatataaattcatgttcaggagtggctaatgagcggggattaaaaggctgcttcctcagcctggataggactgatgaggtcatttgggacttggaggctgtagcaagcaaaggaaagaccggtcactaccaccaccactaacaactaacccagccctgcctgcctgacccctcaccagcctgcctctgtcccgaaggcctactactggagggagagcagcttgctgaagaacctgtgggtgtctcagaagagacagcaagccagcttccctggtgaccgcctccgtggcgtggtgtcccgcctcttcccctacagtaactacaagctggagatggttgtggtcaatgggagaggtgatgggcctcgcagtgagaccaaggagttcaccaccccggaaggaggtaggtctggcctgcagctcttcagggtggggcaggagaagggtggcacacaccttgggcctggagaaactccagcgtggctcagcatggatggcacaaggtgacttctgcgaggcctccaggagcggatgacctgcaagccgagccactacagccattcccagaccaccatcgccaaggtgacctgccctgcgaggaggttgtatctcaagagaagacctgtgaggtctgctgacataattccagacgggttatgcagactgatccccgagggcacggcgggcacctgggccaccccaccaccttccgaggcagaaggcagcacgtccatcctgactgcctggaaccatctgatttgtttgccagcacccaacaccttcacggttctccccccacgttctcaagaagccgtcactgaaatagtcggcctgtgtgtgcggtggctctgcagagggatacccaagtatagccccgccttctgcaggcctatggtttcacatggccctggggtcaaaacccctattttttgtttcacataaattcaagttcatgaattaacagatgactgcaaagttcctggttcatctccttgttcttgccagtcttcttttatctgctttgcatctgtttcatcctcctccgtttctcctccctccctctttaattgttattttccccatttttcctcttctcttcctcctgtcctctgttcttccctcttgttctctttatccctgtctttccctccccttggtttggt

SEQ ID NO: 3734 - DNA, 2300 bp, Homo sapien
ttacttcaaaggattaaatcaaccctttctcatattcagacttccgggggtaacttgctacctttcaactgctgcctgccgtcaatctaaaccatactaatccaattcaaggtgatgtggtctttgagcacagagtggagctttccatgcctggacccttggctcactatttttggttctggcacggactccctgagcaacctggtacccaccttggaaatcagtctcatgatggagcagctcagatgtaagtttggccaacttgctcattccccaaagacgtggcatggatcagaaaataattggaaccaaaacccttatttcttgtttaatataaattcatgttcaggagtggctaatgagcggggattaaaaggctgcttcctcagcctggataggactgatgaggtcatttgggacttggaggctgtagcaagcaaaggaaagaccggtcactaccaccaccactaacaactaacccagccctgcctgcctgacccctcaccagcctgcctctgtcccgaaggcctactactggagggagagcagcttgctgaagaacctgtgggtgtctcagaagagacagcaagccagcttccctggtgaccgcctccgtggcgtggtgtcccgcctcttcccctacagtaactacaagctggagatggttgtggtcaatgggagaggtgatgggcctcgcagtgagaccaaggagttcaccaccccggaaggaggtaggtctggcctgcagctcttcagggtggggcaggagaagggtggcacacaccttgggcctggagaaactccagcgtggctcagcatggatggcacaaggtgacttctgcgaggcctccaggagcggatgacctgcaagccgagccactacagccattcccagaccaccatcgccaaggtgacctgccctgcgaggaggttgtatctcaagagaagacctgtgaggtctgctgacataattccagacgggttatgcagactgatccccgagggcacggcgggcacctgggccaccccaccaccttccgaggcagaaggcagcacgtccatcctgactgcctggaaccatctgatttgtttgccagcacccaacaccttcacggttctccccccacgttctcaagaagccgtcactgaaatagtcggcctgtgtgtgcggtggctctgcagagggatacccaagtatagccccgccttctgcaggcctatggtttcacatggccctggggtcaaaacccctattttttgtttcacataaattcaagttcatgaattaacagatgactgcaaagttcctggttcatctccttgttcttgccagtcttcttttatctgctttgcatctgtttcatcctcctccgtttctcctccctccctctttaattgttattttccccatttttcctcttctcttcctcctgtcctctgttcttccctcttgttctctttatccctgtctttccctccccttggtttggttttcatcattggcctctccccaacactcccaccctcccacctcttccggatgttccaccctggctttctgtctccttacccctgaacccaacattctcagctcagaagcctgggcctgctgcctggacccagtgatgagaatccttatctgaggatagggaactgcagcctctgtacaaaacagctgtaagtggttctctacctaggaatggctctgcccaatttcgaggtatctttgcagaatcagagcctaacatgtgctgaatccagagtagttgctagaagaaaacctgatttacttcttcctctcttaaatagcagagtctgagctatgtttgtcctcagacctgaaggaaatagcatcctggatggggcaatgggctccggtcgtctcacggttctcccaggcttcagtttagcagtgtcgagcatgggggttgtccagaggtcaatgccttcatacttgtgctttgttttttgtgttttcctcatcctccctgccccctccccctcatctcccctgctctctcctccttccccaagtacccagtgcccctaggcgtttccgagtccggcagcccaacctggagacaatcaacctggaatgggatcatcctgagcatccaaatgggatcatgattggatacactctcaaatatgtggcctgtacgttctgcccttccctttctcttagataatctgggaaccagaaaccccattctcaccacttttcctaaggactcaaggtagaaagcctgtgggtgcagatggcattgtggagggatggaggggccaacgaaacagttccc

SEQ ID NO: 3735 - DNA, 2300 bp, Homo sapien
gaaatagtcggcctgtgtgtgcggtggctctgcagagggatacccaagtatagccccgccttctgcaggcctatggtttcacatggccctggggtcaaaacccctattttttgtttcacataaattcaagttcatgaattaacagatgactgcaaagttcctggttcatctccttgttcttgccagtcttcttttatctgctttgcatctgtttcatcctcctccgtttctcctccctccctctttaattgttattttccccatttttcctcttctcttcctcctgtcctctgttcttccctcttgttctctttatccctgtctttccctccccttggtttggttttcatcattggcctctccccaacactcccaccctcccacctcttccggatgttccaccctggctttctgtctccttacccctgaacccaacattctcagctcagaagcctgggcctgctgcctggacccagtgatgagaatccttatctgaggatagggaactgcagcctctgtacaaaacagctgtaagtggttctctacctaggaatggctctgcccaatttcgaggtatctttgcagaatcagagcctaacatgtgctgaatccagagtagttgctagaagaaaacctgatttacttcttcctctcttaaatagcagagtctgagctatgtttgtcctcagacctgaaggaaatagcatcctggatggggcaatgggctccggtcgtctcacggttctcccaggcttcagtttagcagtgtcgagcatgggggttgtccagaggtcaatgccttcatacttgtgctttgttttttgtgttttcctcatcctccctgccccctccccctcatctcccctgctctctcctccttccccaagtacccagtgcccctaggcgtttccgagtccggcagcccaacctggagacaatcaacctggaatgggatcatcctgagcatccaaatgggatcatgattggatacactctcaaatatgtggcctgtacgttctgcccttccctttctcttagataatctgggaaccagaaaccccattctcaccacttttcctaaggactcaaggtagaaagcctgtgggtgcagatggcattgtggagggatggaggggccaacgaaacagttcccaataggattaggggaggcagatgggactcaatccctgctctcctttcatagttctgcctgcagggagcttctagtctcactgatgagacaaagggacctccagtctaatgaagcagacagccatgcctttagggatcttttgtagtctccaacacgtacagagtctaggagagagagttcctcaagctctggagcttccacctgatggggtagatagtatactcacaggagtccacagtcaggacaccccttgacaagatgtcatttatgataaggcagctgcatgtagagctgcccggtgactgtggggtgacccgaatcaggagcctgggttggaaagaccccacctcaagagctcagcatcaccatgcagggacaggagtgccattacatttgaaacactttaggccttcaaaagtaggtaacgtacctcgttaggaaactcaaagagccaaatgttgtgttgttagcaattttaatagccaactctgtgcttgtatgctgttctgaattgatctctggaccagaccctttcaccctttgaggtccattgaataggcactttacaaaggaggcattaagaatcaaaaggcctagtggcgttgtcctagttctgtttgaaaggaagaaagaaagtgaagagttttgtccttgttgaaagggcttaagaatataaacggaatctttctgaatcagccacataactctgcagtgagctagagacaacaggatcagtgaagaaggattaaccctgggtgtaatcaaagagcccggagggagttcttgccgagtgttctgcctttgaaccaagcctttaagatcaccaggcaggtgccatcatttccctttccagcaaagtcaggaaagtgttcttcctccagcttgcagattatataacccatcaataaatgttgctaaagtttaattccacttacctctctctccccagttaacgggaccaaagtaggaaagcagatagtggaaaacttctctcccaatcagaccaagttcacggtgcaaagaacggaccccgtgtcacgctaccgctttaccctcagcgccaggacgcaggtgggctctggggaagccgtcacagaggagtcaccagcacccccgaatgaaggtaggtgcatggcagcagcccctg

SEQ ID NO: 3736 - DNA, 2300 bp, Homo sapien
ggcgcagtggctcacacctgtaatcccagcactttgcgaggctgaggcaggcagatcacttgaggtcaggagttcgagaccagcctggccaacatggtgaaacccaatctctaccaaaaatacaaaaaattagctgggtgttttggcacgtgcctataatcccagctactcaggaggctgaggcaggagaatcacttgaacctgggaggcagaggttgcagtgagccgaaatcgtgccactgcactccagcctgggcggcagagcaagactccgtctcaaaaaaggaaaaaaaaaaaaaaagatcctgcagcccagacataaccaaggtcaaggataaggacctctggcattcttgtttctggaaatattgactgttttttacacaggagcaagagagccatctgtctgtgatggggtgggtagggacaggagacaggataatggatgaccctgaaagcaaagatctggctggaccacagaatgcaatttctccctgctccagaaagccccatcaccaaacacaacccatgctccccaaatgcttccttctccccatctcttagaacaggtcctcccccaggaccccccccaaaactcaacacaaaggaaatagaagggagaggagactggattctttttcattccccatgcccaagtacccacagactaggactctgaagagctgtgccttaagtgagggagggcaggaaatgattgtcccttactggtgagcgatgttttctttcactctgttctgctgtgctgggcctgtctggttctgtaacagagaaagcctgagttagggaaaaggctgcctcctccgtctgacagtcagacttgggtggactgagttcacgcccattccaggtggaagtggaatactggaagaacccagcagatcaactctgagctgccctttgccctttcagaaagtatctcattccaaacagttcttcgaaactaacctcttgccctccagctacagagtaagcccctggtcccttaaaaagatgagtgaaccaggagctacaaggcctggttgctagccttccctccagtcttcattcagtcactaattagttacgtgacatgctcttcaactctcaacggttcggtttccctcatctaaaatggggatgattatctaccttgtgtctcaaaaaggacacataggccgggcgcggtggctcacgcctgtaatcccagcactttgggaggctgaatgggtggatcacctgaggtcgggagttcaagaccagcctggccaacatggtaaaacctcgtctctactaaaaatacaaaaatgagccaggcgcggtggcaggcgcctataatcccagctatttgggaggctggggcatgagaatcgcttgaacccgggaggcagaggttgcagtgagccaagatagcaccactgcaaaaaaacaaacaaaaaaagatacataaagaggttttcatgtaagtgcccgctgtgcatccgcctctgtgctgtgcactagcgatactggaggaaaaatgatctctcctcaagggcaccgtagctgacaccgaaagaatgagcacagaacaaggcagagcctcggctgaatgctcacacatcacagaggaagtggaggaaagggggcacgccaacaagggggtcacagagaagagacactttccatcccataggtgtgtacggcgtgtcttctctgctcagggcactctgctaggaactgtgaagaagcacacagacccccacccttgaggaaagaactagccttctgtgataggcatgaaaaaacgtccacaaatagttacaccacagagcagagtaagaaaggtgcaaacagtggagtgtttgcctttggcaaaggaaatgatcacatctgtttggtcttttggggagacttcatggagatgtggtggggggagcttggtaggaggagatttcagttgtcagtagagatgtaaagagacccctggggctgagaaggaggaggcagagtcaacttggcaactgattgagtacaggaagcaaaaacaagggaggcgtggatggtgccttgttaaaaaagagtgtcagtgagcccagggcggtgccttctggccctgcattcagtggagccctagagagcaggggcatgtacttaatcgtcgtgtctgtgtctttgcttctccttttgaccaagtacgagaaaagaaggatgttccccttggccctgaagaccccaaggaagaggatggctcatttgactataggtgcgtgatctccctcctcctctctcaggcaggctgtcctccctgtccctgaggcacc

SEQ ID NO: 3737 - DNA, 2300 bp, Homo sapien
agcggtgaaaaatgaggatggagaggtgagggttggatcactaaaggtctaacatgacaaaccatggagtttagattttatctaatgtagggaatgaaggtttcaagtaaaggaatgacatgatcagatttgtattttagaagctccctctggctacagtttcatgagggagtaggcaacacaggaggcaggaacactcaattcaggccacgagggcttggactaagggtgagacagtgcatatggatgtgagggacaaatttcaaagacagcatgtgaacttgagaatgatgagaaagaatcttcctgccaggcgcggtggttcaggcctgtaatcccagcactttagcaggctgaggcagggtggatcgcttgagcccacgagttcgagaccagcctaggcaacatagtgagaccctgtctctagaaaaaataccaaaaaaattagctgggcacggtggtgggcacctgtaatcccagctacttgggaggctgaggtgggaggatagcttgagcctgggaggtcgaggctgcagtgagccgtgattgcaccactgcactccagcctgggtgacagagcaagaccctatttcaaaacaaacaaacaaacaaacaaacaaacaaacgaaacccctcagaaacaaaagagagagagagagagaaaggatcgttctcatatttcaaggagtaaatagggaggttcagaggtgtgtgacttccccaagttacccaacatttcaggaggagccaggcctggaaataaggccccattttagcctaatgaagctataatccctcaagtccatgatctgttctggggacatttttttttcttttttgcacccaccctgtctgttctgaggactttgaagggagagtaagacaggtgggttggacagttactcggtggttctttgtccaagagacttggtctgcattttcaggggaattcatttgccctcattccccattatagcctatgcctagaaactatccgttaactttctacaagagcagaaccacctctcagtgctcactccaacccccacaccaccccgaggaaagggaggggggttacagtgtctgggggtccctcatgtcttatcctgcctggttgaggctctttggccactcctcagtgagaaccagcacagctacagacatgttgtggcagtatccaggggacatggtgaaagctgcgagcactgcctctcaacaatcaacatggccccctctgtctcttttcccttcctttttttttttttttttttttgagacggagtcttgctctgtggcccaggctggagtgtagtgtcacgatctcggctcactgcaacctctgcctctcgggttcaagtgattctcctgcctcagcctccagagtagctgggactacaggcatgcgccacatcacccagctaattttttttttttttttttttgtatttttagtagagacggggtttcaccatgttggtcaggctggtctcgaacttctgagcttaaatgatccacccacctcggcctcccaaattgttgggattacaagcgtgagccaccgtgcctggcccctatttggttgttgatcaagattcctttgagtctactgagaggggtttttggtttgtagtaagcagttttatttattctttcaacaatatgaaatgtctaccttgtgccaggcacaatgctgggcatacgctgatgtttgacctaagggcaagcggtgcagaaagaggagggggctaggagacggagcaccatggcaaatttctcccattctcccgacttccctagcatggcactttttcaatggtggatgtgcacacgcatcacgttgaatcagagggtgtctccacgactgtacacattacacattcctataccagtcacactatgtttaaaacacaaattgtgcaagtgagtcttcgagaataacaacttctagaggggggatggtatggtagaattctggaagagtgtgctgtctggcacccatgaaaaaccctttgatccacttttgccatcagctctttgacacccctctcctacctaccaacaggaacaaatcaagaaaatgagcaaatcacatggcaagagtccattttgaacaacttttattatacgtttagtgttctctatacaaaagaaatcagtttttttacagtgattcaaaaaaaattcagaataatttggccttttcattgctcatgcagtcagtttataagtccatgtattagacggccctccatggcccagaagtcttccctgctgaaggtcgtgtgtgacaccctcagata

SEQ ID NO: 3738 - DNA, 2300 bp, Homo sapien
ttactcttactgagcaacatctgaaaagtgaggataataacaacatggacctcttgcgcaagtaattcaggtaaagcatttagcacagctcccggcatgtgggaggcattcaaaacagatattatttctgttattatcaagctaatgggccccacaagcaaaactcagcctgcacccccaaatgcccaccccactctctcctcaggaacaggagcatctcagagactgggagtgcagatccccctaatctccccaaactcattcatactagacttcactgagagcttcagacaagtgagaagatgagactttgggaactgtctccccatccaagtctaggcttggcaaatgttcttgttttcacttattgtgtctgccagagtccacatggagcatgctggttgcattgagatctgagagtctttaagacccaagtcacctgtgctaacgaccctccccagagacccagctcccaccacagggcagcagctgtcctaaaatagagtcacaaagacagctgtctccgtctaaagcaatccttgcaagcatttccagactgttggttcctgggccagcctatttcctggcccgtcagccccctgcagcagacatagcatccttttcttggcaaggacttgttcctgccgttttctgctaggagagaacttgcagagcctctctttggagcccaggctgacttgaatggtgccaaagagcaaggttcacctcaggagctcagagccaatgtgccagccctcagacatacagataggcaaggacagtgtgggcaggggaaggaagggaaagatatcctggcaaggggttgatgtgtctgtctatataacagcattcaacattatttaagaaacatcattagcaaaatccaagtcctccccatcaggaacaaagaagactatctctcaagttgggcaagccctttggaggggctcagaaggaaaggaggggagcgcatgtgggacctgggcagacattccagccttggaggctgagcagcagaacctccccgactccttctccttttccagaccctctcattctggcccaggtccccaggacctcctccactcagggagacatggagccatgatccaggcttgacaggtatagccatttaaaactgggaggctggcctggccctgccagctgttgcagcatctggactgctcaccggtcttgcctgtgcaagctggacagcaggcagatcagaggggggtgagacaacagtgacagcctgacagggccgactggtgccgcagatggctggtccctccgcctccgggccacagccttcctgggcactcccccacgtgaccggagcagggcaggagaaaggcatcgctgacaagggtgagcacttagaatctcagagctggcaggactgtgtccatctttaatcccttcaggtaccagcgaggctcagagagggcagggcacctagccaagcacacacagccagtcggttgtggagcccagagtatgcttcagacacccagacccctaatccagggagcttttcatgacatcacactgctggttgcttaaaaatgggattggatccaaacgtactgatgcgtaaaagtgtccaagatcagttacacagttaaaagtctttggccaatcctactgttttatgtaatcacatttgtgtgaaataaccctactaacccatgtaattgtatacacgaaaataataaacctgggggcatgtacttagatttattaagagtagtggttgagggactttcactatgtatttttaaatgtcctctaatatttagatattttgacaaaaagctcaaactacttttgaacaagggaaacaataaagaggaacatggggtggaccgggcaacagagacagcccctccctgccacttgccccacacagcaagctgggatttctgatttggatctcttcctcggataggggatttctggggaaaccaggagttttggctccatgggtctccagggtttgaggagtaagagccactttcttttccctcttcaccccgcccctctcctgccccttcagccctgggcagggggactagaagtggggctgggcaggatcgggagggcaggcgggccagacagcgccccgcggcctgtccatgagcggcccatgcattatggaagacgcgcgctgggctcgctccctggtccttaaatgacagcaaatgaggtaaagccaggagggtggggacggaagtggggtgggaggggggcagaaggaagccatctccagggcccccgagcgttggctgaggaccagagcc

SEQ ID NO: 3739 - DNA, 2300 bp, Homo sapien
cactgagagcttcagacaagtgagaagatgagactttgggaactgtctccccatccaagtctaggcttggcaaatgttcttgttttcacttattgtgtctgccagagtccacatggagcatgctggttgcattgagatctgagagtctttaagacccaagtcacctgtgctaacgaccctccccagagacccagctcccaccacagggcagcagctgtcctaaaatagagtcacaaagacagctgtctccgtctaaagcaatccttgcaagcatttccagactgttggttcctgggccagcctatttcctggcccgtcagccccctgcagcagacatagcatccttttcttggcaaggacttgttcctgccgttttctgctaggagagaacttgcagagcctctctttggagcccaggctgacttgaatggtgccaaagagcaaggttcacctcaggagctcagagccaatgtgccagccctcagacatacagataggcaaggacagtgtgggcaggggaaggaagggaaagatatcctggcaaggggttgatgtgtctgtctatataacagcattcaacattatttaagaaacatcattagcaaaatccaagtcctccccatcaggaacaaagaagactatctctcaagttgggcaagccctttggaggggctcagaaggaaaggaggggagcgcatgtgggacctgggcagacattccagccttggaggctgagcagcagaacctccccgactccttctccttttccagaccctctcattctggcccaggtccccaggacctcctccactcagggagacatggagccatgatccaggcttgacaggtatagccatttaaaactgggaggctggcctggccctgccagctgttgcagcatctggactgctcaccggtcttgcctgtgcaagctggacagcaggcagatcagaggggggtgagacaacagtgacagcctgacagggccgactggtgccgcagatggctggtccctccgcctccgggccacagccttcctgggcactcccccacgtgaccggagcagggcaggagaaaggcatcgctgacaagggtgagcacttagaatctcagagctggcaggactgtgtccatctttaatcccttcaggtaccagcgaggctcagagagggcagggcacctagccaagcacacacagccagtcggttgtggagcccagagtatgcttcagacacccagacccctaatccagggagcttttcatgacatcacactgctggttgcttaaaaatgggattggatccaaacgtactgatgcgtaaaagtgtccaagatcagttacacagttaaaagtctttggccaatcctactgttttatgtaatcacatttgtgtgaaataaccctactaacccatgtaattgtatacacgaaaataataaacctgggggcatgtacttagatttattaagagtagtggttgagggactttcactatgtatttttaaatgtcctctaatatttagatattttgacaaaaagctcaaactacttttgaacaagggaaacaataaagaggaacatggggtggaccgggcaacagagacagcccctccctgccacttgccccacacagcaagctgggatttctgatttggatctcttcctcggataggggatttctggggaaaccaggagttttggctccatgggtctccagggtttgaggagtaagagccactttcttttccctcttcaccccgcccctctcctgccccttcagccctgggcagggggactagaagtggggctgggcaggatcgggagggcaggcgggccagacagcgccccgcggcctgtccatgagcggcccatgcattatggaagacgcgcgctgggctcgctccctggtccttaaatgacagcaaatgaggtaaagccaggagggtggggacggaagtggggtgggaggggggcagaaggaagccatctccagggcccccgagcgttggctgaggaccagagccagccagtgagcggagcctgggagagggaggagcacatcttgatgcagagatgctgcagtggctccgggcgcgctcacacacacgcgccctcacccgccaccgccgccgcggccgccgccgcacccggacagcgagcggctgaggccgccagggcccaaaggacagcggcccagacaggggctggcggcccggccggccccggctcaccgactcgggcagcatccacctgccccagccaacacccttctctcgccccaggtaggtgccaaccgctt

SEQ ID NO: 3740 - DNA, 2300 bp, Homo sapien
cagctgccctcactcccagggggccaaggctgggcctcagctgcagcatggggccaccccctacccctggaagaggactgatggctggatgcgctgggaaaggaactaattagttaatggggatccctttccccatgacccaccaaggaaggcctgaaatcagctgcgttaagaggtagaagccaattagggatagcctggctcccacctgacaccgcagaagcaaaacggactggccccaccagtcagcagagagcccaccccagccctgtcgaagggcaggtgtgatgtccggccaatctgtggctcttcatcccctgccctgccctgcagcaggacaatgatgcatgaagagagaggagtctgccccatttgcctgtgtggtgctcattggtccaccaagctcaggaggaattgatctgtctgtgccacagacttgctgggtgaccatgggcaagtcactcccttttctggacatttcttgaattgtgatactggaattgtataaaactgccaccaaagcaaactgcccaccctccacccaccataaggcaatccttctcctccaagtccccaccccacatgtggctccagcagacatctgctgagcacactctccgtgcccgccaccttccaagggtttgtctggctgaatcctcatgcagaccctgggaggtgaactcatattcttttcatttcacaggtgaagatactgaggctcagaagagttctataactttcccaaggtcccacagctagtagagggccagcctagtccccaggcccaggcctcgttggtccacactgccccagtaagggtattaggctccagggacacacatcctctctgcatgtttgtggctggcgacgtctcatgcacctcacaccccacagatcagttcttctgtaagggtcccttgaaagccccctgggaggtagaactgcttccattctgaggccccagcatcttgaactttatggcatttgctaccttgcactgtcaatttcctgtctccctccttggaccgcaagccccttgaagaagagggactgtgtcttaatcatctttacaagccagtctctagcccagtgctgggtatagagcaggtgctcaatacctaagtgtaggatgggtgattgattgaactagtatggccagatggggcctgcccagcctatttaaattcaaatttaaattaattaagtaatataaaatgtaaaatgtcgttcttcagtcgcaatagccacatgtcaagtgctcgatagccctacgtggctagtggttaccacattgaacagtgcagaaaatgggacattcccatcatcagagaaagttttactggacagcacagcccaagaggccaggctccagccaggccaaggctctgaggcatctggtggtgtcatcacctgcagcttggagttcagccctgggatcccaaaccaccttcgggcctgtctttgaagaccagcccctcagtgtgctattcccagaggagtccacggaggagcaggtgttgctggcatgccgcgcccgggccagccctccagccacctatcggtaaggcctctgcagtgggtgctgggaggccctgggcagccgttgaactttccctctcatcagccctgccaccaggcaggactcagaggtccccttcctctgtcccctgctgcaggtggaagatgaatggtaccgagatgaagctggagccaggttcccgtcaccagctggtggggggcaacctggtcatcatgaaccccaccaaggcacaggatgccggggtctaccagtgcctggcctccaacccagtgggcaccgttgtcagcagggaggccatcctccgcttcggctgtgagacccgcgggggaccaagacactttgggggagggggagagggggctaggagaaattactgagaaaggataagggacaccctcaagccgggccttcctgacctcacatgacatgccttagtgaactgctgcttctccgtgaaggatgagtcggggaggggctcgcaggccaggaggacagtgcctgagcccctggtctctgcctccagttctgcaggaattctccaaggaggagcgagacccagtgaaagctcatgaaggctggggggtgatgttgccctgtaacccacctgcccactacccaggtgagtccagacctggggccagggttagagagggcacaggaagggcttccagatgcttggcagaggaaggatggaataaaaggagacccctggaaatgacccttagaagcacccatccctgggaccctaactttaaatgat

SEQ ID NO: 3741 - DNA, 2300 bp, Homo sapien
aattttgtttttaaaaatattctgggctgggcatggtggctcacacctgtaatcccagcacttggggaggccgaggctggtggatcatctgaggtcaggtgtttgagaccagcctggtcaacatggtgaaaccccgtctctactaaaaatacaaaaattagctgggcgtggtggcgggcacctgtaatcctagctactcgggaggctgaggcaggagaattgcttgaatccaggaggcagaggttgcagtgagctgagattgcgccactgcactccagcctgggtgacagagcaagactccatctcaaaaaaaaaaaaaaaaaaaaatctgtagttttgtacaagatgagacttagccttgggtacttcttgctgaagctttaatgctttgtaaataaaatcggatgtttattaaagaacaggtgtagatgtttatttgtaaacactgctcacttctggaactctctggccactttgctttagtacaaaggaaagtgtgatttcctgtgttgatactagatctttcagtgtggaaagatagatctggaaggggtagggagtggacaggtagtctagatttctgcctctagatgagattgtaaataaatgatgcaagtggaaaagttgttgatcaaaaagatcatctaggaatgatctgtcttccaattatttaactcaatatagttttgcaattactctgaagaggccgtagggctaggcattctggaggttacaaaaatgcatgctaggaagttcctgtcttccaaggacctttcttcaagtctaagtaagtacggttgaattcttattagcctttttttttttttgaatgaagcagctttaaaatttattaaatgctcgttgtctcctaaagataagatgtttcacaaagtctatgtaagtctttgattttaatgtcaaatttgagggtctacttattaatcttatgtgattgagaactccatctttgacatcatagctgtttcatagcaaccttgacctacgtgaataatgagctctattctgtaggataaagggagtaggccaagagtcagggagcatcatgcatcctctcactcaaaatatatcttcagtatccttgggaaggaagagtgcctaaaagggggagaggagctgcctttaacacaaccttaaacattctgatttgaaaaggtcatcttggcccttgtctttatgaatttccatttctatttaaaattccttacacattgaacagtgtttcacactttacaaagtgttctcacatacagtatatcattcagtgctctaagtgaccttcctcagataggcaaggaggtcttaagttacaaaggaggaaacagaaattcaggaagggtaagttacttgcctcctagtccagagttcttaatcctttttataggaagtttaggaacattaaaataattcaagttaatcttcctttttttagactttagtatttgttttatttggtgacatttaactggggcttttgaaacccttaatttagatcctagtttatagaggggaaggggaagggtgaggaagagtgtaacttcactatgcatttgaggtaatctggaaatttacttcagtttctgaagtcttttcttctttgtcttcccaagaggtggatttaaagtcattaagagaacacgaaaacggccagcgcggtggctcatgcctgtaatcccagcactttggggggctgaggtgggtgaattgcttgaacccaggagttggagacaagcctcgacaacatggtgaaaccccgtatctacaaaaaatagaaaaattagccaggtgtgatagcctgcacctgtagtcccagctacctaggaggctgaggtggcaggatcacttgagcctaggaggttgaggctgcagtgagctgtgatcatgttactgcactccagcctgggttgacagtgaggccctgcctcaaaaaaaaaaaaaaaaaaaaaaagcgtgaagactagtaggtaaggtggttattttattaacaacgatagttagtaaagcaacaccattgtgatttttttcctgccttgtggcctcacctgtttataaggactggacttttatttattaagttgtgttgttttattgacaatacatgcatcatatcttttgactttgaaggatatctcatgtcaaaggaatcaagttatgatttatagaggattcagctggaataccttgtgggtgctggctgagggtggcaaaacgcctaccgagacatgaaggttttagccactagttttgtccttgggagcctggggttggccttctacctgcct

SEQ ID NO: 3742 - DNA, 2300 bp, Homo sapien
gcctggcctctgcctcccaaagtgctgggattacaggtgtgagccactgcacctggcctcactatttttatttttaacagctttaattttaacttcattagctatattagcatccaatctgtaaaaattattacattggaatcaggcgtggtagctcacagctgtaatctgtaatccctgcatttgggaggctgaggcaggaggattacttgtgcccaggaatttaaggttacagtagtgagctatggtttcgtcattgcattccagcctgggcaacagagtgagaccatatctctaaatacatatatatatgattactttggatttgagagtagagtcagagaatttagaggaaactaggctgtggttttcacacgatatttttccttgttgcttttgcctttatgcaaagttttcctttgtctttggagagtagaaaaactgtggatttttttttttttgagacagagtctcactctgttgtccaggctggagtgcaatggtgcgatcttggctcactgaaacctctgcctcccgggttcaagcgattctcctgcctcagcctcccgagtagctgggataacaggcatgagccaccacgcccaactaattttgtatttttagtagagacagtgtttctccatattgatcaggctggtctcgaactcccgacctcaggtgatcagcccgcctcggcctcccaaagtgctgggattacaggcgtgagccaccgcacccggctgcaaaagacatactttataaaggtccaaggataatggaaatagaagacattaatgtaatatgttcttgggaactaattggatacaccaagtattatctttgactagtttctggacttctgcttcattctgcaacctgcagccaactaccatggtgtccatctattattaggcgctttaaatagctccttaattcacatttactctcttcaatcgatgtgtcagactgtgggggccacttaattcccattccaaattcttgggaaaggaatttaattgggttgagcttaggtcaggggcttactgaaagagcaatcaactggggcccagggacagggtgcactgtgtgaatgaggctgctttttctgcaaatttgtcaagtagaggcagactggactagctacataatttgcagggccctgggcaacatgaaaatgctgggctccctagttcaaaagtttcattattgtttccaaaagtttgcaattgcagacaatactgcgattaataaacttgtgtatgtgtatttttccattgtcggagacctagcccgagtactattttctgcagcgagcctttgacgttgtttcctttttctgatgagccacagcatttatagtaggaatttgttcatataaaatttgctctttcgctagataccagtaactggacttctctaattgctttgggtatttcattggagttctgtatgactgagctccgggaaactcagtccacccctcattccaattctttttcacagtctttttcacagcgtccctgtcaacactgtttggtaaagggtaaaaccttagataataaggtttttattatcttaacacagacaggcctaacatatgttgtcgtacctttctgtaggatcaatagcatatctttacaaatgagaaataattttcacgagaccgaaacaccctgcaacgccacctacatacagggtaagtacgcgccttggtgaggtcagcggcgctacacacccgagcactaggggacgaccttccctggtttcttgcattagcaggacttgtccggaacctttcctgcggagtctgaggtagcccgcccggacaacgccgctgaacacacaacagggcaagaactagtaggttaactgtatgcctggaatttctacctcacctacatgttcccggagcaaataatcttaaattgtcgcgctatttaaagtccctagtgacgataacattgttgtacctcagcaaagatcataattaattgtttccgagagagtgtatgcttgattttggtcaggcatatatttgggcagcccacctgaaacgaacaaggaaggcgggggaagaaagcggaagccgcggggccttctaaggccgaaagtcttcggagcttgcgccagtctcttcgcggcgtccaccacttagacgcaagttgctgaagccggccggggagaaggtgttgttgccggagctgagaccgggcggccacagtccgcagggatgaacctcgagttgctgggtgagaagggctgtggctgcgttttagagaagcgttgggtactggaaagga

SEQ ID NO: 3743 - DNA, 2300 bp, Homo sapien
tatggctcccatcttatgagcctgctcttaatgaatgggtaacccagaaaaggaaggacactggatctttgtagtggttcttgtctctcattccttggtgatctcgctgtcttcatcctggtagatcatccagcgcatcacatgggtgagcccacctgccatcactctggaatggaagaggaaggtggcccaggaagccattgagagcctcagcgcctccaaattggctaagagcatttgcagccaattccggactcggctcaatagttcccacgaggcttttgcagcctccttgcggcaggttggtatgtaggaaaggagatacagctggatcaagcagagaagagcctcatccagatgggaatatttcgctctccgctcttcatatataatatgtgtgtgtgtctgtgtgtgtatacatatatatacacatatatatacacacacacacatatgtatattaaaatcatcagtatattttctttctagattgttataggaagttttttcaataaatttttcatgtggatattttcctaactctcgggagaatggagtgagctcagttaattcctgcccatttcagagtgaggaaagataataggagtaggaattttgtatgtttatatagtattttaggaacaaatgacagaaggacatgactttccaacttctatatttcataattgtttgacatctgattgtccactggcggggagtgggtgtgtccaggcagagagtggatagatgtgagtatgcatccaggaggaaaagttattatttattgagagtctactctgtgccagtctctgtgctaaacatgttacatgtatcttgtttaattctcacaattatctatatgaagtagatattattatccctgtataacaggtgaggaagctgaagctagggacttaagtcatatgtactttttctgtttctctcccagctggaagctggccactcaggccggttagagaaaacggaagatctatggctgagggttcggaaagatcatgctccccgcctggcccgcctttctctggaaagctgttctttacaggatgtcttgcttcatcgtgagtctggttttcttctagataaactggaggatggttcaggatacctgacattcttatgtccagcctcagagaatcctagtgtctaaagctgcttctttgcaaagctgcctaaacccttactgatgtttttgaattcctaaagtctcttcctgctatttatatagttcaaataacatgaccaggccaggtgtggtggctcacacctgtaatcttagtactttgggaggctgaggtgggtggactgcctgagctcagaagttcaagaccagcctaggcgatatggcaagaccccatctctactaaaaaaattagctgggcgtggtggcactttgcaaccccagctcctcaggaggctcaggcagaagattcacttgaacccaggaagtagaggttgcagtgagccaagatcataccactgcactgcagcctgggtgacagagcaagactctgtctccaaaaaaaaaaacaacaaaaaacaaaaaaccacataaccacagtttatttgaattaaaccagttagattattttctattgggttagaatgacactagaattttatccctgggcttgattacagcttcctgaccctaaaggcaggttcacaatgaagaatgttacagggccagcatggtggcttatgcctgtaatcccagtactttgggaggccacggtgggtggatcacttgagcccaggagttcgggaccaccctgggcaatgtggcaaaaccccgtctctaataaaactgtaaaaattagctgtgcgtggtggcgtatgcctgtaatcccaactacttgggagcctgaggcagaataatcgcttgaacccaggaggcagaggttgcagtgagcagagatcatgccactgcactcctgcttgggtgacagaacaagactctgtctcaaaaaaaaaaaaaaagaatcttacagaggttgcccacgaagttcccattcctcctgccttatctctgtctctgtaccttataggtaaacctaaactgggacaggaactgggccggggccagtatggtgtggtatacctgtgtgacaactggggaggacacttcccttgtgccctcaaatcagttgtccctccagatgagaagcactggaatgatctggctttggaatttcactatatgaggtgggtcctggcctcattcatctctatgagaaagatccagagaagaatctagaaccctggtttagattttgtaccaa

SEQ ID NO: 3744 - DNA, 2300 bp, Homo sapien
caaggaatcctcccacctcagcctccctagtagctgggtctaaaggtgtgcaccatcacacctgggtctaaaggtgtgcaccatcacaccatcatacctgtatttagtagagacagggtttcaccatgttggccaggcttatttgtttattttttattttctctttcgctaatacaaaatgtactgcattaatcatcattgtacatatacaccttgggacttgtaagggtatatctcaagaaaaagaattcctagaagcaaaatagttagatcaaagggtatgtagatttttcttggttggttgaacattttaatagatattgccaaatttcctctgaagaagtggcacccatttaagtttccaccagtagacatgagagtgccttttcaggagcacatctttttgcaagtagtttgacttctctcaagttcttctgtcctctgatttacaacattaatagatgttctaatcctaagagatagtgtggcatggtggggacaattgagttttactttttatttatctagtaattgattagaataaaattcctggccggcggcaatggctcatgcctgtaatctcagcactttgggaggccaaggtgagcggatcacctgaggtcaggagttcaagaccagcctggccaacatggtgaaaccccatctctactaaatacaaaaattagtctggcgtggtggtgggtgcctgtaatcctaggtacttgggaggctgaggcacaagatcacttgaacccagaaggcggaggttgcagtgagccgagatcgtgccactgcactccagcctaggcgatagagctaaactcagtctcaaaaaaagcaaaacaaaacaaaacatagaatacaattcctgactcttgggtttttctcattaatatgctagggagtgtgaaattttgcaaagatcataggatttggaataatgagcactgggttcaaaagctggctgtattacttcctaactgtactattcccttcccatgtctactttgttctctctttgaggctgtttcctgatctataatacccatgtaacaaagttattgtgaagatgaaattagattacatgtgtaaaatccttattttagtgcctttcaaatagtttgcacttcataaatgttgttcctcccctcctataaatgtgacataaaagctaacaaaattgccgggcacggtggctcacacctgtaatcccagcactttgggaggccgaggtgggcagatcacgaggtcaggagatcgagaccatcctggccaacatggggaaaccccgtctctactaaaaatacaaaaaatcagccaggcgtggtggcgggtgcctgtagtcgcagctactcgggaggctgaggcaggagaatggcttgaactcgggaggcggagcttgcagtgagccgagattgcatcactccactccagcctgggcgacacagcgagactccgtctcaaaaaaaaaaaaaagctaacaaaatcaacagtctcattctagacttattgcttcttatttattttttttttttgagacggggtctcactcccatcacccaggcaggagtgcagtggcacaatcacagctcattgtagcctctacttcctaggttcaagccatcctcccgcctgcctcatctttttactttttgtagagatgaggtctcactgttacccaagctcatcttgaactcctgggctcaagcaatcctcctgcctcagcctcccaaagttttggaattacaggcgtgaatcactgcacctggacttaattgcttcttctcaggatcttagctgcctttagtagttgagggttacgtgacccctgatcattgtgagagttagacatcatcaacgaatcatgtctttttgcagccatcatcatcacggtagttccatggttctgatttgggagatgactttatttagtgtgtctgccccttcttcctcacaactattcagcttatttctctgcctccatagacgtcattgtccctgagaatggagaaccagtaggcaccagagagatcaaatgctgcatccgacagatccaggaactcatcatctcccgacttaatcaggcagtggctaataagctgatcagctcagtggattacctgagggaaagcttcgtcggaaccctggaacgatgtctgcagagcctggagaagtctcaggatgtctcagttcacatcaccagtaattatctcaaacaggtagacaaagaatgatttttaagacatcgtgtcatagatagcacatgaaaaatctgcacaagtccacacttcaaattaggc

SEQ ID NO: 3745 - DNA, 2300 bp, Homo sapien
ttaaaaataaataaaatagtgtcattttacactttatacccaaaacaaaaccaaagaagtatattctggtgtttgtagagtagcaagctcctttctattgcatttctttttttttttttttttttttttttttttttttaagagggagtttcactcttgttgcccaggctggagtgctatggcatgatctcggctcaccgcaacctccgcctcctgggctcaagcaattctcctgcctcagcctcccgagtagctggaattacaggcatacgccaccaccccggctaattttgtgttttcagcagagatggggtttctccatgttgatcaggctggtcttgaactcccaacctcaggtgatctgcctgtctcggcctccctaaatgctgggattacaggcgtgaatcactgcacccagcctctattgcatttcttaatcatgccgagaaaatgggtggtaacagatcaacttctgtaaactccacagatttatgcagaatgcgttctacaagagaaatctctttaggaattcactatgactcaatataggaattatgggttattgtcatgattccttgagattctttttacttgattgagttaggagcaaaatgcttactcattgctttattcttggagtagaggcaaatgcaatttcagataaatgtgtgggataaaatgtgtgggatgggagttgaaagatagaagattttacatatgccgattgaaagtggctttgagcatcatttcttcattaattcattccatgtttatttattggatgcttactaagtgccaggcactgttctaggtgctaagaaggtatatagccatccatgaaacagtctgaggtcagacttccctctcaggtggccatactaaggcccataacagctctggctcatcctctttatattaatttttattttttcactccctgtctccaggaaacagtgttggcgtccttttttgtttataaccgtcaagcatgagtcatcccttcactgagtattgcagaatcgcatatcacattccagcctaattcgtactgctgccagggtctctgccagcagctctttgcctatcttctgacaatcatgatactcagagcagtgagaccaactgcacatgttggtcaactggggaagggagaagacagagcatgatacctgttttctatccatttttgtttagtacaaggtatatttaggaataggcagcttctggcgggcacggtggctcacgcctgtaatcccagcactttgggaggctgaggcaggcggatcacgaggtcaggagatcgagaccatcctggataacatggtgaaaccctgactccactaaaaatacaaaaaaattgccgggcgtgcgcctgtagtcccagcaacatgggaggctgaggcaggagaatggcgtgaacctgggaggcggagcttgcatgagccaagattgcgccactgcactccagcctgggcaacagagcgagactctgtctcagaaaaaaaaaaaaaaagggcagcttctttgtgggtgccaatatatcaggccatactctaccattagaaagcccgaaatccatggcagggcacggtggctggtgcctgtaatccccgcactttgggagaccaaggtgagtggatcacctgaggttgggagtttgagaccagcctgaccaacatggagaaaccccatctctactaaaaaaacaaaattagcccggcgtggtggcgcatgcctgtaatcccagctactcgagacgctgaggcaggagaatcgcttgaacctgggaggcggaggttgcagtgagccaagatgtgccattgcactccagcctgggcaacaagagtgaaactccgtctcaaaaaaaaaaaaaaaattaaaaataaagcctgaaatccctttttttaattaattaattaagtaattttttttttggacagtatctcactctgttgcccaggctagagtgcagtggtgtgatctcagctcactgcaacctccacctcccaggttcaagtgattctcattcctcagcctcccaagtagctgagactacaggcatatgccaccatgcccagctaattttttttttttttttttttggagacggagtctcactctgtcacccattctggagtacaatggcatgatctcagctcactgcaacctcctccttctgggttcaagtgattcttctgcctcagcctcctgagtagctgggactacaggcttgtgccaccacactcagctaatttttgtatttttagtagagacagggtttcaccatattggccaagctg

SEQ ID NO: 3746 - DNA, 2300 bp, Homo sapien
gacttgttaaataaaacatgccaatccatgtggtagtatgttacacagttaaaaagaatgaaacagacctttatgttttggtacagaagtctgcaaggccataatcaaatatgtattacgtatgctatcatttgtatttaaaatacatgcatacacatatataaatacatatataggatctatttatacatgatttatatctacaacagtggttgcctcctgggaggggaactaggtgactgggaggtgaacagaaaaactaagaaagacttagtttttccttatatatcctttgcaccatttgaattttataccacattcgtgtattacttattttgaaaataaatgcaaagtactaaggaatagtttttaaaagggtgggctttgtgatatttacctgaaataatgccctctctgattacttccacctatctaaattttgccccttcttcaagatagattccttttctggataactccagcttgagtgctcttatctgatctcctgtgctagaaattcgtgtgtgtggcaaatcattacacattgctttcttacagctcttctattttaaaaatagtatctactttgtattaaaattcccatttttaattttcatttctattttactgaacctttggggattgcatggggaatataatcttgcaaaagaagaatggctgatggaaaatacgtgaccaagtaaaaggcagaagggggagtgggtaaatgggaaggagcatgaggctccctccttgcagtcagccctcacagacatttatcaaatacagattcatttgaattagtgacccctttttataaaatgctaatgcccctggaaaggtaaggccttcacatcttacaacaattaatccaaatatcacgacatcatttggctaagaacacctgggtgttctgcgatgagaggtcaggagaagtaaaatttctgaagcaggactcacaaaaatttaaaaccaaaagggcttaaagatctgccattctaaacccttactttatagaagatgaaacggggtcttgcccgagatcacaatgcaaggtataggaagagtccagatccaaactcaaatctcctcttaatttcagtcaaggaactacatcatgtagcctatcagagaagaagtctggcctaggtaaaagacggtgtctttctatagcaagaaagatacagatgggctctgtgcctggtgaagaggggagagataattcaggaagcacaaaagaggtgacgtcaagttttgccccctttgtaattgtgtccaggagtctgtgactgtgtgtgtcaatgaaagtcctccatattagcagaaaccaagttaagataatcagaaatagtttggaaggctacaaacctcaacttccccttacccagtccggtctccctacttcaggaacccactgaagttcagcttacagctcttgttgatcctttcacacccttcctttccaagtctggagaaggaaagttggaaaaggggaacgcaatgcaaatataagagatttccctatttccagggtactttcagccgatttccagggtacttttagccgattccccagtatctactgtatccgaaacactagagagccacttagggtagccatggagatgactgtcttcagtcttgtttccttccttttctctactattaacatctttcgctacgatttcggtaaggcccccccacttctgctggcactcaggtcctgcagctcctccctctcctcagggacgctcatagagggattaggaacactttttaaaatgaagagagcgcgaaaacacaagaacgagtgagggttttctccaaaagggatcagtcccatccacagcctccccttctccagccttgaggttttggcgtttggtcccagcccggactgcaagtcccaggagaccccgcggcgagggtgtcctccagcgatccttccctcacgcttctggatagtggagagaaaggttccgatagcggcgcactgcggtttggtttgtttgcaacggcagtgacggaggttgggagccaggctgactgcaggcgggggcgtcaggaggcggattcctcctcccttcggcactggggggcggggaggagggaggccgggcctgcggccggggaccgagccgcaaagacagagcgggcagaggcgatggagggcgacggggtgccatggggcagcgagcccgtctcgggtcccggccccggcggcggcggaatgatccgcgagctgtgccggggcttcggccgctaccgccgctacctgggacggctgcgacagaacctgc

SEQ ID NO: 3747 - DNA, 2300 bp, Homo sapien
caagtgctttacatatattacccaacaccctgtatggtaggtactgtcattatccctacttccaaataattcagaaactggagcatgaagaggttagataacgtgtccccactcacatggtcagtgaagagcagagctaggatttgtcccctatctggccatagagcctgagctcttaaccattatgctatgatgcctctccaaaatggaatgtaaagtattagctgattttatgaaacacaccacagacttttttgctgacctgaatcacaccttgcaaatatgacgacaagtagaaaatgtggctgtcatgctgtatgtatatgataatataaaaatcaaacttaagaccaacttttatctagtatagaaatgaggcataattcaaaattataatgctctctgcttccttaaacgaaaccaaatcccttccttaaaccaaatcccttcactttccttcggcttcgagtcaggtcatgaacatgtgtcaatgcatgctcaccatttgctggccaccgcgtgcccctcaagacttgctcagggtctttggggccgctgcacttatctgggccaagtcaggcagggagcagtatattcctctgcttgaaaccttgcaccatgggaacctgcccccaccggttctgtctagtcctgcccacggtctacactggcatcctgccatcccctcaccattgaaaatgctaaataaaggcttatagctttgtgtttccacattgtgctcgattctttgtggtagatgtggggggtggttccacattcccagcccatcctaaattcctatcttctaaaagtggagctgcctagtttagaaagtagctgcttggctgaagtaaattcttaacaaattagtctcttctaggatacacattaaaatgagtggttggaatgggaagaagacagaacagaaagtcaagaaactccgactagtgagactgaagtgaggctacaatggcatgatgggtgcgaaagagattggtaaactgtaaaatcctttagagaccgtgtggccccttcactgtctaggccagtggttctcaaagggtagtgtgtgtcagaattacctggagggcttgtcaaaacacagatttcttggctcactacttctgattctctaggtctggctggtggccaagaatttgcatttctatcaagttcccgtgtgatgctgaagttgctagtccaaggatcacaatttgtgaaccactggttgctggatgagtaaaatccattgtgtccacaggaggcatacaatagacactcagatggggttgttattattactactctccatatcttggtaaccccaacgtttgctctcttctgcttccagattactcagcacagtttggctgagatttatgcaaagagagacagcattccctttccacacatctatatgtagcaacctcctgccattaataccctttcttatttaaaagctgcttcacagtttgtaaggaactctcacatacgttattgtgtttttatatgaaattcttcccaatttctgagcataaattatgccaagtaaagtctcattaagaaataatgcacttaaagcgggggacggggcgatgaggagagaacgccccctccccttggcatttgcagctctgaatgtaggcatagatttaactcagaccaagtatcctagaggggataggtgtctcccttatggctagaaggtgcaaagttaagagccccaaaaagcagtgataataaacatccctcttgtgctccttctcgccaaataaagcgaatgggtggaggaaatcctgggcgagccctcctcggcagggtccctcaagctggagccgaaactgcgactcccacgcccgccgcccccgcccctgaactgcagcccgctctctgcaatgcaaaaacgcagcagcatcgtcctccagccctctcctgggggatcgcacggtgcaaccaaccccaaaaacgaagctgcgcgacgccccctcagccccgcgggcttcccattggccggttgccgctgtcactccctcctagcctcgccttcccgctcccgggcggaggcagccgggcggggtaggttgcgcgctcgccgcgggctcgggccgcggtcgcggctttgcggcaggctgcgcgtcaggcggggagcggggcgcgcgggccggggagggggccgggcgcgctgcgggctccgcggccggaccatgcggggcaggggccggttgcagggccgggggctgcagccggcgccgatggcggccgactaggacctgcccggccggctgccccgcgccccgcct

SEQ ID NO: 3748 - DNA, 2300 bp, Homo sapien
gaaatcctgggcgagccctcctcggcagggtccctcaagctggagccgaaactgcgactcccacgcccgccgcccccgcccctgaactgcagcccgctctctgcaatgcaaaaacgcagcagcatcgtcctccagccctctcctgggggatcgcacggtgcaaccaaccccaaaaacgaagctgcgcgacgccccctcagccccgcgggcttcccattggccggttgccgctgtcactccctcctagcctcgccttcccgctcccgggcggaggcagccgggcggggtaggttgcgcgctcgccgcgggctcgggccgcggtcgcggctttgcggcaggctgcgcgtcaggcggggagcggggcgcgcgggccggggagggggccgggcgcgctgcgggctccgcggccggaccatgcggggcaggggccggttgcagggccgggggctgcagccggcgccgatggcggccgactaggacctgcccggccggctgccccgcgccccgcctcgccccgcagcccggccggccgggagggatgcgctgtgccgcccagctcctctccgtcctgcccatgccctgaagcagaaagtttgggggccgggggttgtctcccttctccctcctgcaatgactgcccaaggactcttgctgcccagcctcgactgtgacctgtcttcgctccccaggtcgaaatgaactattccaagctataaccaaggctcccccttctcgcccctccctcacccgcctttaagaattttttttttaattcaagaaattgtggtctgccatctcccctccttgttaataatttagaccccaggcctcatatgaatataagagggggtgcggtcttccccaagacggcgcgctggaaggacagattccccttgccgacccacatacaccatgaagaggtgcagatcggacgagctgcagcaacaacagggcgaggaggatggagctgggctggaagatgccgcttcccacctgccgggcgcggacctccggcctggggagaccacgggtgctaactctgctggcgggccaacttcagacgccggcgctgccgcggcgcccaacccaggtccccgaagcaagcctcctgatttaaaggtgagcgcagaccatccccccggcaagcccagcccgcgacttagctctcgccaccccacgcagaagtgctttaacaggataaaagtgaggggggaagccaggcaaaggtcagagaggatgagcggatgctttgctggcaccccaggggggacgtcaggtaccatttatgcctctgtctttcagctccgtgtcaggtctctgtgtttgttccccattattcagcaagcgttttagtgactcacccatccgagattgtttgaataatgtgtgaagtgttattcgcagacaaagggctggagaaatccaagatgctaaccaaaaagtggacagcaggtgaccattagttttccttgctgagtaagtctctacccattgggatctttgtgtgtgtgtgtgtgtgtgtgtgtgtgtgtgtgtgtgtgtgtgtatgtgtgtgagacggagtctcgttctgtcgcccaggctggagtgcagtggcgcgatctcggctcactgcaacctccacctcctcggttcaagcgattctcctgtctcagcctccagagtagctgggattacaggcacccgccaccacgcccgggtaatttttgtatttttagtagagacggggtttcgccatgttggccaggctggtcttgaactgacctcaggtgatctacccgcctcggccttcctaagtgctgggattacaggcgtgagccaccgtgccgggccccattgggatctttgagcgctttcctggatgaagctcagtttgccgatctgtgaaggggcgggggggggggggtggtggcgggggcggggggggaaggtggatttcctgccgttaggtggagccagaggttaagatagtgcttggagatctctgcctgcctgctgaaccaacccccagggtggagaactgacaggtggtggagcagtgcttgggctggtttggggcctcagttcaagttgcatacatgctgagccagcagctagaaccagaagccgaaagaactgttcacatggagctgtttattttccggcctgaggttgccgagacaattggcgagctgtcttgaatatatctctatcaattaaaacagcagctgagataaataatgcacctttgccggaactgccacagggactgcaggctcaggcttctcaagccagctcaccgtccagctgagcgagatgtc

SEQ ID NO: 3749 - DNA, 2300 bp, Homo sapien
tggggcagagcaaggctctgagcaggaactcacgggtgacctgtctggtgttgtagaggctggtaatttgtgctggcagcaccctagtggttgcgatttgttttctctctagtggtcctagccagagggtaggaacagagctgaacgattatcaggctaatccagggttgggggttgctgggagggcatgtaagggtgacaaaggagttgggggtttgtttgggtcagagaatgctcaaaaggttggaccttgaaacctcggctagcagagaaggaggtggggataggagaaggctgatgaatgtggagaaaaggagatgggggtactgagggaatgagggagcaggtacattaagaataaagaggagtgagagagacaggagagggcattggagtttacaatttggggggtgggatagggaagacaaaggtcagagtatactcatagagcatgacagacaaggaatgaatggaaagataatttgcagtggcaagagctgagaggctaggttgtgggatgggctgtccacatgacatggagatgcccccttggacagtggtcaggaaggagggcagcaggtctctttgatgactggagggtgggggagaagagtgcaatggcagggacctcgaaggccaggctgaagcaacactgagtacagtagaatgctggtcccgtctccagagggcacaaaatgagggaggaagaggaagaaaaaatcactgcgattaatgagggctccggggcaagtggagctgcagtaagagcctgcaggggcccaagtgctagactatgggcaggaggcagcttgtttgttgtggaaggaggactctggaaggtccagtgggagggcggatgaaagagaagacagttcaagtggaagtgagaggagacatgatggaagaccaaacagttctacatttgggggatgtgaggccccgtggattttccagcgtcagagttccaagggaaactcagatataaagttgtttttaccttagatgatcaccagagcagatccatctccacgtacagttttaaattgtcctctcatcaacacagactgtttctcaagttcttgtgcatgtttacatttgaaaatgtttggatgttcattcattcaacaagcatttgtgtgtatgccgtgtgcctggcactgtatagcagctcaggtttggttttgcacttttctaacgtagaaagtgcttttgtagacatcatttcatgaattcattaaagcaatcctgtgagatagctaagccagctgaagatatcccaatttttttttttttttttgagagagtcttactttgtcatccatctcggctcactgcaacctccacctcctgggttcaagtgattctcctgcctcagcctcccgagtagctgggattacaggcactcaccacctcgcccggctaatttttgtatttttagtagagatggggtttcaccatgttggccaggctggtctcaaactcctgacctcaggtgatctggctttcctcagcctcccgaagtgctgtgaacggggcgtgagcagggcatctggttcagaagctgttgaactactctgggggtggggcggagtacctgtattctggattggtttcaaagatcaagccacaaaggtttctgatgattctatgtgggcatgacagaaagagagaagtcaaatgtggttcacagatttgcggcctggcagccagaaagaagaaatggtcaataactgagtcaaggaagatggcaaatagaatgagtacctggcaaggggtgtgaggtgggggcggggggtgggggcagaaatcagagctaggtttggggtaccttcagtttgaagtggctattaaacatccacgtggaaatgccaaataagcagtcagctgtacgagtctggagttctggggagagatccaagctagaggcataaatttgggagttgtcagcatatagatagtatttaaaatgatgggactgaaccatttgcaagcctagcctccactggggagaagtctgttctcagagtgaggagctctgcacgcgttggctaaaagggtggcgtggctttgtgaaattgagagctggaggagcccagcagaatgaaccaggttgttcagcccttaatgagcagacactctgcatgtagaggcagccaggcccacctctcatgggtgagtcaatgaatacattttaaaaatcaaattagaaaaatcctgtcaagcaggagtctctggtatgcagctattttatgaggagggaaaacgtgaaccttgctgtctttggttgcctagggctccca

SEQ ID NO: 3750 - DNA, 2300 bp, Homo sapien
ttgtgaagcggcacggacagaacatggaagccgcacagctagcaagtggcagggtgtggattttagaccaggtcttctgactcccaagcactctgtgggccactgaaaggctcatccagtgcccagcgagcccagctctggcacatcttcctgccagacacattcaccttaaccccctgtctttacgccgtcctcccatcacatttgtggaaacagtctcagcgcctacagtgacttgaccaaggtcacttagaaagcatggaagtgagtctcacgcccagggctctacagggcctttcccaccatgccaccatgctttgggctatctgttccccacccccaccacaggaagctctgcatccttggcagatttgggaacacgtctcatgtataaagacgagcaggcttagaaaagcattgctctgctgctagcttgcctggcagacatctccctggttcttgtttgctacttttctcctagtgaactattggttccctcctgaacccctgttttcctgctgttcagttattgtgctgatgggtaagctgctcttggagtggagctataaccttccattagggagctgccaggtgcctgtgttgggggcagctctccccagttcattctggtggtgcagcatggccttgcaggaaactctttctgttgcttctgagccctcctgatcccgggaagcacagagagacctaccatgcagagtgaaccccagggctctcagctcactcggcccctccccacctgtctcctgctgccactgccttctcttccttttcctctgcttaataagaaaaagtttaaaatgttagcttgggctgggcatggtggctcacacctgtaatcccagcactttgggaggccaaggcaggtggatcgtttgtgcccaggagttcaaggtcagcctgagcaacatggtgaaaccccatctctgcaaaaactagctagacatggtggtgcacaccagtagtcctagctacttaggtggttgaggtgggaggattgcttgagcctgggaggtcaaggctgtagtgaggtgtgatcgtgccactgcactccagtctgggtgacagagcaagatcctgtctcaaaaaaaaaaaaaaaaaaaaatcctagcttggtggggcctagcctggagcgggcagagaaggggtatcttggccgggtgcagtggctcatgcctgtaatcccagcattttgggaggctgaggcgggtggatcacgaggtcaagagatcaagaccatcctggccaacgtggtgaaacctcgtctctgtactaaaaatacaaaaattagctgggcgtggtggtgcacgcctgtagtcccagctacttgggagactgaagcaggagaatcggttgaacccaggaggtggaggttgcagtgagccaagatcgcgtcaatgcattccagcctggtgacagggcaaaactccatctcaaaaagtgaaaaaagaaggggtatcttgagtatgagaagaccaagctgtctttgtttctacctgagacagaactgcagtggctggactgcctttcatggcagctaaatgaggtagatcatttcattgttttacgatgtcagtattgagggaggatcagtcttatgctaggcacagtgaatggtccagatgaacataagatctgatccctgccttatcatttaataggggcataagacctatttacaaataacccttatgcaagaacagtgcttggtgcgaaaatataaagtcaagatccagtaccataggagggggatcatttgcagaagtaggggagctgccagaagtgttccctggccctacaggtcagagctggccccagaaattgggacctatgtaatatgctttgccaggcttcttcacaaaccccaagtcatcagccaaccacaaatgtttgtatagtttccatgagcccagggtatgaggactcctgatctcagtgattttggcctgcaagccctggcactggctcccagagatagcactgggcccttatctcttcacaccttcttgaatttgggactacccaatcaacgtgacgcgtgtcggccatcagtatttaagcctggagttcctcaccagactcaagtgggtgcagaatccatgtctttctgaacgacagttctgctgtgagaagctgccattagagagatccagcaggccccaggactcagctggccagccggtgacactgctcactgctcattgtcctcagctgtggacctctgtccccctctgctggccactcacagaatttcctgctggcactgtcaagatgaagtccaa

SEQ ID NO: 3751 - DNA, 2300 bp, Homo sapien
aggtcaaggctgtagtgaggtgtgatcgtgccactgcactccagtctgggtgacagagcaagatcctgtctcaaaaaaaaaaaaaaaaaaaaatcctagcttggtggggcctagcctggagcgggcagagaaggggtatcttggccgggtgcagtggctcatgcctgtaatcccagcattttgggaggctgaggcgggtggatcacgaggtcaagagatcaagaccatcctggccaacgtggtgaaacctcgtctctgtactaaaaatacaaaaattagctgggcgtggtggtgcacgcctgtagtcccagctacttgggagactgaagcaggagaatcggttgaacccaggaggtggaggttgcagtgagccaagatcgcgtcaatgcattccagcctggtgacagggcaaaactccatctcaaaaagtgaaaaaagaaggggtatcttgagtatgagaagaccaagctgtctttgtttctacctgagacagaactgcagtggctggactgcctttcatggcagctaaatgaggtagatcatttcattgttttacgatgtcagtattgagggaggatcagtcttatgctaggcacagtgaatggtccagatgaacataagatctgatccctgccttatcatttaataggggcataagacctatttacaaataacccttatgcaagaacagtgcttggtgcgaaaatataaagtcaagatccagtaccataggagggggatcatttgcagaagtaggggagctgccagaagtgttccctggccctacaggtcagagctggccccagaaattgggacctatgtaatatgctttgccaggcttcttcacaaaccccaagtcatcagccaaccacaaatgtttgtatagtttccatgagcccagggtatgaggactcctgatctcagtgattttggcctgcaagccctggcactggctcccagagatagcactgggcccttatctcttcacaccttcttgaatttgggactacccaatcaacgtgacgcgtgtcggccatcagtatttaagcctggagttcctcaccagactcaagtgggtgcagaatccatgtctttctgaacgacagttctgctgtgagaagctgccattagagagatccagcaggccccaggactcagctggccagccggtgacactgctcactgctcattgtcctcagctgtggacctctgtccccctctgctggccactcacagaatttcctgctggcactgtcaagatgaagtccaaggaggaagagactgctgtgagtttcccatctgtgctttatcttgggtgtttttgccagggcaatgctggcagagactgggaagcagaagctagtgcagaagtggccattggtgtccagggcagagactggatttctgggacaggatctcagggcagaagaattcccctggtgaggctggctgctgtcagcttcctccaggtggttattggagtagagaaactgccttggaagtgatggtgccttaagccaacgggcagggcagcagggagaggaggagaggactctggctggagctggctgtgttaggatctgccagggagcccccctccaggctctagtcttttttggctttggagagctcttcgctatcctggaaggctggctgggaggctcacttccattccgaatccatgagactgctctgtttgtgagaggagcttctgatcatgggaggcatttctgtgagatgggaggggtgaggtggagtgcctgtcttctgggtggttgaaggatgcaggtgcacatgtcatgtgtcctcgtgcacatccctttcaaccccctttgccccccacccccacccctcctcattgatgcctgtcacacctgggtgtccttatgcacacaactcacagtggaacagctggacttgtggaggggcatctcatcagagctcggtcctcccgcgctcggtgatcctccctgtctcctgccagatgggaaggagcagcccgtgagccccaggggagggggaaatctcctagagcaatccgcccctaatccccaggctgtgcctcagtctggagatggcggctgcagagtctgggaactcaggcacacctgctcgcagcccagtgctgcccagggtctgtgaccccgggggcctgacacagtccgcagacagctggggcctcagagccccgggtacctcatcgccggcacggcttcgggaaacagtgcccacacaggtgaggcgtctggtgggtggaaggagagaatttcaccgggcggggtggagttgggggatgggaa

SEQ ID NO: 3752 - DNA, 2300 bp, Homo sapien
aggagccacggcaggtggagactttgctattttacactcctgtatagtcctaaaacacttttgcttttcacagcatttcacatccatttcttattagctcctcccactctccccctaagtagttgggacagactctgtccctgttacaaagatgagcaaatggcagtgatgcagccagactcagaacccattttcttttcttttttttttttttttgagacggagtctcgctctgtcgcccaggctggtgtgcagtggcgtgatctcggctcactgcaacctctgcctcccagttcaagaaattctcctgcctcagcctcctcagtagctgggattacaggcgtccgccaccacgcccagctaatttttgtatttttagtagagacagggtttcaccatgttggttaggctggtctcgaacccctgacctcatgatccacccgcctcagcctcccaaagtgctgggattacaggcatgaggcactgcacctggccccagaacccattttctagatattctttctcccaagaagacagtgaaagagagctgggcatctgtggaaagggcagcagctttataagagagacaggttctgggctgggcgtggtggctcaagcctgtaatcccagcactttgggaggctgaggcgggcggatcatgaggtcaggagatcgcgaccatcctggctaacacggtgaaaccccatctctactaaaaatacaaaaaattagccgggcatggtggcaggcgcctgtagtcccagctactcgggaggccgaggcaggagaatggcgtgaaccccggaggcggagcttgcagtgagccaagattgcgccactgcactgcagcctgggcgacagagcgagactctgtctcaaaaaaaaaaaaaaaaaaaaagttctgtaacatcaaaggccatgtgttgcctataaaacataattttgggccgggcgcggtgactcatgcttgtaatcccagcactttgggaggctgaggcgggtggatcccctgagatgaggagttgaagagcagtctggccaacatggcgaaactccatttctactaaaaatacaaaaaaattagccgggcgtggcggctcatgcctgtaatcccagctactcaggaagctgaggcaggagaatcacttgaacccaggaggcataggttgcagtgagctgagatggccccactgcattccagcctgggcgacagagaccccgtctccaaaaaaaaacaaaaaacaaataaaaaaaaaaaaaccgttaattttgtgtagttctagcaatacagagtaaatttgttggtataatttctgaaataaatttaggccagcttgattgcaggcattttttctcccaggggaaaaaagggattacgctgcctagattcagattcagcgtttaatgagcaccttctgtatgcttcgcactatgccagcttgccagacgtcatcttgtatagctctcacaaaagacctgagagtagctgtgattacccgctttttgtcggcgaggacactgaaggtcaggaaaatggagagatgggctttttgctgtcactgcagggaacaaggcaggaagaagcagcctaattgcaggttagggttttaagtcaggctactgggacagttaagaccttggagcagatcacttaagggagactgtgggtatgaaaggtcagaaattctgagaagcagagtcctgaaggtatgagcacctgctgggaggtcaaggggggatgaggggagacccaaagcaaacataagagggaagtcctgacttcaggagtgattagggatggggttgtggttgtccacagcatccccagggggaagtgtaacctggaaaagccccagtggaagcccacagaggagccgccctcccctggctcctgagtttggcagggctattattttcaatcgtgttttccaataactttgcaccttggcagaatcaagccaagtgacttatgcctgtaattggcagggactgtttccagttctggtgcatgtgactgggccactatctttgtgtttaaccccttcccccacatatatctgaccacacccctgccccctcccatacatactaagggcaaatgatctgacccagccttgcttggggtgtgctgtgtgtaaaaatacatggggttgagccatttcctgctgcttccgttgttgtatggcgataagacactggggactcagctgtggacagaaagatcctccaacaggctgagaggaaccaggcaccaggggagcaggtctcaggcctccccgctttcagcccaccttacattt

SEQ ID NO: 3753 - DNA, 2300 bp, Homo sapien
gctattattttcaatcgtgttttccaataactttgcaccttggcagaatcaagccaagtgacttatgcctgtaattggcagggactgtttccagttctggtgcatgtgactgggccactatctttgtgtttaaccccttcccccacatatatctgaccacacccctgccccctcccatacatactaagggcaaatgatctgacccagccttgcttggggtgtgctgtgtgtaaaaatacatggggttgagccatttcctgctgcttccgttgttgtatggcgataagacactggggactcagctgtggacagaaagatcctccaacaggctgagaggaaccaggcaccaggggagcaggtctcaggcctccccgctttcagcccaccttacatttcccatctttcctatctcctgtgaccttttcctcctttctctccctccccatcatcctttcttagtctctcttctcctttccttgtctctccgactttggtgccaccctgatgcactcgggaagcctgcccgcctggtggggagtgaagggggctgtcatttccttcctacgcattcaccctctgcaaagctgggcggctagtagcctcaggcccccaaactggtccctgcttcccttggcctttgagttacttctggggctttagtcctcggggacctggccagcagggtgggggtggggcatgctcctctcccaattctcggatactaggaaggactgggggcttccaccattatgaagcggaaaaggttaccaatgactctggagagccgtaaggtaatggagggcctgggagaggtgtcagcagaggcagggtggcccgctgagctgcgttgttagtgaacatggggtggcgagggcaggcaggcagggcacaaagtgtaggcggtcagccctgagggagaggcctgctcaaggcaggagccttatgaagtggttgagtccagagagaaaatttgtctcattcctcagaaatccaaccccatgactccagtgaggcctcagacctgcctggtccatgtgctggagctttaagagctctgggctggggccaggcgtagtggctcacacctgtaatcccagcactttgggaggccaaggcaggcagatcacttgaggtcaggagttcgagaccagcctggccaacacggtgaaaccccatctctactgaaaatacaaaaattagccaggcatggtggtgggtgcctgtaatactggcttctcgggaggcagaggcaggagaatcccttgaaccagggaggtggaaggtgcagtgagctgagattacgctactgcagtccagcctgggcaacagagcgagactgtgtctcaaatagataaacaaacaaataaataaaagagttctgggctggaggttctgtcccttcctggccgtgtgtccctgaacaacttgtttgacctttctgggccaaaagaggagcagctctgcctagactgcattttggggatgctgtggggacggggtagagagcagatgtgaaagccctgtgtaagtggctgtcagggatactgctcttgtggtggttgtcttcttttggactcctgcatccattttctagatagaaaaaccaagtccagaggcatccaggggcactcctatggtcccagggtttacccatgcttcctctgcctgcctctttccccaggtcgataagggagacctggtggccctgagcctccccgccggccatggtgacaccgacggccccatcagcctggacgtgcccgatggggcaccggacccccagcggaccaaggccgccattgaccacctgcaccagaagatcctgaagatcaccgagcagatcaagattgagcaggaggctcgcgacgacaatgtggcagagtatctgaaactggccaacaacgcggacaagcagcaggtgtcacgcatcaagcaagtgttcgagaagaagaaccagaagtcagcccagaccatcgcccagctgcacaagaagctggagcactaccgccggcgcctgaaggagattgagcagaacgggccctcgcggcagcccaaggacgtgctgcgggacatgcagcaggggctgaaggacgtgggcgccaacgtgcgcgcaggcatcagcggctttgggggcggcgtggtggagggcgtcaagggcagcctctctggcctctcacaggccacccacaccgccgtggtgtccaagccccgggagtttgccagcctcatccgcaacaagtttggcagtgctgacaacatcgcccacctgaaggaccccctggaagatgggccccctgagg

SEQ ID NO: 3754 - DNA, 2300 bp, Homo sapien
catacttccttttgagaattctaatcatctggatgagcccccaggaatagaagcagatttcagaggggaaaggagatagcaagtcaaggcaactatctctgggcctcatcctatttgcacagaaaacccacagcaaaaggggaggctggtggagggaagaatgccaaaccagctgccacctcctgtggccctccaaatttgggagcgatacattggtttcctgtgtaagatggatcctctccagtcacaaaggagataaagagctccatggagggatggagacatctgtaactcacactagaaaaataatcaaaggatcagtggaagtagaaaagtgggcagccactgggggtgggtccttctccatcctcagcatgccctggatacacaggggaggcaccatcctcctgaaggcctgaggggaaggctggctctccagcatagctagaatccatccagggccctaaactggctggcagaaggggtttccctcagggaagaggatccaggtctattgtcctctattctcttcctcaggaccagggtctaaatcccgccactttattaccagttgtgtggccttggacagaataatactcatttcacaggattaggttatcaagatggccaaaggggaaatgttccctttctgccatttaaagcaagaaggaaaacctatggccattctcatttcactgtaaatgagcactcagagtggagattctggacctagcaactccaggcctcaaaaactaagtcaagctgggcgcagtggctcacgcttgtaatcccagtactttgggaggccgaggcgggcggatcacgaggtcaggagatcaagaccatggtgaaaccctgtctctactaaaaatacaaaaaattagccgggcgtggtggcgggcgcctgtagtcccagctactcggagaggctgaggcaggagaatggcgtgaacccgggaggcggagcttgcagtgagcagagatcgcaccactgcactccagcctgggcgacagagggagactccgtctcaagtcaaacctcataacctaccaccagtgctcctggcaccaaaatcacaagaaaaccttgggtggagcaaccattttcagacttagggacacaggttagatagtcggcatgtaaaaatgttaaataaatatgtatcccttcgggttctctccacctccagccgacacatcctaaataaattccactaagtggttgagggaatctactaaaccttagaagccctctttttttttgaaacggagcctcactttgttgcccaggctggagtgcagtggcgccatcttgattcactgaaacctctgcctcctgggttcaagcgattcttctgcctcagcctccagagtagctgggattacaagcgcgcaccaccacgcccggctaattttgtatctttagtggagatgggatttcgtcatgttggctaggttggtcttgaactcctggacctcaagcgattcgcctaagaagccctctttgaggaagaaggaagaagtttccagggccattggattccaatatccaagtaaggttgatctaactgaagacaagtgaactcgaaccataggacagctctgcactaaccctcccactaggctggattctgcctctgttccatcccagctccctttctcctttatggactcaatgaagtggtcaagcaattatagattttggcttgggacaagcaaattactcaggatgaagaaatactttggtgacctttagtgccctcagatcgccccttgccaactgagaacagagtacaataaaacaacagggcattaagcaggaccaagcgccactcagaggcaagtgcagctccaagggccctcagagtaagcttctgggcctcaggcggccttcgctggaatcccctagtccccattcctggtgggcgggttccattgacacctttcccggccacgccgagggggaggaggcggggcctggagccccggagagccaatgtggacggccgtggtcacgcgccgccgtcgagcaggccaatgggcgccggggggcgtgtccagggcctcgggctcagggcgtttataacaacttggaatgctgtgctttactgcgcgctctggtactgctgtggctccccgtcctggtgcgggacctgtgccccgcgcttcagccctccccgcacagcctactgattcccctgccgcccttgctcacctcctgctcgccatggagtcgctggttttcgcgcggcgctccggccccactccctcggccgcagagctagcccggccgctggcgg

SEQ ID NO: 3755 - DNA, 2300 bp, Homo sapien
tccaggcagatagagactcctaggaagaaagggaaatgtttggtgtttccgtgaaatttcatgaattcacaccccatgcttttggaatttatgagttctgattgaatagggaaaacagacacagacttcctctgtgaaggttctagaggtgcttactttgtaagtacagagaattcgaactaaaaaacagtggaatttttaagccaagaactcaaagtagtaagatgggcccgttggatggagtgcaatggtgcaatctcagcttgctgaaacctccgcttcccgcgttcaagtgattctcctgcctctgccttctgagtagttgggattacaggcatgcatcacggcacccagctaattttgcatttttagtagtgatgagatttcaccatgttggccaggctggtctcgaattcctgacctcaggtgatccacgtacctcggccatccaaagtgctgggattacaggcatgagccaccaaatccggcctcgattttatacttttgggggtggaaggtttgttctgttttgttttgtttttgagacagagtcttgctctgtcacccaggctggagtgcagtggcgcaatctcagctcactgcaatctccgcctcccaggctcaggtgaacctcctgcctcagcctcccgagtatttgggactacaggtgcatgccaccatgcctggctaattttttttgcattcttagtagagatggggcttcaccatgttggccaggctggtctggaactcctgacctcaagtgatctgcctgcttgggactcccaaagtgcctggattacaagtatgagccaccgcacccggccagaattatattgtatctttaccgatcaatttcaaaaccctggttgtgatatatactgtgctatagttttgtaagatgttgccattgggagaaactgggtaaagggtattttttcttacagctgcatgtgaatctaaaattttctcaaaattaaaactctagtttaaaaatatatagacatagatctatctatctgtataagaaactgaggttcagagtagttaagtaattttcagaggcaagattcaaacccaggtcttccagcctcccaagcctgcgtgtttcaagacttggctacatttgaaagaaccaggtaggaggaagatcccatcggccttgcagtccaccagaccaggtggttggttctctggcctcatgggcacctttgttactggggactactgtcctataaacggtattagagagtggcttgcaaggattgtttgtcaagccctgcgagttggtgccgaggacggagatttgatcatcaggtttccccttcctgaagctcgtgaagggtgatggtggcggtggtgggttgtgcatgtgtgtggcagatggaaaaacttcccgtgtgtgtttgtctatgttggtgtctctggctgtgtccacatgtctgtctgtgcatcactggtcagtgtctctgtggatgtgtctatttcgagggcggcggcagggtgatgtgtaagttatgcttccatgtgcaagtgggtgtatatgttatatttgaaagtacctgtgccaggtctgcgtgcatcacacccacataagttgttttcatgaggttaaactatatgataatacctccccccagcaaagctggctattgagttagcaggtcacgagctgagtctgtgtactgtagataaactgggtaattggactctccgcctcttcatccaaaacaaacacaaaagcccgcccccacaccggagggcgtctgtgcccgtcatctgggtgcttggttctagtgccctgctttccttgaccccctgtagacaaggtgagcgcttccgcggcggggcttctgtacagaggtcacagcacgctgtgtcccgggacgcacgcggattcctgcacaggtgtggtggctgcggatggggacggagcggagcaggctcgccggcctcctccccggcggcggctccgcttctccttcctgctgttcacttcatctcctcatctgcatgtgtgacagcggcgcgcggactggggaaggacagagcgccctctccccggctcccgtgcagcggggcgggggctccgggctccccagtgatgcgtcgtctgcgcctcgccgccgcgctccccgggcctggcagcgtaagtgatgcgggggcgggggcgccgagactgcggggagggggcgcggggaaagagaggcgtcgacgccgagagacgctaactccttcctccgcccggggactgcccggcaccccgaacccctgaaagccccggcctgcggcttgcttcg

SEQ ID NO: 3756 - DNA, 2300 bp, Homo sapien
accccatagaacaaacagagacaaacagcaagcttccctttggtttgggaccacttggcagcatgactccaatctccactatcacccaagcagttatggttcaggcaagctgtcagcttgaggtctgtagtctatctccagggattacttttacttgattcttaattacatactattctccatcctcccagtcccttcacacacacacacacatacacacacaattcctctttaattaggttgtagcagtctcctccaggtatatctaactcagttcatcatgggctgttctgatggacagcagtctgccctggccaacacttcattaggtgtgacaccttgcagccaatggtccccaggccaccttgttcaggaaccaaagtgcagcccagcagggcatctgggagacaaagggatagttgtggtggagaagtaatagtgatgaaaaggcttccagaacaggagtaggaagcaccctgcagtgcagttcactttcttatactaggatatgaaattaggagagggttaagaaaggcaactcatttacccaggtattgcctttgcaggtgacagattgatattcaagactcaggaaatagccagaataactgagtctcaacagatagcccattacctacaaaatcaatatggcctctttcttatgcaatgctccttttcactttttttttttttttttttgagacagggtcttactctgtcacccagactggaatgcagtggcatgatctcagttcactgcagcctcgacttcctcaggctcaaatgatcctcccacctcagcctcccaactacctgggaccacaggtaaacaccaccatacccggctaagttttgtatttcctgtagaggtggggttttgccatgttgcccagactagtctcaaatgatcctcctaccttggcctcccaaagtgctgggattatgggcatgagctactgcacccagcaattctctattttacttctttcttctaacattcactttctctttcctctcttcctgaaaagatggctagggaggaagaagggaataaatatttcctatgttctagacactcatggctgctttacctggtgatataaacctatattttaaaaagttgaggtataaattacacacaataaaacccacagtttgatggtttttgacaaatgtatacacccttataaccaccactccatcagttataacgacatgattcatcctcacacttaatccatgagagattggtgtcactggctccattttatagctgaggaaagggaggatcagaaagattaacaacaatagccataacaatggcaaatactatgagccaggtactgttctaagcacgttacacatattacctcatttaatcctctctacaaccccattggtcccattttacagacgaagaaacttgccaaaggtcacacagctaaagagttagagcaggatttctggtgctcagattaccttatttcccttacagtacctccagagaattttttttaagttccctcattagattttcttttatcccagagagaaaaatctccccaaacaaaactaaaggccatcggaaggaaagccatatcgatgctagcccccactccatccccggctttctttaaactacgggcagtcagatttaacatcatggatagaaaggttggtcttgaagaaaagccttgttttgctacccattaaacagtgggcttttcatctaagaaagtccttcaagccttctgcccaagtaaagtgatcaaattcccctgaggttcagcttgacctggtaaaacacgttgctttgtggaacgagtttcgctttgccagcggtgctgagcatttccttgggaatctcgcacccacgctggaccacactgatgcctcctctgtgcatagaaaggcaaaggtatggggtggctgtttgggaccttcatataaaaaggtcaacccacttctctgccttttacccacagccccacccctgaggagggaaaaatctgcaattgttggattagggctgaggtgcacatttgccctttgcataactggcagcgttgcaaaggacagcccctttctctcttccctccattctctcccatctggcagaggagtccggctccctaaatcttctttttgttggttagtttccatggcagttattgtctgtgtgtgtgagcgtgtccgccccctcacccgctctcctcgcagagcgggcctttgcagctgagactgggtggagggagaggcgcggagacactggggctctgacgagctggctgaggccctct

SEQ ID NO: 3757 - DNA, 2300 bp, Homo sapien
gtttgttgctttttaaaattttgaattagttgccaatttaaataattaagacatttcacataaatatccagaatattcccttcctcttgaaaagtctgatcacattcctgcatggatggtttggctgggctgggagctactacctcctctgtacgctaggcaagaccgtgggctcactcatacaaatggcctgacccccatgggtgcttgaatttgagactcctgatactttgggtgaatgttgtggatagttgcttagtttattttataatatatattgtgaaaggccaggcacagtggctcacgcctataatcccagcactttgggaggctgaggcaggcggatcacctgaggtcgggagtttgagaccagcctggccaacatggagaaaccccatctctattaaaaatacaaaattagccgggcatggtggtgcatgcctgtaatcccagctactcaggaggctgaggcaggagaatcacttgaacctgggaagcggaggttgcggtgagccgagatcacaccattgcactccagcctgggcaacaagagggaaactccgtctcaaaaaaatagtggtaaaatatacataacaaaatttaccattgtaaccatttttaagggtacagttcagtggcactaagcacatacatgctgctgtgcagccatcaccaccatccatcttagaacttttttcattctccaaaatggatattctgtacccattaaacagtaactccccattccccacagtctccagctccggcaacaccattctgctttctatctctgtgaatccgactactccaggtagctcatgtaaatggaatcatacagtatttgtccttttctgactggcttatttcacttaacgtaatgtctttaagcttccccattgcatagtttctggctcagatcattctagtgctcattttacagatgaggaagctgaggccccacgggagcctgccagggcagaggtagaattggatcctggatcttctgcttaggacactctccctaacgttgccccgttgaggtaaactgaggaatggagagaccgatatggcagaacaggaggatatttattttaagatatgcaccggctcagtggattcacatccaaaaagctgagcattgaacaaagacagagcggggtttttataagcgggcttacaaaagcaaaacaaaggcagttaaccatatagtgcataacttgtggccttgcatagctggtggccttgtagctgagacaaaagaaaaacaagaactagctaaatacagacatttgtaaaacatagttatgcttaagaagccagggaaaggagtaacagtaaaggaatttgtctttcttttttttcctttcaaccttgctctggaggaaggagtgggtgtctggagcccattcctttggccttggcttttcggacagccttatcttataactgtccttgaagtgagctgctaagcagaggaaaacttgcttcttttctttttaacccttgccttgcctgttacttttctcggagtgaattaatgcatatttatttttaaatttctgcctcagcccttcttagaccagatctcacctttcttttctagtaatgcaagtgagagcaacatgttcttcacagcagcaaagccatccctgttcatacaggttgtggagttacccttctctctgccaatttgaagggttgcccaacattaatctgggaagggaaaaaggctgcctcctaatcagaacagtaatgaacattaataatccattctccttcaagagacaaatttaaaaaaacccagtagcaataaactaaaaaaaaaaaaaaaaaaaaaaaaaaaaaaggacaaactcatcctttcccctccacatatttttagctaactcttgaacccaaggaggattttaccaatggctctccaggaattagagttgtcacaccagtctcctgttgccaggaaatgaggagagctgtcctcatccacatctgcagtacctagaatagccccctctggctctccagagattgattcattaggcagggttgtgtttaggtgacgcccacaaacgagaacattcatagcagccatcatttctcagtgaatgcggtcctgtaaatgctggcgatcttgtagcagtgctgattagcgagttgctccaacacctcctcataattttttcctgctcatcactcacctgctttgtcaaaatgaacaagaaggaagcatgattgagctgtgcaccgaggcggcaaggaagccctggatgaccctcttaacaggttcatttcttcttgag

SEQ ID NO: 3758 - DNA, 2300 bp, Homo sapien
ttattggcaattgcaactgcaaatctactatcttctcccctatgtaaattgcatttacatttaaattgtgcattcttccaaagaatggggttagtaaataactcaaagattaaatttgaggagaggaaattgtgccccacgtcaaacctgagactgaagtgacatctggcttttactatttccgttatttcagtttaataccagcatgtggcattaagggaagagaaattggatctacattttaatgaaaggaggaagctctcagggtttaggtaccttatcatgttgaatacctactcaattaaaacttgcttccctcaagaaatggaataaaatatctttgcagccatggggagaatgaaaaataaaaaacaagctaatgctcaggactgcacagataaaactgagggagatggtgtgctgcaagcaatgaaaccaaatatttcaggatagcacagagtacaggaattcataaatggaataatgctgacaatagaatcataactatgctggtggattttcaagagaataatttcaagcagaatagtttgcacataatatagggcgcaacccatagatgttgattgaaatcatctgatttaatccttctctacctagcttgttttaaaccccagagatttaaccaagaaaatattttagaaatgtctgtttcatcccaatagtctaactgtttaaatggaagcagttccacctgctggctgcttttttgttgaaagcaattctgggaaatgtaaacaaaatgcttgtgcctcctaataacccaagcctatcatttatttgctttgatggaaacaaatgtgtcaattttcaaagtctttgtttggtgaatgcaatgtttggatgttggtaaatatttgcattacatgtttgtttgaaaactgatgctctattcagaaactgtggagccatagcccttggagccacagcctgggagactcaatgagccttcataaccacccacccaaagacgttcagctctttcccagaatctggaaaggactgaaactacagactcccacgggcaagtgtaaatgagatgaagcctcctgaggaaaataccggatgtggaaactctctggggctagggctcatgagtagaataatagaaaacatttatataatgctttctatgtgccaagcactttatgtgtattataactcattgaataacatagccctttgatacaggtaccatttttattatcccccattatggacaaagaggaggagacacagtgaagttagtaacttacctgatgtgatgtcacccagctggtaaatggcagaactgggatttgactctaagcaggctgtctccactgtcctcttcacccctttcagatcattccctctatcctgcaatttaatgaaggcattgcgttttctcacagttacattttgtcttgcacacgtctttaaaatctaagcagtctttcttgaaagatgcaggctaatagtctcaccgatctttccttaaacaaaataagacaacaacaagaagtaggcttttgcgatgtagatgataatatctgtctcagctggcttataagagtatccagaggatgaagtgagatgatacgaacatgctttgaaaaggccaaatccatcaaacttctgcaatgtattattatttatctgccctccatcctgatttcttattttcttaattgaataatccttaacaaattaatacaggtttcttccgctttcctattttccctggagtagatggtcaaattgcccaactactagtatgggccttttgatgggtggtctagacagttgggtttgtctgatttctcctttctcttccttgtttcttgacaccatttggtttggtagcagctccttacttgctgtgcataatgataacttctccgcatctcttgacattgtatcatggcagtgtgcctatgaagtcaaccagtacctccttttgtttgaactttggttaaattaatcatctgatttgcacatcaatctgttgctatgggggttactgatgtcacactgtcagtattatgattaccataatatctaacaggcaaaaagggactggttgctagtggaaacctcagagtgaaactcacccagctttagtaaccaactcgattgcatagactttagataaccatgtgaaggggtaagtgaattaatcatccagttggattccatttgaatatttttcttccatatgtgtgttccctctaggcaattgtctagtgccacttgaaattgttgagggctctattggaggttatttttgggaagctggtgaa

SEQ ID NO: 3759 - DNA, 2300 bp, Homo sapien
tccctcatcccccacccccgccaaccttccagcttcagcctctgcccttacccccagcccatttccaggaggtaggaagcaaaagaaaaaagcatttccttccctctttccttcttccttccttcctctctcccttcattttggtataacttagccttttgtctttaatcctggagttctccggggctagaagacaggcagagacgaatgccagcagcagagatgcttcaggcagattctgtaagcctgttctccctcatcagggagcagctcagccaaggagcaaagtcagaccccctctagctccccagggacagaatagcccttctgacaggtaaacaggtgacctgggtagagagggcaaggccccaagataggagagtcagggctcccctttccttggaatgtgggcctctctgggcaactagggagggcaaaagtcttcctcggctggttcgcccaaaacctgggagaagcaagggcacattctatgctggcagcctctgcctgcccagctcatgcccacactcaggggcctttcctgggctttgggcagattgggtgggattcaggttgtctttatgaggcttgagcacagcttgagttcctcctcccatcctccaaccccttcctttgcccctacctcctagcccccaccttctacaatctgttatttccttttatatccaaagaattataaacagaagtccttccctcaagggaacagcaagattcagcaataaaggccagtggggtcacaaaggacagaagaaaaactccctggttctttgtcctcttggatagtagaggccttgggtgaggcaaagagatgggcagaaaaagttaccttgatacagaggccagagagcctcctggagggcatgtgtttccctagcggtcacctgcgaggctgcaatcctagaaaagtcacttctgtggcagaggatgaaattgtatccccggagactcagagatattgggtgttatgtcctgaccacacaggctcaccaggaggaaaggttaggaaagtggagaaagtacgtcctggggagcgggtggccgaggagagctttccccttgtgcgcctctcaggccttggcagggattgcagctgcaggggtttggcagtgagcccatccagagagcttcctcccccgggagaactcccttggctccagagggatactagatatcttgagccctggctttgggaacatgggtggggtcccaaggtcaaagtgttctgagtggaggtccagttgtcctctgcctccaagccggcagccccttcttcacccagggctgaggttggggccagcactgcagctggaattgtctgagcaggaggtagcagcttctagccaggcacaccccaaccccacattctattgtccctcagtttccttctcaggaaaatggggactttgctccttttagcatctcaggaagcagtctggacacctgtgccctcctctaggcccttggatgagcccagggaatagggaaaggccaaagcagccccagcattcgcagaccctgcgccctgggcctctgacttcgggccaggcttctgctccttctagggttggcctggctgccctgccttcccatcctctctccatggttctctcccagagactccaccttgaggtgggggccctgagctcttggggtgagggaggggcacatgggtagatgattctgtggaggagatcaggcctcttgttcttgctgcgtggcactgattcctccttgcagatgggtgagggggccagttttccccatctgtaaagcgaggacttcccatggccattttccctcttgggcttcaggctgctgaatggaagatcaagaagtgtgaagggtgcttggggtccttgtgacttgagtgttgcctaggaccctggcccacaggacccaaggggcttcttgtctcaggttgaaacctttttatcagaatgtcatttccttctctgctcccagggaagggctttttgcatgtagcatatgggttcatagaaatatatagggagattgttatttttaggaaaaaaaaagagcaataattaactaactgaaatacacatgaagtgttagagtgggatgcaaggagcactgagctgggagccaggtctcctggcttctagccctgcttggaaactaatgacctatgtgaccttagactagtcatgtcttatttctgagactcaggttcctcaactataaataggggattacataaatttcctcttaagtctcctttggagtccagggctctgtgagtctgggaagttgagcct

SEQ ID NO: 3760 - DNA, 2300 bp, Homo sapien
ctcatctctccctgctgcctccggttctgcctgtgctccacctctgcctccagtttctctttgtcagcattcttcttttctggctctctgctttctctctctcaggcttctcctaccctctcctctaagagcaaaaaatgcccatccaggcaagttgtagcctccatcaacctcagttttctcatctacccaatgggaataataataataaatatttgtgttactgaaagatgatcattaagggggacctagatgcatgacacagttttcactaaaaaaaaaaagttgcttttccccttctcgccttttttctcccattgagtttcttctgcatttccatctgctatcacctctgtcctcttcttcacaatttctctcagtgtctccattctgtgtctctcagttccatctccccctcactcctgttttgtctcccacctccttttattccctcttggttacccccccgaccactccccccaactcctgccacaggcggcagggcccaggctgtgctgacagcaagggcaggcaagcagggcgggtggctgtctccacttctcatcagaggcccaagaatgtgtggagtcatgagggacaatgggagcctgcggcaggaagaatggggcctctgttggggcagaagtttcccaaatccggctgaatgggagtacctgagggctagggaggggtggaaactcctgaagtggagaggaggccactggtggtaggtgtgggggatgggcaaggctctagaattggccaccatgggaattcttagcatctgttggcatttctggggagagctcagacctcaaaggtgactgcctctctccctggagtggccaaggaggaaagggaggaaagggatcctgggggacagagccaggggaagctaaagagaaaatgttccagtggccctgtgaggtggcccttatacacagtggatatcccttgggccccttgggctgctgggccccagttctcaccaccagcaagctgcagaaaggttgtggtggccccagaggagacaggaatcgtgggcatggccccatcttgaggagagggagtcctcgaggttctcgcccagcagtggcctttcactgcccaggttctcgggattggaggaagcagggttttcctcgggaaaggaggtgaggcttgacctgcttcctctttctccatatttcaagtgaggttcactccagcctgagacatgatggctgtccccacctccatccccagcccagtccctctggcccagacacaccttagagagagatgccctacttccacagcttacttggggcttgtcaggtgggctgggattggtaggcaggccaggggctgagcccttcatgtgcccagggataggcagctgggattggcaggctatggctgggaatccgagcgcaggactgggtgagggtgggtggagggggccaggctcgagcaggtctgagaaaggaaatggaaggacagataagtgctgaccttgtcctcccagggcaggggagtggtgggagcagaataggggtatgggtgaggagaggaaccagggctgcggagaaggggaggggggccaggcaggagaggggggcctgcagggagccgtctcaggtctcctgccaaaaattaaactataaaaaagctggaggggagcggcaggggaaggaaggagagaaaggagatggggagggagggagggaccaaacagcccctctgcaccaatagcccggcagggggacgtgagtaatacatggctggttcagagggagtgagatcaaaagccagtagatacaagaggtttgtgcttcaccgaccagacagccagaggctcaatgagacctttgttactcaggcccaagtcagggttgaaggaatacctggctgccccgcctgcccagcccgcccccacccccacccccaccgtcctcagggctgggggaggggccggtcacaagtgagtcaagttgagttgggtacagctcagccctggccggtggtgggcgggcagggggagggaggaggcctgccctcgctggggcgtggagcttctcggggtgagtggaggagtgagtggctgcctggaaggcaggaagtggctctgcggggaattgtgaggcggactgcgagggaaagggggccttgttgagtccgccaggtgagcagcccctgggacccccagcccctggcccagcatcccttgggagggagctgagggcattctgcctagagtccatggctttatgcagggcctgggtctggggttctgggggcccatgagagaggaaggaaag

SEQ ID NO: 3761 - DNA, 2300 bp, Homo sapien
ccccttttcttccatgcccctcctcaacccccatggggtgatggtgccccagcccaaagaactatggaactgggctctcccaagcccctgtggagtacctcttggaggaggaggcagacagagatgaagggtggggagaatggcttcagggacaccactcatttatcaaatatgcaccgagcacagacagtgggatgggcaccgtgctaggcaccaggagacagcactcagggaggcccagcaggcagtccagtgggaagacaggcccatatgcatatgactgcaattcagagcagtcacgtcagcaggactgtggtctcccctgccacccagtcttcatgtcacctcttccagggttacactgaatttgatcctccctagttgagggtctctccttcctcttcatgcctttaggatggtagtccccagctctgagactcctggatgttctctttgtgtgtgtggggtgcgtgggatgggggtggggggtggtggtgtatgggcaatgggaggggccctgagtctcagagagtgcccaatactacttggaggaagtgttatctggtgtgagtgtgtgtgtgtgtgtgtgtgtgagagagagagagagagatcctcttttcctgcctctgtggcagccccagtggagcaatggaaagccggcattgaatgactgagagatagaagttgtttgcagccccaggcctccgttgtgtcctcctggagggcataagccaccaaaattacccctaaagggggtttcttagaggacaatccctttcccctcaattcagagctctttcaccaggggttcccatcccagcctcaaaagagctgacttttcctccaaagttagcccttcttaaggctcaagttgagaaaagttgttcactggcagattaaggtatgtaaaaaaaaaaaaatcgtcaggaaagattaaatcagaccaaaagaagaatttgttaatgagggttgaggaaaggaaggcagtatacaagcacttccaaacggaggctgtggaatgttggtcggaagggagggctctcccttgggcccccagacgccctctcctgaccagctcagcactggcagggctggccagctcttgttccccgggggcaccctgttatggaccctttctcaggaaagggagcacctatccttgtctagctgccttcctgggcccctacccggccagagctcctcctccaggtgggctcctagctccggcctttcttaggcatgcaagggccccagggatggggaggcagtgggaggcaggcttatggccaagaggtctggccagacctagaccccacagacacaatggctaggaaggactctgatgtgtgtggggagtagctggtgtctcctctaagcctgggaccatgtttgcctccacatatactggagttggtggtttggcccacggacatggcttctcccaggccccaaactggggtctcctggggccctctgttccaagggtaccagacaaacatatgcacaggtgtcacaaacccctgatccctaacccctttacagccccttcctcataccactccataccatggggtataaaggaaacggaggaggcactccaagcgggtttcactcagcggggacaggaggatcggctacctccggagccaaggctccctctcacactccccccaatcccaccagcggcaaaatcctttaaaaggaacaaaggcaatgggggcggggagggggcttcctctttggtcgacctagggcggcggctgacgcagcccgccgccggtcagctttcaggtgagtgcctgaacccgcatcccgcccatgccttagggacccctcttcgcccagccaagcccggggcggggaggaaagtccccctcagccgcactcgggcccccaacccggccaaggggtcgccaactcgcggcactttctgcctgtttgttttcgctcagtactcacagtttagatgctaagccggctcctcttgcactcacttcctttgtgtctctctctctctttctctctctctccccctcaccaatctctttcttccctccttgtccgattctctgctgtagcttccagtggagaaaaataattattcttcaatgggttagcacggggcgcacgcacacacgcgcgcgcacacacaccccgccgaggtacccaatcaatgcacaaatcttcggggtccctttaacctctgcggatgactccgggagttaattatgaagcctatttcggcgcggcataaatatgcattaaggtaggaaataatcgatacgctgaacttctgggaa

SEQ ID NO: 3762 - DNA, 2300 bp, Homo sapien
gcaatctaaggaggtgctgggaatcaaggctcacttaagaagctccaaggtcccactcagcctatcacatcagtgcttctaatcttgacactgttggctcccttatcttctagaatccaatagtcacaaggctccatgaccctgtctcctacctatctctcaaatcagttccctcctctcctccctgctgccgctgtgtggtctaagctcattctcattttccactaggatcagcctccacgttgggggtcttcaggacccagcacctgcctgcctctacagtgtcacctccaccccagactttaagttctgacctcatggaactgtgggtccatattctgtcacccctgcactctgcacaagggattacccctcctggaaaaaacagggaaaatccttcctcctctctcttgtcccctcatcctgtaaccctcacctcaagcagaatagctcctcccaggcatccgtaacactaagcctcctcctatagcatcctaactgtttgcttccctgccgcattacaccaagagcttcttgaaggcagggactgggttatactcatcttatgtgcccagagccctggctatcatttggcacataagagatgttgagaaagtgtttgtggagacctcttgacttcacccccctagttccttgaaattctaccctttggccccactctctctaatccgccagtaaacagttccttggccatagtccttctccctttccctccctgccccttccaaacctctttatggcctcctgctccccaggcttctcaccatccactggactacagagccaggaggttgctgcacacctaaaggctctggatccatgcaccccgacaacacttggcagtttcatttttaggaagtgctgtgcccaggaaatctgcatgccttggcagagaaagcgaggtaaaaaaaaaaaaaagagttgggaggccctctgtgagatgtcaactacccacaggtcactttcatgcatgggcccagtgtcttccttcattctcctgtctccagctgacagtgggacctcaggcccatgtcttccagaaggaaactgttctattctcaacaactcacagtccccagggaaagggttcaggtagaagcacatgtacactgtggagcaccccctcctaaggagactttccctgtgggagaccccagactgcagcagccaagccctctggtagggcaggggacacagactgccttgatgaggtgccatagagccaaggcacacctcctctcctcacagccctcaggaggaagcagagatgagaggggcctggcggtggggcactgtgcccttcacccccatccccagatttttgttttgtttttttttttgatccttgaagtcagatgatgtgggtgcaatggccattggcctgagttctaatcatggctcgccatgaactcttgtggcactttaggccagttcaattgctttgctgggcctcagtttccccttctgtaaaatgagagtgccactagctgaactagccattctgtaacccttcttggatgattctcaaatatcctgtggagtttaattccaaaaggacaagttgaattatccttcggggagggaaatgtgaatgatggctggtaacaagggcttcattcaggtcctggagaggtgggaactttgtccggaaaggtaagtgacaagtcccactggatagggtagaaggggagcccgagggctactattgtcaagaaaatgaccaccaaaatctgtccatgcacattcgttcctagggcgccaggtacagggaggtacctaggagaggtaggagcaccgcttttagagacaggcaggcactctcagtgtacccctggcgccttggtgtcctggggtgatccagtccagaaggcctcatcccctagccaaggctctcagggccggttttagaaacgaaacaggaagaggcacttggaccctggttcccagagtgggagaaaggggtgggcacccgggcagagggagccctggggattggtagcggctgtgggcagggcgggagggccgggggcggagtcaacttgtacatgtgaaaaactctggcgggggccgggcattttccttcctcctcctcctcctcctcctcctccctcctcttccccaccttcctccactccctcccttcccctccccttctacctcctcctcggccagctcaggttgcagcttctctggggaactgctcacctttccggagcaggggaagctgccccgtgcccgggagggagcgggcgcaccgcggcccccaggacacgcgctgt

SEQ ID NO: 3763 - DNA, 2300 bp, Homo sapien
ctggctgggagagtaaggcgggctttctctggaggcaggaggatgggggagatggaggccaggcctatcctggcccttgccccttgctctggtctctgatctgggatgttctgtacgcccaggaccagaactgacagaagggctccttgtcccatcttatcacttggacatcctgagcctcctcagagagtgcagaccagctttagctgggcccccaaaaaaggtcaaaaggaaaataccagaagatgcaatatgcacctctattccttaagcctcaggaagccagagagcagcagggtggacatcagtaggactgaagtggagccacacagaggggctagataggaggtcgtgtggggtcagaaagggtcatctgtaggggtcaaggccaacatctgagcctgagtagtgcacctgccctacaaggctctgagaatcttccctgagtgatagagccaggaagagggccacaagcccctccgaaccccttccccacagccctggaggccctagctcaatgcatgttgcaggaggaacttctcattcgggttcttctcattccagtccacccctcactgtaggatggtgcctccagcccaaaaacctccacagacctcactgggggagtaattgctgggcaggacactgcccccactgcctcagcccatctcccgctgctgttgggccacatgctggctagaggaagagggtcaggtttcagctgaggcctcgagtccagctttcatatttcatttgctggtcatttgagggctcactttgtctcaggctttgggtcaggctctgggggtgcaatgacgagtcacgccacagtgcttgcccttaaaaagcccacaggcaaactagggaaatgacaagtaaacagttacaggacagggagccaagtgccctgccttgggatgtcagaaagctgtgggagcacagaagagggaccatcacctggctggggacagtggagtttcgggctagaggagatgcagaggtccccatggcaggatgagtagcacgttgttggtttctccctagtcccccatccatctgcttgggtaccaatccctgtattcctgttccctctgaaacccaagaaaactgaggaggaagcatgccccggggagtctggggctgggtgactggacagtctaggcttactctagtgtgcccagaaagaggacagggccaggcccaccccaatcatgctcaagtctaactaggacaggagatggcctaatgagaagatacacctagaaacaggtccctggcctgcctgaaagtggaaggaaaggcaccaacatttattgcacgtggcagtgtgtcctggatcttaaaggtgactaagatacagtctttgtccttgagggatctaatgtttccatatctgtagaggaaagaggtttaaacaagtcatcatgaagcagtggctcgatggcctcattcagtcacttgttcattcgttccacaaatgctgagtacctggtgggctccttactctgtgtaaggcatcagggaaacaaaaatgttaaggccccattcttgtcctgaaggatctcacagtctagttatgagtgtgtgctggctgctctggaagggacaaggaggaagcatctcattctacctagaggaagaaggtgtggtcatgcacagtctcccaggggaagtgacccatgagttgagtttgggagtggttttaccgagggaaaaattgaggaagggcatcccaggccaaatgattgcaaagctgtggggtgtgagtggagtttgctctgggaatgccaggtacatttgataaaaccagaccttctggggaggggtgagagctgaggctcaagaagacagggatccaaaagcctggtctgccaggccctggaatttgaactttttcctgaaggcagtgttagctttgaaggatttttttttttttttttttttgagatggagtctcgctgcaacacccaggctggagtgcagtggcgccatttcggctcaccgcaaactctgcctcctgggttcaagcgatactcctgcctcagcctcccaagtagctgagattacaggcgtgtgccaccatgcccagctgatttttgtatttttagtagagacagggtttcaccatattggccagtctggtcttgaactcccgacctcaggtggtccacccaccttgacctcccacagtgctgggattacagacatgagccaccgcgcctagccactttgaaagattttaaatgggcaagcgacatcatcagaaagcagctgagaaagttaagtctaggacgctgatg

SEQ ID NO: 3764 - DNA, 2300 bp, Homo sapien
ccgcctgccccaggaattcctacagaagctacagatggagagcccagatctgcccaagccgctcagccgcatgtcccgccgggcctccctggtgagtcccaagagggtcagaggacacaaggtggggtgatatgccctccccagcatgggcatatcagtcccagctgaggcctagatgggatttcgaggaagattcctgggcctctggtgccacctgctggcttgagtgcattcaactagctcgtcctcctacatcaacatccatttcctagatgggtctcacttgggctggaatgggactctaagcccacagtgggtcccacggtctccacatggttaagatcaataggccagctggcatgtgccttccagtcctaactgcctatcagagctgtttgggacatcttacaaaacacagactctacctccagacacctatagaatcagcctctccggctagggggtccaggaatccgtcttgttaagggttggatacacctgagctagaagtgcgctgatgagagacacagtcagagaggtggattctgaactggacactcaaggtacaatgggaaaaaaggcagcactcactctggaggagctcgtggtctcagtcggagacacaggtagtcaagatgtgcaacaatcccaggtgccacagctctgggctctacactcttggctgtcctgggaggaagaaactcacactttcacgagctctgtcctttatcacagggataaagggaaaaggagccccttccaccatggagtctcatcccttccctcccagaggctggagttgggggaggcgtcatgtctgtggagctgctaagggcttcaagctcacggcattctatgtctctccctctcagtcagacattggctttgggaaactggaaacatacgtgaaactggacaaactgggagaggtaagacgctgggtttggtcttctccgaatagccaggcaggatggcttggaggaggggcagacctccctagtcggccctctctggtcggccctctctggttggccctctcctggcccctgccccatagaggtgcacagtcttggctgtgcgctctggcccaggctttggcagggattgaagtgagctcagatcctgaaggagggcgtgaggatagagtagccatggccctgggcagaatccagtcttttttttttctgcaagtccttcttgcctgggttcaaaacctagctccaccatttactagctctgtgacctttggcaagttacatgacctctctgtgtgcctcagtttcttcctctgtccaatgagacagtaattgtcctatcacatagggttattgtgaggattgggcaggttactgtaatcagcttatgtacggcacacagacaatgcctggcacataggaagtgctgtgtcacttagctatttttgttgtcactgtgcagaggcctggggtgggtgaaggtttatagagagagggaacacacagccctttccctccaggagcccaaagaggtgacctctgtgtaaacatcagcatcgtataaggaagaaaaaacctggtgttatcatagacgggcacgcggcgtgctggggcttagaggaaggacggattcactccgactggggagtcattagggatgcttcctggaggaagtaggctttggaggaaacagcatgtcagtaaagggaggaagggcactcaggccccagtcgtagcccaggcagaggcacaaatggggaggcactggacagaggccagcagcacctgaatgcgcctggggccgctgtggccctccatcccagggcacctatgccacagtcttcaaagggcgcagcaaactgacggagaaccttgtggccctgaaagagatccggctggagcacgaggagggagcgccctgcactgccatccgagagggtacagcatcctaggctcccacgctcccctgggggcttcaggaggaggggttcaccagcctgcacccttgtgggagctgggggtagaggatcattgctggaatgggactcctggcgctgaccccaagaaaagagggtatggggacacatggggtcctagggacccaggtggatctgtctcctcacagtgtctctgctgaagaacctgaagcacgccaatattgtgaccctgcatgacctcatccacacagatcggtccctcaccctggtgtttgagtacctggtgagagtccggctggggctggccgcctctccctcttgtggtggaaacggggtgtgggtaggggagtgggaagctgagggagtgggagtagtgggatgagggcga

SEQ ID NO: 3765 - DNA, 2300 bp, Homo sapien
cccctgccccatagaggtgcacagtcttggctgtgcgctctggcccaggctttggcagggattgaagtgagctcagatcctgaaggagggcgtgaggatagagtagccatggccctgggcagaatccagtcttttttttttctgcaagtccttcttgcctgggttcaaaacctagctccaccatttactagctctgtgacctttggcaagttacatgacctctctgtgtgcctcagtttcttcctctgtccaatgagacagtaattgtcctatcacatagggttattgtgaggattgggcaggttactgtaatcagcttatgtacggcacacagacaatgcctggcacataggaagtgctgtgtcacttagctatttttgttgtcactgtgcagaggcctggggtgggtgaaggtttatagagagagggaacacacagccctttccctccaggagcccaaagaggtgacctctgtgtaaacatcagcatcgtataaggaagaaaaaacctggtgttatcatagacgggcacgcggcgtgctggggcttagaggaaggacggattcactccgactggggagtcattagggatgcttcctggaggaagtaggctttggaggaaacagcatgtcagtaaagggaggaagggcactcaggccccagtcgtagcccaggcagaggcacaaatggggaggcactggacagaggccagcagcacctgaatgcgcctggggccgctgtggccctccatcccagggcacctatgccacagtcttcaaagggcgcagcaaactgacggagaaccttgtggccctgaaagagatccggctggagcacgaggagggagcgccctgcactgccatccgagagggtacagcatcctaggctcccacgctcccctgggggcttcaggaggaggggttcaccagcctgcacccttgtgggagctgggggtagaggatcattgctggaatgggactcctggcgctgaccccaagaaaagagggtatggggacacatggggtcctagggacccaggtggatctgtctcctcacagtgtctctgctgaagaacctgaagcacgccaatattgtgaccctgcatgacctcatccacacagatcggtccctcaccctggtgtttgagtacctggtgagagtccggctggggctggccgcctctccctcttgtggtggaaacggggtgtgggtaggggagtgggaagctgagggagtgggagtagtgggatgagggcgacccaggccttgttctggaatcagattttcagatgctcccgtgcaggagtgggccaagagctcaggcttacgggtggctcgagccagggacctgtcccactagtgggcgtgggcccttcccagggaggggcttcctctcctcagcctgtgtctgggcttctggccaggggtcagcgtggggcaggactgagccacgctctgtgttccaggacagtgacctgaagcagtatctggaccactgtgggaacctcatgagcatgcacaacgtcaaggtgaggcctcaggggcagggtccccccatcttggcagccacctgtccagaagcccagtgtggggacccactctcaccaccagggatccggctgctgaggtggctcagaccttcccacgtaggaaagagggagagggcaatgccatcaacgagtccaggaactgggttgagcgctttaccccaagaacagacacacactgtctgccactgtctagctgttggtataaaacccactctcaactctgaacatcagtttcccagtctgtcaaatgggagtgtgagctacctgccaaaatgcagggaggcttctggggaagctcggggttatgaatgacctctcctggtgtttgttaaagaatcaaggctgggcatggtggcccacgcctgtaatcccagcactgggaggccaaggcaggaagatggcttgagcccaggagtttgagaccagcctgggcaacatggcaagacctcatctctactaaaaattgaaaaattagccgggcacagtagcgtgcacccatagtcccagctgcttgagaggctgaggcaggagggccacttgagcccgggaggttgaggctgcagtgagccatgatcacaccactgcactccagcctgggtgacagagtaaaaccctgactctaaaagaaaaaaaaaaaaaaaagggatcaagcacatatgtctccacataggcgggcatcctgacccccgtgctcctgactgagacttcgctggcctcccccacactcactgcgtcctctgcacccctgctg

SEQ ID NO: 3766 - DNA, 2300 bp, Homo sapien
tgtctcccttttcatttctgatttttttttttaagagatggaggctcgttttgttgcccaggctggagtgcagtggctattcacaggcacaatcatcatacactgtagcctagaactcctggcctcaagcgattttcctgtctcagcctacaaagttgctggaactctaggtatgtgccaccgtgcctagcttctgattttatttatttgggtgttctctttttcttagtctagctgatgatttgtcaattttgtttatctttagaaaaaacaagttttcatttttttcatcttttggtactatttttagtctctattttgtttagttctgccctgatctttattctttctttgcttctactaattttgggttcaatttgtttttgcttttctggttccatgaggagcatcatggagttgtttatttgaaatctttctactttttagatataagtatttatcgctataaacatctctcctagtattgcttttactgtatcctgtgggtattggtatgttgtgtttccattttcatgtttcaagacatttttttatttcctttttaatttcttcattgacccagtggttgttcaggtatgtattatttaatttccatgtatttgtatagtttccaggggtccttttgttattaatttctagttttactccattgtagtttgagaaaatactaggtaaggtttctatttttttttttttttttttttccatagagatggggtctcactctgtgttgcccaggctggtctcgagctcctgggcttaggcaatcctcctgccccccgaagtgttgagattacagacatgagccaccatagccgacctaatttttttttttttttttttagatggagtctctctctgttgcccaggctagagtgcagtggaacgatcttggctcactgcaacctctgcctcccgggttcaagcaattctcctgcctcagcctcctgaatagctgggattacatacgtgcaccatcacgtccagctaatttttgtatttttagtacagatggggtttcaccatgttggccaggctggtctgaactccagacctcaagtgatccacatgccttggcctcccaaagtgctggaattacaggtgtgaaccaccatgcccaacctagccagcctgattttttaatatttgttgggatttattttgtggcctaacatatgctctatcttggaaaatgttccatgcatatacattaactttaatcttcacaatggtcctgtgaggtagatattattatccctattttatggataagaaaactgaggctcaggaaggcagagtaacttgcctaaagtcacacagcataagtagcaaagctgagttttgagcctgcgttgcctgactccaaagtctggatccttcccatgagaatgtctgcctctcacattcaactccaatacacacatctaagactagtgcataagctgatagctgttaacattttcccccacagaaaatgcagctgaaccaagcctgcctatcttgtctatgagcagctgattctttgaatctaaagaattgatacaggacttgatacatgtggaataacagaaagaacctggaccgtggagtgagacaggcttagacttgagttctggctacacacttggctgtgccaactcaaggcggctaccttgacattataaggctgattttcttcaactgtaaaatgtcgatgtaggattacatgataacacatgcaaagcctctggtagaacactcagggcagcactgctcatgcttcttagttgccttcccctgatctggagtgtcaattaatcttggtttgagttcctcttgcccaccagtgcactttggtcccccattcagtcatgtagcaaggggctattcctccagctgttcttgagtaagcatggcacctcacattcatatagaatggttactaatagtcatccaagttattgagaaaaatattgaccacaatgtaccactctcccactccactttttcctaattaatctttcctttgggactcagctaagttgttcattctgctgggagtgctccacccacccagagctgccccgagtgcctgccttgtgttctctgcatcccctcaccaccttcctttgtgacaagcagctgaggtgtctgtaacccgaatcaatactggatcagctccttgaagatagagattgggtcacacaattatccttatatcttagagcacagcacctgcctggtacatagctggcattcagaaaatattagctacgcaaaaatgtgtttaagtattataa

SEQ ID NO: 3767 - DNA, 2300 bp, Homo sapien
ggaatgcctccctttatttttacttactttttatttttactttttaccattttaatcaagtataacttacacacaaaaatgcacaaatcttaaatctacagaccaataagtttttacatatatttacacctgtgtaactaccacctagatcaagcttcagaatgcttccagcatcccaggcactgggggctacctcattgtggcagggtcatttgttactgtggctagaggagctgagccagcaaggtgctgtagttggggaacgccatttagggaaattatggaaggatttcaggtgtttgggctagagaagcaaaatcattagggcaaggtcattttgggtgtgaaggacttacatgacagagcaattagatttgttctgtgtggggccgtggggagcagttacagggcgaagcatttcaattttgcctaagaccatttctacaaccagagctcatccacactgcaagcagagcccctaggaatatgcaaggtccccagcactagaggtgtcagtcaagaacaggactggcaagcattcaaaggcagttatggggaggggataggggactcaattggaggctattccttccaattctgagcttctatggttcctggagttctgtgatagtggcagagaagactcagtcaaaaacttgtggttatgatttgtttggtgttttttctttttttttcccccagagggtagcttttcagtttattacaattactgtgcaggccccccatcatcactatcgaataagtacttgtcattacccacagagtgatgagccagagggaccctggggctcccccttctctggggctcactgtccaagaagggatagggcagatgcaggggtgcggctatgagatgggaccagtacctgcaagagaaattggttgccccacctcatgccaagttgtcttggggacacccgcccacatacctcctcagtcttttcagccctggtccccctggtgggccagtggaaatgatgtcatggctcctgtcattaccagaagacctgggcagaggggacaccgcagggccttactgttctgcctccaggggccagatcctggctcccttaggagcgggaacacacagaacccaccagccagcccgaggccacctaatgaagggacagcctaggtcagctgcaggctcctcgaaggacacccagtctagagaataatcaacccctactcactgccagggatttatccatggaagaaagaattttccccagaactctttttaaatttttttttctaggagattatttcagaattcctcccggggttcctccaggacgcggcccttccctctctgccctcctccaactagttagaaggagagagagagagtcagcatagaccagcgtcatcctcctccttcccgcacctggccaggtggggaggagggcctcatctcaggcccttccagggagcttagtgtgaggaagatgttgagtttctagggttctccttctaaagggcaatgtgattaacctcttggggttctaatgaaagccatgcacgaatactctcccaaggagaaacatatgtacaacaagattttgccttctgttctgggggaaaggggggtgccgttagaccctcgaagtccatctgtgaagcgcctaggtttaaaggggtccgggtttcctccactgccacagcccgggtgcggggagagggcccctagccttatccggagatacaggatgtctcgggctctccatctgccgggctctaaaatgggcgctcggtccctgggggctgcatccggaggctggggggactggtcgagggagagcgggcggggggcagcgcggctcccggttggtctccgcagccgggggagggcgagcatgtgcgctcgggtaggagggggaggccggcgcctggcaccgcacggggaaggcgcgggagcggacgcactgcccacccgccgcagaggcgcccccgccgccgcccgggcccaagggcggggcccctcgctggggcggcccctccccgcccctccctccccgccgcgggcctccccagcccggccggccctcccgcgggcggcactcgggcaccgggctcgccgggaccagatccgcgagcccgtcagcctgcgccatgggctgcgacggccgcgtgtcggggctgctccgccgcaacctgcagcccacgctcacctactggagcgtcttcttcagcttcggcctgtgcatcgccttcctggggcccacgctgctggacctgcgctgtcagacgcacagctcgctgccccagatctcctgggt

SEQ ID NO: 3768 - DNA, 2300 bp, Homo sapien
cagtccttttccttcctttcctttgtagatttcctttccctggcccgaatctcctctgggggctctcataaacccaccctctccgtctgctccttcccttttcagcccatgcccatccattgttttggaaagaatgcggctttgggcccgttccttccaggagagacctgcgaaggaaaggagcagtgtcagtagaacctctaggctgagactcccagaccaggaagccggaaggtccggcttaagcccgaggtttgttctctcttgccccatgaagtgcaggctggagggactttgtttgctgcaggatttccggactttttctattggtttgtgtctgaaaataaacagtccagcacggaggaagatgggctgtgcatgtactcatgtgggtgcacacgcacacacacatgtgcaccccacctgcccttctctgacttttaaggtggggctgccttccctgaatggaattcttataaaattgggtgtgttcctgccagcaatgccagccaatcctctgtgaagcccttcccagcacccacctccctggaaagccccacctgagcgatcacgcctcttgtacagctgtttccacttggccttcactcaggcactctgccactacaggcctctgtgggtgggtttcctgtttcccccctcacactggaggaagggctgtgtctcccccattagggctcagcaggggctgttctctccccactcaggcctgactgccaggggccatgtctgaccttgacttctttttgagtgtgcagaaaggctcccaaggtcaccatagggaggtgccaacacaggggtggtttttgtctttcactcctgttaggtgacttgaggaaatactggtgagagccagcctgcctccaggggcagggaagggctcccccagaacaccaccaggcaggggctggcagtctgccagccttccatctctatcctatgcctctcccgtgggccaggaagagcccaatagctgggcgctctcaccagcctctgggagacatctgcagctccctgggcttcctgtctttcctaagtgaaaggaactgggctgaagttgcagcaagaaggacaatagttagacttgatgcggtacttcctggcaaccagggtggtgagacacaagcaggggcccctgagggaggtggtggaggcttccccaggcaacctcagaagcaggagccatttcccactgctctgaaggagttccgatttagcataaatagcagcaaactgaacatagggcttatgtgtacaggctgttcgtaaacatgtatttctcaatcaaaaggagatcatgtttttgttttcaagcccctgagaagagcctctgtgccctgctaggatcaacatcaccaaggcatctccttaggtagagacagcactggaaggatcaggatgccaggctccattctggctttgccccaagtccactgtgtgaccagggcagtctctcagtctctagtttacccctcagatctcttccagttctaacaggttacgactaagtgataacatcccccagcatgttttgtagagatgtgatgcccaaaagcaaagctgctttgtaaagcatcacgcaacccaccagcatgaaggagtgtgaggtgtgacactccagcaagcttactcccagcacctctcctgggccagcagagagtttgagtctaagctttgcatgcgacaaatatctgtcttttcagggacgcgagtatggtgatcaggcagcaattacagcaggcctccccactcctaccttggtcaaggcacctggcttcttaggttgggatggctcagcttttagctgggcacccttagaaaagagctgtcttctcccaggactatgcacatgcagtgtgtgcagaggccaggcgtgggaagggggagcttcagggcagggctctcctgaccctctgcctgctccccagcttccagtgcccatggctgtgctgatgctgctgtccaaggagcggctgctgacctgctgtccccagaggaggcccctgcttctgtctgctgatgagcttgccttggagacacagcctcctgagaaggaagatgcctcctcactgcccccaaagtttcagtcacacctaggtaggggctctaatgaatctgcatcctcacagcctcatgttgaggcttccttggtaacccctctcccagagagagtgaacctagatcacaggtgattttttttttttttttttttgagacagagtttcactctcgtcgcccaggctggagtgcagtggtgcaatctcggctcattgcaacctccg

SEQ ID NO: 3769 - DNA, 2300 bp, Homo sapien
agcttcatagaggggatgggatgtgagctggaccagaatctagaaaagcagagaggaaaatggaaaggccttcctgggtagggtggggcagtgaacagaatgagagcaaaggcacagagacaagtctgaacataagtgagactgaacgagctagaaggaatgtgaagtccagagtagacaatgatgacaaccattttattaaaaaaaaatagtgtctactatgtgttagctgctgtgctactaacaggcactggtttttgccagtgatctataagacaaggcatggccatcctctcctgggcttccagcctagtggggagggctagctggtcaacagacagtgtggtgagagcaggtgcagagtgatatcacagcacagagaagcaacccatccaggcatggggaccagagaggaacattactgatggaagtctaaactaggacctaaaagatcaatgggaaccagctggccaacatggtggaaccccatctctactaaaaatacaaaaattagccaggtgtggtggggcatgcctataatcccagcttcttgggaggctgaggcactgtactccagcctgggcgacagagcaagactctgtctcaaaaaaaaaaaaaaaaaaaaaaaaaaaaaaaaaagatgaatgatagtttaccagaaaagaggaggaggatgaatgttcagtggggagtgaagatgtgtgctgaagcctggaggtgagagttacggagggtggagggggagagagaagcctgagccattagcaggggcagagtctaaagggctctgcaaaccacttgaaagtccttggccttcatcctgaaggcagtgctgaggggcttgcgcagagagttgggctggttttgagtttactgtgtgccagtcctatgccaggctcttggcatgtcttacatcagagttacccacacggtaagtctgtgaaggaggtgtgatgctcatcttacagagaaggcaaccaaggcctagagaggttagagaacttgtctaaggtcacatggccagtaggtgacaacctgggcttggaacccaagtctgactctgaagcttgggctctgaaggtgtgcaccacactgccagactcatcagggcgtgtggctggtcagtgcaatgccaggacagcgaagacactagtctgcctgcaccagagggctagcctcaggatatcaggaaatctttctggaaaggtaggtagcagtcagaatgggaatggcgctgaatgccagggctaagcaagatgggatttaccctgagatattgatgagcaattaaaggtttcagaacaaggaaaggacaaaatgacagtaagacctaggcattcccaaagcaaagttacaggctcatgtctgagaaatccaaagtagtcctttctgccaggccatcttccagaggtttcccagaagcaacctaggttgtttttttttttttttttttttttttttcgttttttgacagggtctcactctgtcacccaggctggagtgcagtggtgcgatcatggctcactgcagcctccaattcatgggctcgagggaccctcctaccttagcctcccaagtagctgggactacaggtgcacaccaccatgcccagttaatttttttaaattttactttttgtagagaccaagtcttgtgatattgcccagactggtcttgaactcctggcctcaagagatcctcccacttctgactcctaaagtactgggatgtgccttccgaaatgcatatgccactgtgcctggccagcaacctggattgtaatgctggcttctgtctccttaacttgcttttaccaaaccaaaccttctctttttgttaggctgtgcaaccacagtgctggtgacaggggcaggagttggcgagatggtgctgcagatgctggttggttcggtatgtggggacctgtaagggagaggggagcatttggggagcactcctctgacaggtgagaagatgcagatagccaccttctgaactcaaactgtccctttcctgagtctccagcaaagccagcagggccccctgtgccgttgttacctgtttccgtttccaagccagccctgagagctgagcctccatatgtgggatctggagatgtaaacggatgcatggaaaagtccaaagcaaacacaagccatgtctgggagcagggccagagggggcccgtgggaatgctgtttagctctcagagcctgagatgggttggaactgcagtcagagttctttttccatcccttcggaacccaccactccctaccccacctctcacagcctctggc

SEQ ID NO: 3770 - DNA, 2300 bp, Homo sapien
accaatgcaggtctctgtgcagaaatctggggctctaaatgaattaccaaaccaataggaaagttaaaatactactcatgatgtagtgtgtcatctgaagctatgatagaatatattatttctaaaatagtattgagaagttaattgttcagtccatagtagtgtaagtgaagtgtggaggtcagccatagttgtctttcttcagcaggtactctaaccagagactgggttctgtggaaaatagaattatattcttggtttgggatcaacaaatgttttgttattgttttaatgttgctggcattgcctgaaacaaagtgccctgttattcctcttatgtcatcagaactctgcttactgaagttgaagtttaatcttaggatctagaattcttgtggttggtcgtgtattaagaaaagaaggtggtttgattttatttcttgtacttggtggaacctgttactatacaagtcatgttttgacctgtaagccgagcaaatctgaaaggtgaatcgttaatggtagtataattgtttcatttgaaactgtcagtttcttcaagtcacttctctgaaaaaaattatgatagattgatagcctgccagaaaatagcaatttctaaggtgctgccatccacacttacttattgtgaaatatgaaaatccagagtggtttgtatgagaggggaaatactggctctaagctttctacagaaaacaggaaattcatgctgttgttgacataattttaaaggaaacttttaacaagaaaattcatgagggatacaatcaaacatagttaatctcttgagtgctaatcatttgagtatagtccacatcaggaagttttatgaggttgaaaactttactttgaaatatttaattgggagactagaccatttctttttccaagtcattctgatttattgtcctagtaaatgtatgtgtatgcatatatactgatgtattgactgaatgtgtgtgtgtgtgtgtgtgcgcgtgtaaatctgttttcatagggaacatacattgatggctcctagtctattttatactaaaacttaaaaaaatttgctgcactttgcagttgccactttttaaaagattaatgctttgcacatttcagtaggccttaaagatgaattgctcaccaacattttagaaatacactgcttacatgtgacatactctaaacaaagtcatagtaaactgttctcttaggttcatgtattattgagcaaataaggatgtcctttcttaaaatttctacatttatgtttgcttttgtgtaaaatctttattagtttgtaagtttctcaaagaggaggtttatactggaagcagtatttctaaagtacagagattcgaccatggattgaatacagtagtggaggaatgctggtattgtggcctaatttatccttttaaactgtatgtcattagtattagccaaaacctcagagtggagtgtcttgggctgaatgatcttctcaactttgccttgtttcccatctcataaaggctccttctggttcttttcccttccaaggattgtgagtcatgctcacataggcctgggatcttctggatggggtcggggaggaggtgggggtttcctgtggctggcccagagttctagccaatggaatcattcaagaatgcctaaagttcaggggtgggaatgccatatattggtgttaatcacttggcactttcttgggcaccaatattagcactgtttcatttttaataactggaagcacttaatgattattttgtttgtttaatttcaacttaaggatattgagggtcagagaagtaaggtttatttcttgtttatgttttctggaatttatagggtgtttgtagaagggataaatgggttacctaatgagccattcttctaggctctgtaaggtatgcccttttggctaggatattttaaaataatttgcaagcttttaatattgtgctttgtagaaatttacgatttttaaaaataatttgcaattgatagattacacttaaatttataaagtatccaattttaagtttcttttctgtttggtcattgttgcttattgtctattgtgtaggggacacaatcctgacatttcattgttttgttacttggggcagtattaaccagtggcctttgtatgtacattcattgcttacatttattgtttaagtggtagagtagcatttttatgaacttccctgttcagtattagtgaaattgacagatgcgtatatgtaaagatagaaaagaaacgaatacaattaattttttattccttg

SEQ ID NO: 3771 - DNA, 2300 bp, Homo sapien
agattggtgatctgctatctctttgagatcaactaatttggagaagtgtgtgtgtgcgtatccttttttaagtcaaagtttacaaccttactgcaggtgtatgaggcagacagttctgtttatagactacctccttcctggaaaagtctcagcttcatattctgttgaatatatgcagaattcttagtgtgaaaggtgatgtaccacttcagatcagttttcactggagagacttgtaattggtagctgtagctcgtatccatccctagtcactttgccaggatgaatgctgttgggcagcagtagcctaagttacggaaggggagcagattgaatggggttttgagacatcttctctgataccttagctttccttctgctctggtcgctatccactcagtcgtgtgctagaaatgtttaacaaccaggatctctggggtgggggtgggggggagcgctgaatttgtagcatttgctgcaaatataaattataaataaaattctaatataaattagaattttatatcaaattctttgatataaattagttactcctcctgtggctgatttcaagctaccaccttagagttcagaaaggatgtgcacagttggctcagagccagtgctggcaaaccattgcatttactccacccaagagtggattttcacataatttctaaaataattttttcttatttatatactgacttttcaaaatacaaaattaaaatatcatgtctgacttcagtgatctttttctttttctttttttagaaatgagatctttcagtaatcctttaatttaattttttagagatggagtcttggtgtgttacccagggtggactcaaactcccgggctcaagtgatcctcctgcctcagcctcctgcatagctgggctacaggcatgcaccaccacacctggcttagtaatccttctttattaatggtttgtcacagtacgtttgtgatgttatattgctcatggcatactttatgtgttcgaacaaaggtggaaatttccattgatttttttttttttaaatgtatgcacaaacaatctggattttgaggagtacggtcaggaaaaaaaaaaaagaattagaggcccttgaaaggtcaaccgtaagcttcttagagttaaaatatgagtttaattttttcccacattttgacagttgaaattttgatagggacagtaaacctatgagcctctattaggctactggattttttttaactggaaaattccttgaagatttacatactatattacagattttaaaagtcaagactgacttaagtaaatcagaggtttggaattctggagctgtaactccaggctgttgatagtatcacttcagttccattcacccctgcattgtgtgacgtccagtctgacaacattgtttcatcctgatctgactttctactatgattcttaagttcttaaaggtgtccttttatgtttttggtgaatgtaagcacatttagagccactcagtaccacttctcaatacctctgaagcagtggttcagaaaaggagtgtccagcctttttgaacacacaaattgatcagtaagagttattgaacataaaaactttccctattaaaaattcatatgggtatatgttaaattatataccgctataccaaagtaatatgtgtgttataaaaaaatacacaaaaattgaagtgaaggatggcataaaaagtaattcttgagtagcagttatagtattttcttcccacaccccagttggttgtcttgtgcaccctccagaagcacacgcttttcctaaagactgctgactcaggatattctcattctaatctccaaacatatatgatgctctcttatgatatatggagaaatcctagagatttggagtttttcaggagagcttattgtcaacttttgaaatttcacattaattctttttgataaattcccaaataataatccattaccacatgttttccacagctttattcctattactttcgtcagcctgttgtctcttatcttcatgttaggtatgactctatttttattttactagtctgctcacagacttctttgggacttatgttatattttaccaacaaatttagaattatttcaagttgctttatgttaaaatatataacaagttacattttcttgctgcattaataagtttttgatttttaaaatctgatatttcagcaactaaaggaatacttttctttataggtctgttctgtttttaacctcattgactgtatatgttttatttacccgtgccaggagtcta

SEQ ID NO: 3772 - DNA, 2300 bp, Homo sapien
ggctaagatcaggaatccatctatctggtgggaaagtgaccaaacaagataacgaaaaagcagtctttttggttgaccaacgtaactaccatggagtttgcacaaacagaaccatctgttgtgtgaggaaccatggagagagattgtgtatttatagaatcttgagtgggaaaaccaggcacattaattaacttttcccctcaagttctctaattagaaatccacttttcttcctttctcttctgtcaatatgtaccgccttaaaaaaaagtcaatttaaaagcagacagatttgctatgactaatttaagaactcccaaagcaggctgttttccaaaaatacactgcaattgacaatgccgtaagctcagtctaaaagggatatgacacaactactggccctaaggccgaatcagatgtttactgccagtttgaacagagcagcgtagtgtgcagatctccacaacccttaactgttcttggtagggggctttaaaatgaaatctttttataaacaaatgtttccaataggtgtatcctaaacagcctaccttaatacttttttttttcttggtttccaagatggaacttgttgcaaggaaaattttatgttaggggccaagactgctagtgcttttcagatactgcatgttccttataaaacatgtcttaatatgtttgcatgctttggtaaaactaattttggaaaggtaacatcttttggtagagttgtttttacaggaatagctacctttgtggattataattactctgtattatggaagaggaggctggaaatcaaggaagtgatgattctcttccaaaagcctacaaaaggatgacagaatcacatttcactcagtgagttcaattaactatacattcaattgtgggggcaaaaataaatgacaccacgatttactgggtatctactatgtgctaggtaatgcactaagtacattatgctctatacttcatttaatcctctcagcaatgctgctcattatcgtcattttacatgaggaaactgaggtccagaaaggttaagcaactcactacaggtcacacagctagtaaatggcctcgaataaccagtaactcagacactgacctctctttggtttcttgttaaacaaacacctaatttatttcttggaggttttgttcagctgtcctaatttatgactttacattccttctggtgctaaactgctcaagtagcctcttgtatcaagtgtgacctgattccttaagaattttacttaatgagaacctctaagctagaaactcttgctaggtgtttcatgcaccttattttctttaatcattacaacaactctaagattgggttctctccaccttataaatgatgactgttttagagaggttaaggttgcttaaaattggtgagttagtgaggggtagagccacgaatggatttctggtcgctgcctccatcgtcagggcaagcttttcccacgactccagcgcttccatttgtcagtccccaggctagaaagccacagtgctaatttagtatttatcaagcgtttgtagtgtcctgggatctggcacttcgatgagaaagctgtgacggccccaacttctaacagcgagtggtaaggaggacgagggacacaggagggaggagactctccccaaagcttagcaccaacagaagtggtcccccgcaggttgctctgcgagcgccacctcttccctccaaccgaggagaaagtggcgcgcctttgaggagtccgaggtcccggcccaggcggcagcttgggtcctggcgggttccggacgggcgcctcagggacctggaagcaaccgcaccgaacgcgacggagagcggcgagacgactccaggaggcgcccgagctacatcccccggccacaccaaacccgggtttgctggcagacgcggctcacgacaccccttagggtcgcagcccctcccccggaagtgacgtgtagcgactacggcgtctgggagggacccaggagcagtcggggggtttgagagtggcggcggccgcggagggcctggcaggccccgccgctgcaaggaacgccccgaacgcgcgcgcccggcgtgtagcggccccaagacccgcgccgccgctgccgcgtgcgggggcggggagggcggggcgccaggagccgcggcggcgggagatgcgggcggctgcgggcacccggcgggctcggcttggccgccgccgccttctacggctccgccgcgggggtcgcagcggctgccgcgccgtcctcgagtttccagcgtgaggaggaggctg

SEQ ID NO: 3773 - DNA, 2300 bp, Homo sapien
tgctacaggatattgcttgaaagacgtaacaggcaactggatggctccatgcttgcttagtcagtcaaaaatccgtgaaacacttctttaggaaaaagggatagtgactgggagtaatgatgaagcagtgaaataaagagagggaagaggaagttgccttgagaagtaatgatcataactaggtgttattgggataggaaatgtaattaaattaggggcaaggggttgcagagctgagttaactgcagtgattaagaaaaaaaatctaggccaggcccggtggctcacatctgtaatcccaacactttgggaggccaaggcaggcggatcacgaggttaggagtttgagaccagcctggccaacacggtgaaaccccgtctctactaaaaataccaaaattagctgggcgtggtggtgcacacttatagtcccagctactcaggaggctgaggcagaagaatcgcttgaacccgggaagcggaggttgcagtgagccgagattgtgccactgtaactctagcatgggtgactgtgtgagattctgtctcaaaaaaaaaaacaaaaaacaaaaaacaaaaaacaaaatctagggcaggccaggtagaaaatacatatttaaacattttaagccaggcgtgatgggtcacgcctgtaatcccagcactttgggaggccgaggcgggcggatcacctgaggtcaggagttcgagaccagcctgaccaacacggagaaactccatttctactaaaaatacaaaaaaatttagccgggcatggtggcgcatgcctgtaatcccacctacttgggaggctgaggaaggaggctcgcttgaacccgggaggcggaggttgcggtgagccgagattgcgccattgcactccagcctgggcaagaagagcgaaactctgtctcaaaaaaataaataaacattgtaataaaatctacaaattttctttgggatggctctgagtaactaaggctaagatcaggaatccatctatctggtgggaaagtgaccaaacaagataacgaaaaagcagtctttttggttgaccaacgtaactaccatggagtttgcacaaacagaaccatctgttgtgtgaggaaccatggagagagattgtgtatttatagaatcttgagtgggaaaaccaggcacattaattaacttttcccctcaagttctctaattagaaatccacttttcttcctttctcttctgtcaatatgtaccgccttaaaaaaaagtcaatttaaaagcagacagatttgctatgactaatttaagaactcccaaagcaggctgttttccaaaaatacactgcaattgacaatgccgtaagctcagtctaaaagggatatgacacaactactggccctaaggccgaatcagatgtttactgccagtttgaacagagcagcgtagtgtgcagatctccacaacccttaactgttcttggtagggggctttaaaatgaaatctttttataaacaaatgtttccaataggtgtatcctaaacagcctaccttaatacttttttttttcttggtttccaagatggaacttgttgcaaggaaaattttatgttaggggccaagactgctagtgcttttcagatactgcatgttccttataaaacatgtcttaatatgtttgcatgctttggtaaaactaattttggaaaggtaacatcttttggtagagttgtttttacaggaatagctacctttgtggattataattactctgtattatggaagaggaggctggaaatcaaggaagtgatgattctcttccaaaagcctacaaaaggatgacagaatcacatttcactcagtgagttcaattaactatacattcaattgtgggggcaaaaataaatgacaccacgatttactgggtatctactatgtgctaggtaatgcactaagtacattatgctctatacttcatttaatcctctcagcaatgctgctcattatcgtcattttacatgaggaaactgaggtccagaaaggttaagcaactcactacaggtcacacagctagtaaatggcctcgaataaccagtaactcagacactgacctctctttggtttcttgttaaacaaacacctaatttatttcttggaggttttgttcagctgtcctaatttatgactttacattccttctggtgctaaactgctcaagtagcctcttgtatcaagtgtgacctgattccttaagaattttacttaatgagaacctctaagctagaaactcttgctaggtgtttcatgcaccttattttctt

SEQ ID NO: 3774 - DNA, 2300 bp, Homo sapien
taggcagttggcggcagcaaggaggagaggccgcagcttctggagcagagccgagacgaagcagttctggagtgcctgaacggccccctgagccctacccgcctggcccactatggtccagaggctgtgggtgagccgcctgctgcggcaccggaaagcccagctcttgctggtcaacctgctaacctttggcctggaggtgtgtttggccgcaggcatcacctatgtgccgcctctgctgctggaagtgggggtagaggagaagttcatgaccatggtgctgggtgagtcactacatcctccttccttcctgttccagatacatgccacctggcatgtgggacaggagtacctctgccctgggagctgcttggagggagaggtggtctgctgggaaggcattgctgggcaggagggtgaccctgggctgagggggcacaccaagagaaagaagagaataccaaggacataccccagtcacctctggatccctggtcctgcacagagcctggctcataggagacactggagaaatgctcctaacctttggctagcccttttataatttatagcgattatctcatttaatgcttacaaccaccatttgaggtgatccattttacagagaaggaagcagaggcttttaagaggttaggtaagtcttagccaaagccaaatagcagctgaacagtagagctgggactccatcaaggtctcccagccggagcttgctcctacccctaggacaaggggtggactcctgactctgcagataaattctacaaaagccacagaaggcaagtagtaaccattgtgtgacaacccctcacccccaggaagaggggcccctgtgaggattgcaggctctggagtcacactgcttgttgaaacgctgcctcttaccctccctaggtctgcgcctttgaataagtatcacttcttagttgctccatgcctcagtttgtccatctgaaaatgggggcatctgtaatgcctgtgttatgaggagtaaattacagcatccctgtgaagacgtagcacagtgtcgagtacggaatgttatttccatccttctcacggagcttggttccccttccccttgccctttacttgtcccagccattgactcatactacttcccttcttgcaggcattggtccagtgctgggcctggtctgtgtcccgctcctaggctcagccagtgaccactggcgtggacgctatggccgccgccggcccttcatctgggcactgtccttgggcatcctgctgagcctctttctcatcccaagggccggctggctagcagggctgctgtgcccggatcccaggcccctggagctggcactgctcatcctgggcgtggggctgctggacttctgtggccaggtgtgcttcactccactggaggccctgctctctgacctcttccgggacccggaccactgtcgccaggcctactctgtctatgccttcatgatcagtcttgggggctgcctgggctacctcctgcctgccattgactgggacaccagtgccctggccccctacctgggcacccaggaggagtgcctctttggcctgctcaccctcatcttcctcacctgcgtagcagccacactgctggtggctgaggaggcagcgctgggccccaccgagccagcagaagggctgtcggccccctccttgtcgccccactgctgtccatgccgggcccgcttggctttccggaacctgggcgccctgcttccccggctgcaccagctgtgctgccgcatgccccgcaccctgcgccggctcttcgtggctgagctgtgcagctggatggcactcatgaccttcacgctgttttacacggatttcgtgggcgaggggctgtaccagggcgtgcccagagctgagccgggcaccgaggcccggagacactatgatgaaggtaaggccttggcagccagcagaggctggtgtgggagccgcccaccagagacgacactcggggctgtgtctgggctggtgcctctccatcctggccccgacttctctgtcaggaaagtggggatggaccccatctgcatacacggcttctcatgggtgtggaacatctctgcttgcggtttcaggaaggcctctggctgctctaggagtctgatcagagtcgttgccccagtttgacagaaggaaaggcggagcttattcaaagtctagagggagtggaggagttaaggctggatttcagatctgcctggttccagccgcagtgtgccctctgctcccccaacgactttccaaataatctcacc

SEQ ID NO: 3775 - DNA, 2300 bp, Homo sapien
cagtctcttgggttgtgctaaggattcaatgagttaatacacacaaagtatttagaaacagtgcctggcacaattagtaatggttaactattattattattattattattattttgagacggagtctcgttctgtcgcccaggctggagtgcagtggcaccatctcggctcactgcaagctccgcctcccgggttcgcgccattctcctgtctcagcctccggagtagctgggaccacaggtgcctgccaccacgcctggctacttttttgtgtttttagtagaggcaggggttcatcgtgttagccaggatggtcttgatctcctgacctcgtgatccgcccgcctcggcctcccaaagtgctgggattacaggcgtgagccactgcgcctggccaactattattattataacatgaggctacatcagcagaaagagggggattttcagagcagagagccctactgtaccctgtattgggtggggcctggccagtgcatccacctggtttagttgggaaggggtgattgggtagggcccaggatcaccatgggatccaggctgtgtgctcactcccctgagctctccttcctcatccccctgtcataaggcataaagcacaagggcccctggaaagaagtggtgggaggcaggaggaagaggggggctcttacttgtctgtggtgcgacaactctctcatgttcccagtgttctttcccaagcctgcaaaataccaccgtccactctctcctggctctgtaattttccagctgacctgaaatttcccctgactcctgacctctttcctggaggagaggggacaccagctcagagaccctggactccaccctagtctctctgcttgccacgagagggtatgccaaagactttggaaagccatctccaggagggtccccaggtagaggtgtgtctgctccagggaggcaacgctgagacagttttcaagttaaacttgtttagtgactcagaaggtagattcttgatttttctcttctcaactctctctggcacctgctctctgttccccactaccaccagggcgccactatttcctctcccttctctatctccctttcttctctgcctccttctacctctcagctggaaggtgcccttagaaatcatttggctcaccccctcttacagaggcccagaacatggaagggacttggcccacgttatacggctgttgacacagggccagcattggaacccagtgccccagtgcctggttggctaaggccaaccaggtcttccccttcgaaggcatcttcctgggactttgtagtattcaagtcaacaatccaactaaattggatttctctccacccaataaaactccatggaggaaaaaaagacaaaactgccccccaacccccaaccccagggccagcctgggactccatcaaagacattctggaacaggtatctgttcggaccttgctcaacagctgacaaagagaacatttcattggcaatttatcatccattcttccccgtacacactcttaagaagaaaaaaaattggaatttggttttcagcgcagaaagagggattgagttagctctgtctgcgtcggagaatagcaaagagcagaagggtaattcggagagaatgtgacatctcctttgaagggatggtcctggacaggtagggagcagctctgcctggagatcgggtggccagaatggcacgcctgggtaatggtcgcagcagactggctccgagtaggggaggggaggtgccccgcgaagccgggtagctttcacctaaatgtttggtggcgagcgacagagggggcggtgccctgccctaggtaatgatagggcagtctgggagccacgcgggggctgcccgtcgcggcgcggctacaaagccagcttcgagacctcccgctttcttcccctgggtaccagccccacccctctatcccccctcgcagcaccccccacctccgtcccgcctcgccccgcccccctcctggcagtcccagcgcgcatgctctctccccccgcggagtaacctggagatttaaaagccgccggctggcgcgcgtggggggcaaggaagggggggcggaaccagcctgcacgcgctggctccgggtgacagccgcgcgcctcggccaggtaggagcgcgccccctcctctcccaggggtgagggtcccggcgcgggaaagggagcagcagtgcacggccgagctccgcgctgtcgcgtgttttgcgccccgcgggatggggctgcgccgtggccgtccggggcgctgcgcgccgag

SEQ ID NO: 3776 - DNA, 2300 bp, Homo sapien
aaggaaaagactccttctcccaaagaagaagatgaggaaccggaaagcccgccagaaaagaaaacatctacaagccccccacccgagaaatctggggatgaagggtctgaagatgaagccccttctggggaggattaaaagtgatgatggtctggggagagattttattaaaaaaaaaaagaaaaaaaaagaaaaaagagggaggaaaaaaaagaacctacttaagatagaacatggttttggctatggcttgactcatgggctttcagtgcttttttccatttgttgaaagtaacatttctctctctctctctttttttttttttttttttaaagcaaaccattgtatgtgtaagtgtttaagttacctttttgtctattggtctctttgccagccctcccctttcccaatgaaagccatgtcaaattaatcactggattgactgcttcatctttttatttttaatgaaaggtgtaccacggttgtaaagcaataagatttgagatgaacactattgaaacttcgctttttgctaaaaaatagcaagttgaatagtaatcaaaaaacatagaaagattttagttcaaaatgattgctcctttctctacctggacttttaaaaaatcaattgtcatctaatatgagtttatttgtctatagacacaagtatcaatgtctaaaaaaaatcatgactttaaacttccaccgatgaggcaggtaggagataaagatgaattctgaactgttactaaaagtactcattttttaccttgtagggagggtgggcaatggggttacctgaccttatttgagggtatgggctttcttttttatttcatcacttgttatctcaaagagactcggagccagtgatccttttatcctgctacagtctttagggagctaaaaaaaaaaaaaaagcaggggctgccaaaactcttgatttcatatttccttctctaaatatatatgtatcctgttttttggataaaattttaccaagaatccaaaaaaaaaaaaaccctagaatttaatcaacaagatcagtctacaggtcacagtggatttcttttcaaactgacaatgtttaggttttaagcaaataaagttccagttaatgtgaaactcagtcacaaagagttgagatttttcctttatgaaatagaattgacattcttttatgctataaatgtgcattcaggtcccattaaccatgctctgcttttatttggggatagaacattttctttttcatatcccgatcttcccatttcttcatagaaatgtgataagaagtacatccctgtgatcctgctgcttcgtagagcaccactgcacaccctaccccgagtgccaaccacctctgctataggacactattttcctggccctattcttcacttacttcccatcctgtccttgactaggaatatgttaaatgctgctcccatacaattcagttagctcttgtctttttatttggtccaacccctgctttactgctcatgctgcttaaagcaggagggactagagaaacaaggcattttaggaggcctgtgtgcagttgaaaaccgacttttacacgccttataaaagcagtcaggagatagatccgtaggtttgatccttcacatctaataccaggcgctaatgggaacaaggtttaaagggtcctggtatgctaataaattgaaaaattagtgaaatttaaacttctgcctttttttcctgccttttaatctagatttgcttcctcaatatcctactttgtggtttactaggaacatgcttactctgatctttttttaaaaaacacacagtggcagagtcatttcactattgcactgtgtgttaaagaatgaataaggagttttcagttacatggccaaaaatacaggacttgaacataaatagcagttggatcattctctttcatgacggttaaattcagaggtgtgaactttgtaatgagggtgttaaagattaatctatttgcctaaatgggtttgttcaggtatccatttttaacaaagaagtttgtgttcatatagtaaaagacctatcagtgtttccaccatgcacttctattttttaggagtttataattttaagtcttacattcctagtaacatttgggcttttcttaggttatgtttcgtgaagatttggggggagggctcttttaaaacttcagcctcagttgtttaacagtctctttaatatattaatctgcactaacatctctgtgatatatgcacatattttagaggtaatcatgtcttctagattacttgtgtgc

SEQ ID NO: 3777 - DNA, 2300 bp, Homo sapien
cagcggctatggggaagggggaaagtggggagttagtgtttaatgggcacagagtttcagtttgggaaaatgagaaagttctggtgttgaatcgtggtgatggttgcataacaatgtgaatgtacttaacgccacttaactgtacacttagagacagttaaagtggtacatttatgttatgtattttttttttaaccacaatttaaaaaaattgcgggggacgggtgcggtggctcactcctgtaatgccagcactttgggaggccaaggcaggcagatcacttgaggtcaagagttcaagaccagcctggccaacatggtgaaaccccatctccacaataaaataccaaaattagctgggcatggtggagcacgcctgtaatcccagctacttgggaggctgaggcaggagaatcgcttgaacccgggtggtggaagtttcagtgtgcagagatcgtgccactgcaatccagcctggggagcatagtgagtgagactccgtctcgaaaaaataaaaattaaaaataaaaataagagggacagagggtggaatgacatggaagagacaaaagatattaatttgtttaatgcttcactggtggactgtgctattctcttctttttgggaagccagattttacaaagggagactttcaggaggcagatgtggtgtgttttttgttgttgttgtttggaaagtgtatcttcaattggttgttaactgactgctcattggagacttctgccagatgcgcccagatcattagtccgtttgaatcatcacgtcttccaggccccaccctactctctgataggccccaccttcaccgtggggtcctgttagtcaagatgctctgagagcgcacagccaccaaacaaaaatgatcgctttgactgtgacagggattgacgtctattttcgatagcagactcagccttagccattcacataggaatcctgagctctgcctttgagagtattaggcatccaacaaatgctcacggatttaagtgaaatgatgtgcgttactttcagttatatgacttcgaagagtctttgttttgtttttcaaagtgcaagggtaaatcaatagaattcatagggtcttgagccagctccacccatctctacccagggacggaatcatcttttaaaacttggatttaacacttacgtagcacttactgtgagccagagactatcctaaagacttttgatagatatatcaactcatttaatactaataagcctatgcagttaggtacccttgtttcccattttacagatgagaaaactgaggcacagagaaggaaagttataccaccattaagtagtggacctgggattccacctgaaataccttgtggcccctgagctcatgctcttagttattgtacacctgactcttttcttaaaatagtaatgcaccagactgggactttaatgaccctgaagtggatctcaaggtccagaatggagaatggtaattgggggtgaagatattccttgattatgatcctgcctctctactccagcagcctcatttggtccctgagggttaatgccgaagccagggtaaggggcttgtaggtttaaggtcaaattttttgaacctaaggaatttccctccaattctgtagcagccccgcagtgacgaatctgctgcctctcccacgggttttgctattagaggattttcaaggtgatcaaggcagacgagatgaaacaccattaaactaacactgagcaacgctgaaccctacataaatctttttttctagtctttctaagatacgaccccagacgaatctgcaactctggagtggaaaccagggggcgggctaagcagcgaccatttttgttttgcggccgtgcgctctcagagcatcttgactaacaggacccccacggtgaaggtggagcctatcagagagcagggcggggcctggaagacgtgatgattcaaacggactaatgatctgggcgcatctggcagaagtctccaatgagcaggcgtgttggggaggagcgcacaaaccctagtgggtttggttgcacggcggctttggcgcattttcggctggtttgattcatccattttgaagagacgggggagcggggggctcgtctgttccaggagccctgaaccaaagagcagcggagtttgagaagccagcagctcggggttcggcagcagcggtcccatcggctgaagttcggggggggtggggcgccgagcgcgcggggtggggggggtcctggtctttggcttctcgactcggtcctgtttcgacagcga

SEQ ID NO: 3778 - DNA, 2300 bp, Homo sapien
aggatttaaaattaaaagaagaaatatttaaagcatccgaggcacacttgaccttaatgccaggaactggagtgcttaaaggagccgaaaatggataaaaacacttggaagctctgtgatttcaatgatgattgtgcttttaatctgtgttgtttgtctttgtatagtctgcagatgtgtatcctgactcctgcgagaagtagctcaccgtgacaaagctgcctttgcatttatcaatttgcaaatcagagaagagggacatgttgagagcaggccccccaaaatctggccataaactggccccaaaactggccataaacaaaatctctgcagcactgtaacatgttcataatggccctaacgtccacgctggaaggttgtaagtttacaggaacgagggcaaggaacacctggcccgcccagggtggaaaaccgcttaaaggcattcttaagccacaaacaatagcatgagtgatctgtgccttaaggacatgctcctgctgcagttaactagcccaacctattcctttaattcggcccatcccttcgtttcccataagggatacttttagttaatttaatatctatagaaacaatgctaatgactggtttgctgttaataaatacgtgggtaaatctctgttcggggctctcagctctaaaagctctaaaggaaatcagacccctgatttcccacttcacacctctatatttctgtgtgtgtgtctttaattcctctagcgccactgggttagggtctccccaacagagctggtcttgacagaatatcactgatcagagataaagaacaaataaagtgaagatagatctttgacaccaaggacaattcactaaagagtttatcgaatgattgactcagagaccaagaatcaggccttaggaaatacttagcgggaaatgggatggagagaaacctgaaagaaaaagataatcatcagagaagtacggggatgacaaagaaagaacagcgtcatagaaggcataagggaaacaaatgtcaaggagtggtcaactatgtcaaaacgaataagaacagagaaaactggatccttaaagatgagtagcttgaactaacctcctgtacctgggtaacgaacattctgggcaaaatatattgtgaaccatgctgatgttctttcgccacaaaacataagtgatagcctctctatcaagagacctagatttcctagtgtctggtcctgggctgttttcccatggccccgctggttctcttcctctattcctagaaaagtatagaaaatggagctctctttgcttgccattgagctcatgtcctgccaacttctacccaagtgacaggtaggtcagtaaagttacaggctgagaaattaaaattatttgccaaacactagttttatgattatctattaacaacagccacaacaaatcaagaaggagtcccagtgtatttcaattagcttctagctcaagtgatacatgagtagtatggctagaataggcattgtagaagtatgaatggagaactgtctcttgttttctgtccatctttattgttattgctggatattaaatgctgtaatttttggcataggtttttttccaaagactggtctcttgggtcaagttttcctgaacttgcctggtattgggcaagttcacacagaaaatatgagtcatttcacaaagtcctgggcttgtctatctacttgaaggaataggaaatggacttcacttggagcatgatggatgaggcttgggcttttactaatgaaataagtttcaatcttaactcagttaaacctttaaagacaggagaaaactatctggggatggattcaggccagtgagatcacgttgcacaaatctccccttaagggatctttactgacctagaattgtttcaaaataagattccaaactgtcgagggagtttgaagccttgaaacttggtgtaggtttgcttaaaacaaaataacgaatatactacatttcccaggaggcttcgcggtgagcctccgcactcggctggttctctttaccgcgaggaaagctgggaaatgtagtgccacaggcaaccctgcacgtgacgcttgcggaggaaggggagagagaggcgcgcgggagggcgtctagggaatcgaggtgccggctgctccttcctcacaatttggtttgtgctgcaaggggagggtccccatcatctggccccagtggtgtaaggagctgactgggattcagtcactgacttggagccgctcgggggaagtcccggtgggtgaggttccgcggcgcctggt

SEQ ID NO: 3779 - DNA, 2300 bp, Homo sapien
ccttggcgctgctctcaggcatcagctggggactctacctggaactgagtgagccaccaagagtgtggcttcttggagtcctgggtggggttgggagagatggtagtagtttgcaaatgtgcaagagtttcttctgtgttcttaaactatttggtttgaacacaggttgtaataattcctgatcttagagatttgaagctaagtactgatctcaaattcaagcaggcatcaggggcaggggaaaagtatcagaagtatattcctgtgtggtcctgcagattcttacttctcttggagggatgaggtggaaagggtaaaggaaaggaaccagaggcttagatctgcttgcaaaatgaagaagcgggtgggagatggtgttttctgggctccaatcaagagacctagagtctctgtcctctggtctctgtccctaattggctcagtgcctggctagctctctcccttggtttcctcatccataaaatggaaaaggcttgtcccacctacctcctgagctgccagtgaagatcaaatgggataatgtgtttactggcatttagtgtagtcttgctattgatctgttgggacattttcaggctgagccagggagaaacttagggtagggaaacacagtgcttatctccttctgacctctgccctctcagatcactggcgatacatctacccactggtgtgtgctttctttgtggccctgctgcctgtctgggtggtgctggcccgacgaagtccagccacaagggaggtgttgtactcgggctgggagcctgttatcattgccatggccatcagcaggtaggctggggccctgagtatccactcctaccccactccaacccttccacagacttctttttaaaccctggagagatggggtgggggtcagaccctagaaatgtgttcattagtgtttcagtcacatgtccttctgttgaaaatgacagaaaccatctgaactgggtttcattccaaggcagaatgtattggcctggagaaccaaaaaggcacagctgaattcagcgacatacctaagatcagggccccagtactctgtgactcttagctctgctcttctctgtcatggcctacagcccaggtttatgcttttcttactcctacaaattccagtgggaagagagattcttcccccaacagttccacaaagtcccagaatagagttccactgcttctcatctggtgacatgattatctccaaaccagtcagcgtggccttggggctgcaatcctctgattggatggacctggagcctagctatcattgaggcattgtcacctgagccacagtcactgagcttgagagaggtggttccctgtggaggagcccagtgctatcaccagaaagggaagtaaatgctgagtgggcagaacaacagaggtcctcagaggcagatagtcctgcaggctgctcctccggccaacttagagggcaggtacaggaggtggttgcctgacccagtaccaccagcttgttctggagtcactgtgcccagtcagaatgttatgagcagcacctaatcctgtcaagggaggcaaggactggatggtgaggaactcctgagagccatggtgcttcccttcatctccaaggataggtgggcctggacctctcatcccagagactaaggcagaacccttcagtggtctttgcgtcattttgtctttatgtctctatagtgtgggaggcctcatcttggacaagactgtctcagaccccaactttgctgggatggctgtcttcacgcctgtgattaatggtgaggtctgggcatcagctatcagagggcagggctgggggaaggaaagggacaggagaagaggacttaaggggttggtttctgtatcagtcagggttccagcagacgagaatctagctcagatggttcaagaccttaatgaagggactgcttacagaggtgggagcagagtaaaaggacagataagggatgttgaggcaccgagagattagcagcaatgggaagcctctactcctaaagggtcaaggggagtatcatagtccattatctgttgctagaacagaatacttgaaactggctaatttataacgaaaagaagtttatttagctcacagttctggaagctgggaagttcaagattgagcagctgcttctagtgagggcctcatgctgcatccaaacatccaaatggagaaacagaaggaaaactgggcatgtgcaaaatgggcaaaacaagagaggcaaacctcgctttatgacaacccactctcatgggaactatacctt

SEQ ID NO: 3780 - DNA, 2300 bp, Homo sapien
agtgttttatcatacagtgttttttatgactagagtaatgtcctcaaggttcatccatgttgtggcatatgacaggatttccttcctttttaaggctgagaaatattccatggtatatatgtaccacactttgcatattttgtttatccattcattccttgatggacatttgggttgcttccacctcttggttattacatatagtgctactatgaacatgggcatattaatatatcttcaagaccttgctttctattcttttggataaatatccagaagtgggattgctggatcatgtggtagttttatttttaattttttgaggaaccaccgtactgtttttcatagcagctgcaccattttatagtcccaccaagagtgcacaagggttccaatctccacatgcttttttcttttcttgagacggagtcttgctctgtcacccaggctggagtgcagtggcactgtctcggctcactgcaacctccaactcccaagttcaagcaattcttctgcctcagcctccccagtagctgggattacaggtgtgcgccaccattcccggctaatttttgtatttttagtagaaacagggtttcactatgtttgccaggctggtctccaactcctgacctcaagtgatccactttccttggcctcccaaagtgctgggattacaggcatgagccactatgcccagcccaaactctacatccttgctaacactgattattttctgggtttttaaatagtaaccatcctaatgagtgtgaggtgatctcttactaatctacagtattgctcaactttattttatctattttattttattttattttattttattttattttattttattttatttttgagacagagtttcactcttattgcccaggctggagtgcagtggtgcgatcttggctcactgcaacctccacctcttgggttcaagcgattctcctgcctcagcctcccgagtagcttgggattacaagcatgtgccaccacgaccagctaatttttgtattttcagtagagacggggtttctccatgttggtcaggctggtctcaaactcctggcctcaggtgatctgcccgcctcggcctcccaaagtgctgggattataggtgtgagccgctgcgctcggccactgctcatctttaacgacagagtgtgggtgttggaattgccttgaaagaccatctgatctggtccctgaattgaacatttttcaagagcttgaggcccttgtaacttgtctaaggtgtccagccggtctacgtgaggaggtgtactggggagataagcagggggccatccctgctgtctcctgtaggagacccaaggctcttggtccagtgcccttgccaaacatagtgcttggcctcccagccatgatacgcagaccaacccatatatatccgcctggcctcctgcctcctcctccctctccaaacctggaggctttccattcttaaaacaaataaaagaaaccacctaccctgttagggccagggagggagacacaatcctaaacctttttgcaagtcctcagtttcaattgcaagtaaagtagctttcaaatagccagtcctggttcctgcagtcctcttagcactaactagtggaatactgtctgaaccccagtttactcattcacaaaatgagaataaaaatagcccctaccttactgggttgttaagatgattaaaagagaaaatacatggagagcacttagcctagcacacaatcagtccttaatagatgttaaccaaagacattggtaggagagccaggattgattgtcttgggactagaactcaggtctcctgactcccggtccagggctcttcctacaggagtacacttgcttctcctagctgagagattgaggaaggtgtgtgggggtaaggcagtgcacagagaaataaaaagcctcttgcaggccagcattcagaggtttaggggccacagtcttaattcagagcctgttcagaaggagagttgctgtggctgaggcccaaagcccttggagatagaaaccaaacaaactctctaatctccccagcctcggccccagccctgtggagcccaactcttcacagctgagacaacagagaaactggactgaaggcaaaggggccagggattgcaatttgaggggggattgcaaaggatttctggggtgtcaggcagcccagggcagctcagctgtgtgggtccccattacccttccccacccacctccaggaaaacagaaaaggtagggccagactgagagtctcccaaccggca

SEQ ID NO: 3781 - DNA, 2300 bp, Homo sapien
cttcctcccaggcgaggggcaggtcagtcctgtggggtcctggggcggggagggggtggtggagggcggcagtcctggcgcgcagcgcatttgctgaatctgagtggtggagagactgaggaggccacccagttactttctctccctcctcggggttggggatactaaaatgggtcttttttgtccccgcctgggaggaggggatagggcgtcctggttcacttttgcttctttcgtcccagggccttaggcctgtctgaagtctctttacagggggagtggtgagggaggactggcttcccctcctgggagccccctctcaggttcagtggcctgccaggaacacaggagggaggcgggggtgtcagcttttagcggactcagaaacttttctggcataggggcactggactcagaggtttcctcctggatctctggtgagggagtttgaaagaaccacagtactgtgtttaaggagattggaaaagggagtcctggtgggtgactgaattgatagaggaaacagttctcctgggccagttcctggggtttgatacctcctttcctaaactgaacttgactaattgtgtgtgtttggaatacttaaggacctgttcctcttacctggtggaactctctttaaatttattttttacgaataagagctcttctggtgaaatggaataggatgggagtccatcaggaattaggaagcctggggattcctttaggcagagaagtggagccattacagctaaagagatgcatttggagcaagtgcatattggcttacggtgctttggtttttgttttgggttttttttattgctacttttgtttttttgtttttgtttctaagaattccactatatccaactctcagtaaccctggggaacaggaggagcctaattaactgaaatgcgtgggtaataagcaatcgttttatgctctgtcccttctaactgagataactcccttgtcctatctgacaagctcacagggccaagagcagggggagacggggagagacagaggcctggatccgagtcagctgtctgagctctttgtaacactgttgactctcaagggcaggagtgggtaggcctctggctcttggccttggtctggcaggcttgccccactgcccagggagtcctcctagctttgttttgttttctcagaagctagaacgatctggggtctgggggacttcactcagcaatcagtttctccctatttctttgccctgtgtggctgtctttctgttgctgtcttgtgatgataagcagtcactttatacaggggtggctgtgtggcagggagtttgtgactgaatttgtaactgaaccccacttaaataatgcagggttcttaatgggcattcaagaaggggtcttgctgaggacacacctacccacccccagttgctgaggaaacagtgcagagggcttctgcacagcatcttcccaatcccaggctggtcacatctcattgctggtgaccacggtggtgatccctcaggagggttgctggtggggaggatggcggggatagctcctgctgagcctccagatggagcagtgcaggactgagtaatttttgcggaaaaagggaggcaaatagcaaactctatagctatatgatgaactcctaacttccttggggggaaattctcccagtacaagctgtcctttgctatagtgtaatgttctttttcttttctttctccttcccacataaggtgttccacactgattctcgtgactttaaggaccagggatttgaagaggtattagctcttcccaggaagggaggaagtttctggaagagaagggaaagacggcagacgctgcgctgggaccagcagagcctgaggagctgtgggaagctgacagagcccagccaaaggagcgggaaggagccgcagccccaggctggcactgtgttctgaaagatttgaactcaagctgctttttacggaagaggggccacttcagagggcaccccagaatttggttgagctcttctactctggatgccccctgctctgaggagcctgccactgagaaccaaagaagataagaggacagatactttttcttcaagcacagagctggtgggttggagtcaggcatctgcacccctagtggctgtctggtgaggaatttcttgtttcttcccagcttgcggcttcagtgcttgatggggctgcctgttggtggatcagtttttgcagtgcctggtaggagtggagagccgtgggaagaggtcctgcggcgcccaagcctgggttcacccc

SEQ ID NO: 3782 - DNA, 2300 bp, Homo sapien
ccacaatgttttggatgagtttcataaacatagtattgagtgagagaagccagacacaaaataatacctactgaatggttccatgtatataaagttcagaagtaagcaaaactaacctgtagtgttagataaacgttacttttgagaaggagtgtggcatagtcaccaggagcggatagaaggagggtatctgggatgccaataatgatctcgttctagatctggatggtggtcatatgggggtgttcactgtgtcatcatttgttgacctgtacacttaggtttcgtgttcctttcctaaatgcctggtatatttcaattaaaaaaatacacacaggagaggggaacagttttcgagtaagtaaaaacacggaaggtagaaaggaaataggagagagatcaagattttatacacaggtagctgagctgtggccagattaaatggggtagtggaggggagggaactgttgaatagaacagggcagaagttgcctccagcccaaccaaagttcctccagatacatcagccttaattccccacccaaccccacaccccgtattcacaaacctcatctttctggacaagtcccagcatttcctagactagcagctacttctcctggcagaaaaacccagtatttgaggccaaaactggggtctgagacactgatattttgctctagtaggtcctgtgagtctgcaggcccttgatgcaaatgctccagagctgatctggaatcatcctgggggtactggtttggggtgggtgaggggaacagggtttggtatgtgtatttgtcatccttatcaaaaggaatgacctgctcaggttgctgtgtgtgctcttgtgagcacgtgcccaaagcttcatacacagcactgcgatctcttctccccaggcacatctccgctccaaaccctattcaggggtctagagccatgttcgaatgcccccgggctactttcagggaggaaaaggacaggaaggaaccgttggtcacaggttccactgacaagaggggaaaacttgggagtgggggttcctttatgagggaggtcacaccccctgcacaaaaacatcccaaagagaactggcattgagcttgtgttggagaggtggagataccccagggaggaagtggcgaaaggtgagcatgggaacacccctctttgatcccacaaggtgcgtcagggaaagttggatttcatttagtccgggatggtgacatctctccgcacgctgccaccaggctcagtgggtcagaggaagtgaggctcccctcctctccgacctcaggtgatgcgtgtgcgaccccagccatgggtctgacctcctttcgctcccgcccgccagtctccacccctttcaaggccgggacttttttaaggccggattcgtcaggggtgagccatttgctcaaggaacgcggaatctggagggagcctaaagtgacgagccggcgggagaagagcaaggtagggactgttctgtccgggtaccaagtgggaggagggagcacgcggctggctgcttgagcccgggggtcagaggtggctggctggctggctccacagggacgtttaccggtcttcccgaaggccagaggctccaaggaaacatccagaggcaggagaggacgcgcactgtcgcacacgcctctcaaagtctgctggggctccgacgcggcgcagcgggcccgggggcggtagcaccacgcagcgagcccgggcagcgggcccctcggaccccgggccgatgggcgctgggacccgcgcgctccaggcgcatggagccggctcccggttcccgtcactcctcctactgcgtttccccggcgccccgcctcctgggcacgaagcgaaggaagggggccgggccgaggttgatcccgccccctccccagtccctgattggctgctgctgttgtccatccgagaatctatttttgatggagcggggggggtgccacccagtctgccccagatcacgtttgccaccggcagccaaccagttgggcccgagtccgcgggcaagaagcgattgggggcgcgtgagctcggctccccggtcccccgtccgggtgcccccccgccgggcccgaagcgatatatcctgccctccccggccacctcccccgcgtggaagcggagcggcggcctcgctgtaacgcagaagcgaaatgtagcgagccgggtgtcgcggctggacgctcgccttggctgggggtgtgggggggcacgccgggggccaaggaggactgtcgaggaggagtgatgagaagagggggtgccctgcaccc

SEQ ID NO: 3783 - DNA, 2300 bp, Homo sapien
atgattggctagatctgggaacagtgtgggaattagacagattgcaagaattggagcagtgacaggagaaaaaatgcagtttgaccagttaggtctaaactccaaatcacgggtgttcatgttattatttactttacatacacgttgtacgtactcttaattatcaaatattatgtgataagataatttaaagaatatttaaggaccaggaagtgtttatgacataatgttaaaggaaaaaaagcagaacatagaactttggatgcagtatatgcatctgtttcattttaaaacagggacatccttcatttgtgggtatttgtgtgcagagaaaaaagattggataacatcaaaatatgatgagtgaacgtctctggatattgggatagcatgtgatttttttctttatacttaatgttccaaatatttcacaagggcataaatatacatgaattttacaatcataaaaattgtgctgggtgtggtggctcattcctgtaatactagcactttgggaggcttaaatgggagggttgcttgagtccaggagttcaagagcagcctggacaaaatagtgaaaccctatctctacaaaaataataataattttaaaaaataataaatatataaaataaaaagtctcttttaaaaaaattttaaagttaggtagagattaagctactttttactaaaaattatgtcaatgttcatgtttaaatttcaactctatttttaacattctaaatcttaaactaggtggtgaatccagaaatgttcattatgttattttttatatctttataatatgtgaagtatttcatgatactgttttaaagttgctattaaaaagtaactaggcagggtgtggtggctcacgcctgtaatcccagcactttgggaggtcgaggtgggcagatcacctgaggtcgggagttcgagaccagcctgaccaacatggagaaaccccatctctactaaaaatacaaaattagccaggcatggtggtgcatgcctgtaatcccagctacttgggaggctgaggccagagaattgcttgaaactgggaggcggaggttgcggtgagccgagatcgccccattgcactccagcctgggcaccgagagagaaaaaaaaagaaaagaaaagaaaagtaactacatggctgaatttttttttttaagcaaatcttaaatgaaatgcaaacaccaggactgtgaacctgtagctttggtcacaggtagcaatatggccttactggttgtatagcacttactgaatttttcttgagaattctaaaatttgagagtgatgccagataaaattgcatcaagaaatctgaaaggaacgatttattctggcttcaggaaatctgattttatatttctgtgacataagacaggttttcttttttccagaatgatcctctactctgaataaccataaaatttcacttgtggaatacatcaaaattatttatacatcaaaattctcttaaatattttatagtaatctttctaaaaatccttcagtcttactgtacttgtctagagttgcaaaaatgtagtgttaacattaatattaaaagcactttcaatgaaatttctaaacaggagccaaccctctgagctggtatttcaaagcagtatctataaacagagcaatttgttccaatttcagatgaaatcaagctgggaacctagagagctcccccgccccaggatctagggaattgtagtcaggttctaagcttcggaaaaaacgagcagcagagtatggtctgataagcttcgtgcattttattttgcttttcctcctttatttgatttgttgtcatacaggaaaggatttatgggtgagagatcaagtgcggaccagacatgactctagcctggagcccgacctcacctctgctctgcaggaactgctggcctcagcacgaaaacccacaaccctcgaaaggccttaaggatcctgggcggggtcattctgtcaattggttgttccgctgtcctagcgaagcgatgattggtcagatctggatatggggtgtggctaaggctgtttgccggaataagagcagagctagggccaagaaacgctagtctgggcgtttaggtcagaactaccccggtagcctgacagcaggagctcgagagaagcatggctcagcggtgcgtttgcgtgctggccctggtggctatgctgctcctagttttccctaccgtctccagatcgatgggcccgaggagcggggagcatcaaagggcgtcgcgaatcccttctcagttcagcaaagagga

SEQ ID NO: 3784 - DNA, 2300 bp, Homo sapien
ctttaccctcaggaacagttggtctattgcttggaaggtctagtttaaatttaagaagtgtcactgtacatacaggaataattgattctgattatacctgagagattcagttagttattagttcctcaattccatggtctgcttccccaggggaaagaattgctcagttgttactgttaccttatacaaagctaggaagtactacagtaaaaggaacaggaggctttggtagtactaacccagcaggaaaagctatatattgggttaatcaagtgtctgacaaaagacctatttgtacagtaaccattcaaggaaaagattttgaggggctagtacatactggagctgatgtttctattattggtttaaatcaatggccccaacattgaccaaaacaaaaggcatccattggtattgttggagtaggggctgcctcagaaatttttcaaagttctttaattttgccatgccaggggccagatggccaagaagggacaattcaacctattattacacctattcctgtaaatctatggggtagaaacttattacaacaatggggtgctgaaatatctattcctatggatcagtatagtgataacagtaatcaaatgatgagaaaaatgggatatctcccagggaagggactgggaaaaaatgaaaatggccaaacagaacctttagaactaaaagggcaaacagatacaactggattagggtatcatttttaggggtggccattgctgagcctccgggtcccattcctcttgtttggttaactgccaaactggtttgggtggagcaatggccgctgaaacaggaaaaactggaggctttaaaagaattgatacaagaacaattgcaaaagggacacatagagcctgctctctccccttggaattctcctgtgtttgttattaagaaaaaatcaggggaatggagaatgttaatagatttgaggactgtcaatgctgtaattcaacccatgggtgcactgcaaccagggctgccttctccaacaatgatcccaaaatactggcctctcatagtgacagatttaaaagatcacttctttaccattcctttagttgcccaagattatgaaaaatttgcttttactgttcctgctataaataacaaagaaccagtggacagataccattggaaagtactgccacaaggcatgttaaatagcccgactatttgtcaaacttatgttggaaaagctattaagccagttagagaacaattttaaaaatgttatatcatacattacatggataatattttatgtgcagctgaaactagagaggagttaatgctatgttacaaacagttagaaaaggctgtgactgcagcagggttaatcatagcccccgataaaattcaaacttctactccctttcaatatttaggaatgaaagtagaataaagtactattaagcctcaaaaagttcaaattagaagggataatttaaaaactctaaatgattttcaaaaattattagaagacattaattggattcatcctactttaggcattcctacttatgctatgtctcacctcttttctaccttacgaggtgattctgatcttaactgcaaatggtccctgtccaaagaggcattagaagaacttcaattaattgaagaaaaaattcaataggcacaagtgactctaattaaccctatgcagccattacagtttttagtttttcctactaaacattcaccaacaggtgttattgttcaacaggatgctttggttgagtggctttttctacctcacaatacaactaaaatgctcactctgtacttaaattgctgtactagtaggacaagcaaggctgcgcacaacaaagttaatgggatataatccaaataaaattatagttccattagacaaacaacaaattcagcaggcttatattaattcccaggaatggcaaattaatatggcaggttttactggtgttcttgataatcattatcctaaatccaaaatattccaatttcttaaattgacatcatggatattgctttccattactcaaaaaacccctattgaaagggccattactgtttttactgatggatctagtaatggaaaggcctcatttgtgggacctcaacaagtttttcaaactgactttgcttctgctcaaagggctgaacttatggctgtgataacagtgttaaaaacttttaaatagccagtaaacattgtttctggttcagcctatgtagtgcaagccacacaaaatattgaacatgccttaattcaaaatgtgactaaagac

SEQ ID NO: 3785 - DNA, 2300 bp, Homo sapien
gcaagtgcacacagacacacaggagaatgtgaaggggcacatacacacacacccagctccctgcactgggtcagaccccctccagcagggctgcagttcccaagctccgcatggccacgttcggggagagaatctgcagtggcaatgacctgctatgatatgttctggagttagaagcagtggattctccccaacctcactggacaccccctcaggaaaccatctctaggattaagagtaatccacacaaacttccaatgccacacattggaagttgctggaaaggtctgggaaaacaagaggaaggatgggtccttgggggatagaactggcagcggcctcttcaaggatggcttaggcttttccactcgaatcaccacaaagtactgactccctaaatcaaactgcttccttctgctctgggttgaaacttcagcatcctcaagttcatgttgccctctgccgtccaaaactgatattgcactgccaatgccatggccctcagatacagcaagagctgggacctcaggcctctcccatccctgctctggtctcactatcttccccacccccagctccaatccacaatggctgttatctttctgaaggtgatcttttctccttctagcccaggtgtacaatgacattagccatggaggcgtctttgaggatgggagtctagaatgcaagcacgtctttcccagcatacatgacgcagtcctctttgcccaggcaaatgctagagacgtgaccccaggacacaacttccaaggggtaaggttcttgcacctggggaatcctaggctccaaggcactgaaatagcaggaccaagaggcattattagaaagaacacaggagaaggtttaagttccaatatcaagtctgccatttcagttttctgaatctgtttccttatctatagaatgagcaccatcaactaacattacctacctctctgcatttttcttttattttgttttagggttaaatgataattacatcttttgtgtcacttgaaagcactttgtgtattgtaaaaattctttatcaatataagttttctggttgcacaaacacccaaagcatagtagagcaggcccactctgctggcatcgttccctgcctcctcctcatctctttctaaagggggctttcgggaagggaggggaggggagtaagcctacccattttaacttaccggagcttagagatttcaggctggtgagggataaagagattgggtctgagttttgtctcagctttttgacatttaatttactagctcagtaagttacaaatgggatacaaataacaccatctaaaactccagaagactggggagtcagaaaaagcctacctccttggggtccctgcccagatccccagtcatctctagccctcagggtcccctcccagctcagctcctgcccttggcctcccaagactcttgttgtgccccagccctgggtaaaaacctcccctgccctctgtgggtcataagaaaggcttttctggccctagagcaatgatttgctctttgccttaagagactgatgaaggtgaaaccatctgttctaagtgctgaaagactgcccaggaacacacagggcgctggctcctgccctccatgcctagagggaaaccctggggaaacaacgggctttcctgcttcgtgaatttgtccgcagagcaaagagggagattctggaggaagctgcattagttgttagtgccctaatcatgttcagctactctagttggtatgtatacttgattagtcatagacttataaataatttatattttatataatatatacttacatattatagaccattcacagatacaaatcacacacataaacacacaccttttcaacagcattgtgagggacaaagcaggcaaagtgaggctggttatcagacttgaacagattagaaaatatattcccaggaggacaggaattccccaaggtcaggcagctagccaatagtttttctaagctgagtaaaaccttccctgcctctaacggcccacaaaggagggaagaccgcgatacacacctgtctggtataagggggaagaccacagccgtgctgtttttgtgaggcaggtaagggaaggggcaagaggataagtcatgtgtcaggaagcagcgtccaaccagagccggccacctgtcccttttcctgccaccatgcaccaactttgctgttcagtcactgaagctcattctgcactggcttcctcccttccaggctccaggggatgctgagctctccttgtacgactcagagga

SEQ ID NO: 3786 - DNA, 2300 bp, Homo sapien
gaagaccaggtagagaaagagatggggctggacttgaaaagaatgttttaccaggagcttggtgatagactggatgtgggaggtaagggaggatgactctcaagtttttggttgggcaaccaggttaatgatggtgtcatttactgagagagaaaacactgggggaggactagacttattttacagataagccaaagccagagaggtgatgtgacagaaaggcccatgctctaaaggagctgaaggtctgatggcagccatgtagagcacagtgaagggcaggtgaaggtcacagatggtccaattccctcaagctactgctacgctaggactgcacggagctccagacctgcgtgtgtgtggggcgggtcgttggaactgctgaaccacattggtcttccgccaccaaccacccttttcctcctctcagatgggtctgggcttcatgcagtttggctttgtggccatctacctctccgagtccttcatccggggcttcatgacggccgccggcctgcagatcctgatttcggtgctcaagtacatcttcggactgaccatcccctcctacacaggcccagggtccatcgtctttgtgagtctggggatgcacccctgccattggagcaaggctccagcagacacatgaggaggatgtactgttttaagatgtcgtgagctcctcattgcaagggctggcttagctgttgttcagagaggattctgagggggtttctgtcttgggagggtcaaagtcatgactcacagaggttcttggtagttaatccctgcagaaaagagctgtacattctccgccagttccccattctagtgcctcaacccctccctgcctggaaagtcctgccttatgtctaatctccatccctcctccttcagcccaaactcttctaaagaaaaagaaagcattccttttctagcacaagttccccatgtgccttttgggaaagggcggtgggcgacgggacagggttcctgatcagggttttaattctgtcttggtgtgcctccattagctttgatggcatcccttccctgggtcagacacccaaaggtggggtattatgggaagaaggggtgggagcctgtgagcatgatgctctttcccccagaccttcattgacatttgcaaaaacctcccccacaccaacatcgcctcgctcatcttcgctctcatcagcggtgccttcctggtgctggtgaaggagctcaatgctcgctacatgcacaagattcgcttccccatccctacagagatgattgtggtaaggaccttgttcagagctgggatgttggggggccaggctgtgagacgaggaagcccctacctttcctcaccccatcccctcaactggcagccagtgggacaggaagtcagttgtgaatccatcccatcccccgtatgtggcgtttcctctctttctactgctctaataattccccctaaggaggcaggggagtgggattcagggtccccagagaaaagggagacttgagagagacgcctgccctggccccaccttagggccaatccccattctccactctggggtttgcaggtggtggtggcaacagctatctccgggggctgtaagatgcccaaaaagtatcacatgcagatcgtgggagaaatccaacgcgggtgagtccaggtggcccagaagcctggcccacccgcacctcatgccccactaaggcctgagctcggagagggagacaagatgaactctatgaaagtgcagtcgaaactgtatgacactgaccatgtatgaattattactattaccgtttcctgagaagggccgcacaaccagccaatgtaggctattttatgagaaatgagtcttaactgccacactccccttataaatctcattcaactgatgctgttaaacaaagcctctctgaacagccgcttgctggctctttgccttgctctaatgcattggttctttgtccatgtagaaagggaactattaggttcaaccagattcatgaagcatccactctgtgccaggcaccatgctgggccctgggaggagaggggtgacgcttgtcctgcagggttggaacaggcaagggagggaagaccacatagcaccaaaggtctaggggtctgtggactcgtgagcatacagggttcagaatctgggagttaacaaacgaggccctaccacatactggcccggggaccttgggcaagttaggttctctcagcctcagtttcctcctttgtaaaacaggagtgatggtccctaccctatggggtggtgctgaggatt

SEQ ID NO: 3787 - DNA, 2300 bp, Homo sapien
caggagagcacaggcagcagcccaaacaccacagctttgatcttggctgaggaacatctggaagggaacggggaaaatttccagtcggctctgcatggcttggacattccgtgttggagagggattatcatatcctgctcatttcattcattggttcattcaaaattcactgaactgtgtgccagggatattgagaagaaaaggcaggaactttttcttgagagctcatcaacttgtcctgggcattagctggaggtcttctgactgccagctgcttacctggggagtttataagacttggcttaaaggtatgagtgttatggtggctcagccttcggaggtatcagatccatcccttggctcagatggcttttctctgggaaagtctcctctgagtcctgtctgtctgatcccaggcctgggtaactgcaccttggctcctgccgctgtgtgtgcatcctgtgtgtgcattccttgctttttgtctgtctctcccactaggcagcaaaccccaccacgcatggcaagaagtctagctctcctgttcatctttgtacacctcgagccttgcacaggggcacttagtaaatatttgttgaataaatgaatgagtgaatacacccgagtggggcctgcctgctgccatttttcttagaacttccttgaaaaggaaggctctattgttcctgcagggtgcactctgctgactcactatcctttatgtgtggtaactccaataccggagttctttctcctgttaattcactgggcagcagaggagggaagaattcattggtcaacgcagggtggggagagttgatcccttccctgtttgttgaacacctcaaggtcctttcatagaaactcaggagcggtaggaacaagggcttacaaactcaagggtgacagccggtggattgatgactggaagtgggtgaggggcatttgctttccttctcccagttgagggaactcaaatacttagggcccatttggtgactcactggcctgctctgatgaggcttcctttcctgcccagcaccaattcctgctctttgctcttgctcaacaatagtttccctgacactcggtcccctggatgtcacccaagactgaaaccaacaaagacaatgctttgtaccttggaaagtctgggcagattttctcttccaactaacactccaagaaaaagcatcatcatcaatatcttaccccctgtcctttctggggctcatgggtgcctctgccatccctgggatgctggaaggggaggtggacgggggataaattgcttaatgcaactctaaagccttgcttgaagagagaaccagccctgcaggggctccatcaggtctgtttgtggcagagaaagccggacttatgaatagagagctggctagggaaagaaaaacaactcatttgagggctagtccatgcccaaccttacttgcaagtctgctgtatgttgggcaaagcaatctgaagcttgaaagaagaactggaaacagaggctgagagggattagctttctagacattcattcattcattcattcatgaaacaaatatttattggtgcaccttctctatgccaggcactgttcaaggctctcatgccagtatcataggaattgttagtttgctatatccctttacagctttcattatcctaatcttttaggacaatagcagatcttctcatcctcagactttgtgccctaaagtcttgggcacaaagactggcagagaccacctgtctgaggagcacagctgtgaggacagactgtaactgggcagaaatggagcctcccaagagaaacagggctgggctggggcttttagtacaaactcaagtgggtgattcccccggcctgaaccagttccacctgcgtctccacttcagccattgccagtgacctcaatccaggtaactgaatcagccgtttccccaagggagtgagggagagtgagttggcctatagctgggccagaggaggtctgccaggagtctgggaatggggagggtgacacccgcagccccagcctcctggggtgtgggtatggatcaccttgtgtagcgcctacttagggacaaggtttcatacccaccatcgcatttccagggagatgagagtggaaagaccctgggcgctggtaggactacaccctggtaggtcccctcaggaaagttcagaaatttagggcctccttttggcattctctggaccaagtggaggaaggaacatccgggagggaaaggacaaagaacctggggtgatggtaacttcaggtattttttgt

SEQ ID NO: 3788 - DNA, 2300 bp, Homo sapien
tataagaattaaaccaaatcacctgtgggaaaaccaagtgttactgtggaaactaggtcagactcaggggatactaactcacattaataaaactcacactggaccaatgggtagcccagaatgtccatgggtcatttaaaagagaagcatgcctgcaaaagcagccctagtcgctccaaccagctgggcagtgcattctctgccctaaaggacatacaaccagaagattccctggtggacatggtgtctcagcaaggggacttagttgtttgatcttgatagccactgtcacctggctatcggaagaacataatgactcatctgctttctaggaatttcctgggcaaagtttagaacaggtcaggctacccatgacactggacaatactgaagatgcatggacaaattctcgccctctggctttgctttgtttaaagactctatcatacaattgttcattcattcctcaaatctatattgagctcctcctaagtgccgggcactgggctaggtgggtagggatacaaaagaggcactgcccccttgccctcctcagggagttcacggtgtttgcagaaagactgacaattccatacataattaccattaattgtggtcagtgttatgagagtgaagcagaggaagccagaggaacgaatgtgcaacatgtcagctaagtccacataggggtctggggaagggctccccgaggcagtgtccatgcacacatccttccctcagccaggtgtcagggcacacttgggtcacttgaattctggctctcttcagccagttgtctggctacaccctgacaactctgagtgacctcgggtgtttccctagtccccacaagcaatgcatctacaaactatcccttgggttgggcttgcagacaattcactctttcattcatttaacaaatatttattgagtccctattaagtactgaagctagctcatttcaccatggggaactttcgccccaacttccagaggtgccttactgaagccccctgcactgattccagcccacttcagagcctctggtttcttttggagagatgggaggacagttgaggacgaggacagtgcagcacttgatgtctcaaagaatgggcacctggtgtcgggtagtgactctccctcccaggaagtaaattaagaaactcccctacccaccctcccagcccctgtccacaattgctttctgaggtccttccgtagcactcaatgggcctgggatgggcagctctgctggcagcagccggagcagtgccatgacccagggagacattaattcctagaagcggcagagggctgtgactggagatttgctagccttcaggtcgcctctcatataattgttctaagtccagtttcttgagctcttttatcagattctaaacccctgtgttctctttgcacactacctgaggggccaggaataatttcccccattgcactgatggatagaccaaggcacagagctcacaagcaacttaacattggggacagaactgggaaccaggtctccaccacaaaccaaaaccgcctaaaggctcccagggcctcccagacatggttcttccccttcctcaggggtgttcagaggactactgtcttcccaccccctagatctccaatcttcaaagcaagcatccccaagagcacacccctcaggtggcctcaatagctcccattgtccaagaggctctttggcctgacccccagccccataagcagcaggacagcaagctcagaggagcttgtcctgccttgtccccctcctctgcctcgtccccctcctccagggccgccttgggggagccggtggggcaggagccccgctgaatgtgacctattgtcttcggggtggatttaggaagtgccaagctcccatcacacagccctgctccccaggtaaaacaaaaaaagggctgttcatttgggaccttttcccccttatctccttttcctatctcctcaggcttagctatggtgtagtgttcaaaaccacttcccctctgagccaatcagaagccggggctcaccccgtggccctgaggaaaagttatttataaacgcctccctggattatttgagcagagccctttcacacacctcaggaacacctttcggctgcccgctccccagacacacctgcagccctgcccagccggctttgctcacccactggtaagccccacccagcccagcccaccccactgggctggggtcatccctgcaagagggcagtcaccaggggtaccgagaggagggatgacaggaaccaactgcca

SEQ ID NO: 3789 - DNA, 2300 bp, Homo sapien
gtagggattgtaatagctggaagtgggagtatagtggctaaggagagttataattatttttttaaataaatattactacagcttgtttgcaaatgggtgggaatgatctggtagacagaatgaaaatcataaagagcaaaatccttgggaaggtggaagcttgggctccaaagcacagaaggaggatgctactatattttaggcagctaaatggtaagtggtcatgggatggaatgaaggcgctgaatttgtaggctgttgaggaggtagaaccttcaagaagtaatgctaattggatgtctggtgacattataaaggggagtctggttaaaaggcaggacaaaggccagatgcagtggctcatgcctgtaatcctagcactttgggaagccgaggcaggtggatcacctgaagtcaggagttcgagaccagcctggccaacatggcgaaacccccctctactaaaaatacaaaattagctgggcgtggttcgggtgcccgtgatcccagctacttgggaggctgaggagggagaatcgcttgagcctgggaggcagaggttgcagtgagccgagattgtgccactgcactccagcctggcgacagagcaagactctgtctcaaaaaaaaaaaaaaaaaaaaaaaaagcaagacaaaaggacttctctcctgtcacagactctgccctttctgagagtctgggaccctactattgtcactcctaaattttgtttgtttgtttgtttgtttgtttgtttgtttgtttttgagacagagtttcactctgtcgcccaggctggagtgcagtggtgtgttctcggctcactgcaagccctgcctcccgggttcacgccattctcctgcctcagcctccccagtagctgggaccacaggcgcccgccaccacgcccggctaattttttgtatttttagtagagatggggtttcaccgtgttagccaggatggtctcgatctcctgacctcgtgatctgcccgcctcggcctcccaaagtgctgggattacagacgtgagccatcgcgcccagtctgtcactcctaacttctaatctgctctagggagagtcccaatagtccatcttgcatactgaagattaagtgaatttcacagccaacaccacacaataccttctctattgagctgtaagctgcctctggactggatggtgttttgtttttatttttaccgtcagcaccagtgcctctcacatagaatttagccaagccggttaggtgttaagtgctgctgctgcgctgtcagaagggcacacggggctggttctagaccggcctctgctgcttactcgttcagtaatcttctacagcaagttcttgaacttctctgggcctgttttctacctcgccgagtggttaactgcgtttaggatcttggaagcacctaagcacgaaaagcacataggccagaagttaagatgtcccttggggacgcaaataccgggaatttctccggctgttcccaccgatcaagcaccagggctctcaggtctagctccttcgtctccccacccccacatataccctcactttttcttcctttccctatgcctcgcagtccctcaacagggtctgcggtcagacgtcactcccaggtgactggcaatcagggatgccgcctcgctcacctggccacccttgaagattgtggatcctgcaccggctagccggctggcagagggcgcgccaacagccgccagccgaagtgcccccgcgtaggtgggaggagtgactgcctctcaccatcccccggggatgcacctgtggagagacggcccgagagttccagggtgagtgcgcagaggagcttatctgcctgcctgcgggtcggtgtgtcctgccggctgctgggcgctggcctgcgtcgcctgcttgtctcgctccctgtccctcgtccgctaccccctctgccccccctccctccagcagccggcctctcggtcatcccgccgggtgggtgcctgcgaacctcactcctccctcctctgcaggagccaactggcgagccgcaggccgccgggctcggcctgggagcccataaaacccgcccgagccgcgccgctgcgctccagccgctgctcaccaggcagagcgagcgggcttggctggggcttcctgccctgagcgcgacaccgactgccccggaccgcgcctccaagcaggctgaagggcttccgctcttggcttccagaaaagtttggagaaagagaatttgaggcggattggagggtggtagcccctccccagccttctttccctcccagaa

SEQ ID NO: 3790 - DNA, 2300 bp, Homo sapien
tgtattatggtaacttctaatcttgtggccttagacagtctagtccaaaggcataaagaaagtttgctttaaaaaaaaaaaaaaggaatggttatcttcaaaaaaaaaaaaagtggggggagacagaatttatgtaaaaagagtgttatatggtaaattcttgtcctgaaataaactaactggtgtttaaagaaaaaaaatgtttgtaataagtcagaaagttgagacacattgaagaattgtcggcaaaagtcgtgaaagaaaaaatgttataaaaaaatttatgcaaaaaatgttgtataatttaaaagtaataaggcctcctgagtactattaaaaaaacagtttatgtgcaaggtgtataagaaaagtaaaacatacctttggtaaaaagattataaaggggcataagaatgtggatttttacctacattaaaaggttaaaaacaattattgttttaaaagtttaagcaagttttaaaacgttaattataaagaaaattctgtgtgtaaacatattagctaaagttaaaaaggtatcatccagtttttctgtgaactggacattaaagtaaaaaatgccacaggtttttcttaaagcatcaacctgctctttaacaaaaattataaaaggttaaaaagagtctataaaatcttaccttatggtcaaacatgaaaaattggataaatatgtctacaaggttttattaaaattcagtttaaaattaataacacactaatataaaggtaaaatttagcttatctggtataaaaatcatacaagaaacattattaaatataaaatggtgtttagctttctttggtctaaaaactaataaaaattggtgctaaaggaaacattcattttactagaggatcataaaagttaaagacttaaaacaaactttggcaattaagacagcacgccaagatgcaagtgcctggctgaaatggatcaaatattccatctgcactttaaacaaatgcaattgttatgcttgtgcacatggcaggccagaggccctgattgtcccccttccactaaggtggtcctccagttgaccaggcatgggctgcagggtagctattttccaggtttctacagcttggagtaataagtcatgccaagctctctctgctatatcccaaagtccctgcgggtcagcccctgagggccgtccagcttccgtctcccaacactaagttcacttcatgtctctcatggcagggaggagacttagcattccttggagacctgaagggatgcagtgagcttaagaattttcaagagcttatcagtcagtcagcccttgttcatccccgagcggatgtgtgatggtattgtcgtggacctttattgggcactctgccgaataactagagtggcacttgtgctttagcctatttggctatccctttcaccctggcatttcatcaaccagaggaaggaaaaaaaaaataataagacatcgtaaagcgagagaagccccttatgggtctttcaactctcacatctatttagatgcaatcgaagccccgcaaggaacaccagatcaatttaaagtccgaaatcaaatagctacaggatttaagtcaatattttggtagatgacagtcaataaaaatgtagattagataaactgcatctattacacccaacagcaatgagcttttcatgagttgaaaaaaagaaaaaacccatgtcggccccagccctggggctacctgacctgacaaaaccttttacactctatgtgtcagaaagagaaaaagtggcagttggagttttaacccagactgtagggccctggccaaggccagtggcctatctctcaaaacaactagatgaggtttccaaacgctggcccccatgtccaaagtccctggtagcaatagccctgttagcacaagaagcagataagctaactcttagacaaaacctaaacataaagtccccctatgctgtggtgattttaataaataccaaaggacaccattagctaatgaatgctagactagctagataccaaagcttgctctgtgaacatccccgcataaccattgaagtttgcaacacctaaaccccgccaccttcctcccggtgtcagagagcccagttaaacataactgtgtagaggtattggactcagtttattctagtgggcctaaccaccgagaccatccttaaacatcagtagactgggagctgtacatggatgggagcagcttcaccaacccctgcaaagtgactctgaagaagacgacaagccctgctccagtcacacccggaagctgactgg

SEQ ID NO: 3791 - DNA, 2300 bp, Homo sapien
ttttaacacttagaaaacctattctctaaaagaattctctgtatttcctggccaataacacaattgttagaagaaatgtacaatgtaccaggtgacatgtggaaggggacaacagaagggggcaatgacaggcacttgtgaaaacatttgcctttttcttgatcacgtcttgttcctcttctcatccttgcttcatttcacaaataggggaactgagtccaagtaagtgaagtgactcatccgtgccacctgggctcttggttccaatgcttgccttgttaggggatttcctgactgctcctgcagctctctttgctagaatgtggtaagagttgggggaggagagggtggcagatcctctttcatttggccttaagcacacctccctcttcgcctctcaccctgagcagggctggcgcctgaggccggtgaacacctgtggtggtggctgtgggacagcatcttcccctgctctttctcttccttcttccccttggccacccacacccaggcaggtgtcctccccaaccccaggacactgctcttggtgtttcacaggcacgtgtcctctttttctgaaattgacattacccagttcaacatcacctactttaccggagtactttgggctctttcaaatcaatttccgcttcgaaggctaaagatttgtcatcagctaagaggttcaaaagtctgtggtgtaggctctccaaaattctggcagaggtcagttgaccctggcttttatgaaggagtctttggcattcattcattcattcatttattgaagaaatatgtattggacctattcattgcatgaggcactttctagacactgggggtgaaatgttggccaaaacagataaggtctctgttcttatgaagctcacattcatgtgatgagaggctgacaataatcaagtaaacaaataaatgatcaaggtgacttcagatactaatagatgagagggcgatgtgacagatagggtctggggagccacctttgaatttgtgctgaattctatctgaagatgccttcactaagagagaggtgctgtctccatggcctttgaggccctcccctccagtggtgagattttaacaatctccccatctgacaggttcccatgcaggaatgaaagacatggaagggaagaggggggccagctccctgagtcctgtgtccaccagctgctgctaaatacctctgagaaactctgcttctatctaaggggacctacttctctcgggaatctcaatacttggaacaagaacctcctagacggaccctttggcataatgaattggaccaactgtaggttccaggactagagagccagcaatgcctccatgaacaatctcacccaattactctgctcaggtaagaccaactgaaaactagaacaatacaaatggtggttattcctgtcttctgtttctttgtttgtttttgtgacagggtcttgctctgtcacccaggctagagtacaatggtgtgatcatggctcactgcagcctcgacttccctagcttaagtgattctcctatctcagcctctcaaggagctgggactacaggcatgcagtagcacacccagctaattttcggattttttttttaaagtagagacaaggtctagctatattgcccaggctggtctcaaactcttgagctcaggcggtcctcctgccttgacttcccaaagtgctgagattataggcgtgagccactgggcctggctcgttattactgttgaataatagtctgatcactgagttcttaaacaactccatgaggtaggcattcatattctgtctgtttcacagatgaggctcagaaaagctaagtgtttgtcctaagatcacagttaggaagtgtctgagacccaggtcactgtgagggaagagagagaccctctcatattgttttatattgttttatactcagtacctgttttaaggaaaaacaacaaggaagtaaaaccaaagacaggcagtccggcgccaggcccgaaaccaggcctgggcctgcctggcctaaacccagtagttaaaaatcaactcataacttagaaactgatgttattcatagattccagacattgtatagaagaacattgtgaaactccctgccctgttctgtttctctctgaccaccggtgcatgcagcccctgtcacataccgcctgcttgctcaaatcaatcatgaccctttcatgtgaaatctttagtattgtgagcccttaaaagggacggaaattgtgcattcggggagctcggattttaaggcagtagcctgct

SEQ ID NO: 3792 - DNA, 2300 bp, Homo sapien
agagggagagagagagatgggggaatgaccagttagtagagcaatggagcaatcagaacacacaattacacttattaaattctctgtcttacacgggtgcagtttgtggtaccccaaaacaattacaacagtaacatcaaagatcactgagtacagatcaccaaaacagataaaataatcatgaaaaactttgaaatattgcaagaattaccaaaatgtggcacagagacacaaaatgaacacacagtattggaaaaatggtgctgatagacttgcttgacacaggtttgccacaaaccttcaattaaaaaaaaaaagcagtatctgcaaagtgcagtaaagcagagtgcagtacaacaagtatatctgtaccttattttgtttgtttaatcctccttaaaaacccattgatgtaggtaaggtatttggcagatgacaaaactaaggtatgtggtgaataagcagttacgggcaaaacatggcagagtttactgccaaaatgaatgatctccacttctagccacttctgactcaagctgcccttctaggtttagaccactctccccagtgaaagatcaacaagacgggctcctgggaaatgccaaagaggctttgttgccttgggttcaggggtcaaaggtctaggctgttccttaagtctttttgatgtctttttttaacatttttggacccaagggtgggtttggcttagctccatactccacgtttgcttgccatttgaacttcagagatgaaaggcagatcccatagcacttaagagattttccagaacactagctggtcagggcagagctaaacctaaacgcaggccatctacttcctactgctgagctagtgccctctggaagcattggcatatggtggtggcctctgctgccctggctaacttgagtcagggtcagggtcttcctacctgtaaccccttcatccccaccccaggcactgaagccccaccatctgtttatgaggcgggtggccacagagataggctgatggtgagggggtttcacacactgcggtaactaaggcctgagccccacccactctccacccctgcgcttagtcccacttgacagatagaagatcctattgtccctgagcactgttaagggctgaactttgtcctccaaaatccatgttgatgtcctaacacctagtacctcagaacgtgactgtatttggagatagggtctttaaagaggtattaagggtaaacgcagtcattagggtgggccctactccaatatgactagcgtccttataagaagaggaaatgtggatgtggacacagccacacgctgagggaagacccatgtgaagacacagagagaaggcagccatctgcaagccaaggagagaggcctccgaagcaaccaagtctgccaacaccttgatcttggacttccagcctccagaatagtgagaaaataaatttctgttgtttaagccccctgtactttgtcatggccgctttagtagactcatgcgggcacttgctgtagacgctgacccccttgaccctccctcgctgcccctgcattctcctccacacacccctgagccccagccccagattcatcaagtccttagagtcaggagagtgggctccataaatctgcagctacattttcccatttcagggcctttgaggagtgctggtttgtgcttcaaagtgggccagggaaggataaactgcctttggagcatttgagagattgaggagagaacaggaatcacccagaaaacagactgacgaatattttgagttagaatcctgccacccatgacaagtcagctcccacccctccagagtctccagctagagcacttgcagtaagagttcagtgggcctttccaggcagccaggcatgtgctgccctccggattcattaacagggtttcttggggtcagaggaggtgccaaagccctgagagaagccaagccccagaggactcccaagttctccccgcagactcatattcctcttgtaggtgggaaagggacggagaggtgcagggggaacgccctgttccacatgccgtatttactctgggcatggctaatgactccagggccttatcattcggccctcagactgggctgggcaggtctgagagttagggaaagtccgttcccactgccctcggggagagaagaaaggagggggcaagggagaagctgctggtcggactcacaatgaaaacgctccttcttttgctgctggtgctcctggagctgggagaggcccaaggatcccttcacaggtgagaagacgtcc

SEQ ID NO: 3793 - DNA, 2300 bp, Homo sapien
agaaagagaatcttgtgattgctaatttagggctccttccacccctttccccactatcagatgtaaaaattcatgcttactcatgacagaggccacacataggttatattccataatgaataccttaatagaaaaatgggcagagaacaccttaataagaaaatggcagattataaaagaaaaatgaaaatgactgataaacatttttaaaaatgctcaggctcattagaatcaaaggattgcaaattacaataggataccacatcaaattgtcaagacaaaaaaatgtgaaataaacattcatatatgctattggtggtattttaaattggtaccgtttttctcaaaggcattttagtggtataaatggtagtctttgacccagcaatgttatttctaggagaaaataatgaaaggtgtgtgcattagatcatatacaaagtaatgtgatatggcattttttatcacaaaaatttagaagtgaagtaaatgtccaagaatgggagctacatcaatagaacgtattataatgctatagaacaataatacatgtggaaatgtttacaacatatgtttaagtgaataagttacaaaacaggatttataatgcaatcccaattttgtaaaactagaaaagattagaaaaatacataacaacacttagagtggtgatttcttagtggtaggaatttaagagttacttttgttttcttttttgaggttttctagtttccttattataataaacatacattacttttgtaatcagaaaaaaaagtattttttaagtagagatgtatgtaccttgaaaaaaagcaagatcttaaatgattgtgtatctgacatgaaagtccttcctttttttgcctgggagctagcagctatggtgggagggatgggaaacagtattataacttctgttagggtggcattttgatacccgaatttctggtaggaaagatctagaaggagctggcaaaagataaaacaagggctttccctctcaatgacccatgctgccaatcagttttagctctcttaggtttggcatacaacacttagtatagaaggtgtgacaatttccttcctgcttcctcctttctttccttttcttttcttttcttttttttgagacagagtctcactcttgtcacccaggctggagtgcaatggtgcaatctcggctcactgcaacctccaccttctgggttcaagcaattctcctgcctcagcctcctgagtagctgggactacaggcgtgtgccatcaggcccggctaatttttgtatttttagtagagatggggtttcactatgttggccatgctggtctcgaattcctgacctcagctgatccacccaccttggcctctcaaagtgccgggattacaggtgtgagccaccgtgcccagccctcattctttatttctactgctctatgtagttagatgtcagccctgggtggcagcagcaaagaacccaggagccatcactgctcaagattaactagttggagaccccttaacatatattttcagcatctagtaacagctaatctcacaggcagtcaatattgagataccgctgccttgtgagttttgggtagaaataaagcaagtaagaaatatagttccatcctgcttggagttttctatttagttagggactttgaagtccctaaatgtttatatactttttcctatttcatcccattacacatcttactttcctttgaaatcttctggaatgcttgactgcaagtatctgagaaaccgtgttccacctaacaacagttgctaggtaggatgtggctttcaggcctgctctttggggaccaatagaaaaaccaaaggctaccaccctttttccctctacgcaattgcctttgctaggctatagagagggcacatttcattttattaaaactctttgagtaatctgaccataattgggtctgattggagtggttatctgatttgctgggttaaataatgggccttaattgagtctgggttatttgtagagccagtgtggcttttgcctttgttgctccctcctctctcttctgtttcccaattaaccttcattcctctttccttgcagagtaaagaagtcggccagcagctccaagatgatttgatgaaggtcctgaacgagctctactcggtaaatcagatgggttgcttggctctttaacaagcagagggaagcagcatttggcagcttgcagccatagtacatcagcaacagaactgaactgaggttgaggacaagtgcatggtccccactgggggtgacccc

SEQ ID NO: 3794 - DNA, 2300 bp, Homo sapien
gaccaaagctaccaaaaaaaggaggagtggacgccggggaccaaaaaacagcaacatgtgtgctcctcaggaatgatgcttcccttaagattagcatccagactctagaaatccccactccagaatgacagctgtggcagtggaaccagaggatttgctgtcatcagttggcctctatggagagtgagacgctgtcctggagatagaaatgtggagttggtttccttcctttccttcctggggaaaatcaaaccatttacagttcatttccattgctgtggcttaggaaatgtcagtgtctgaacagatggagaagtgagatggcagcatgtgcaattagaattgggggaaggggtgtcaccaagcctcaggaagccccattcctcacctgccctggcttctggtcaaacttgccttccaagcaccttctccagctgtcactgaggttccttcccagggatcagtggaacttggggaccagctgagtggagtgatacattttctggtgttagtgactgagttgccttctgagccaaacagcttgtctccataaaggaggaatccagatgctgggtgctcaagccccctcctccccctgtcagagccttatttccatactccagagtgcagctgaagtgtattaccttgcaccctggtagcggaccactgccaaagcatgcatcatcatcagctctgctacttcttaaaggaacaggcttggaggtggtttttccctccatgattcctctctgctaggtctgggttactttaaaaatcaatagctcactcttctgccagggccctccctttatgtaatatagctgatcagtggctgagccaggcaggggccaggaccagtcctggagcttgtgaaggttccgcattctagcctagccttcatatgagtgaaaataaaaagagatgagagggtgggtcattcttggcctctgcagccagtctatccccatcagtgtgggttgtctgcagattgtggaggcaacaggagggagctgcctggaagtcgttgaactagggccaaagattgggtagcattttgaccggaagccttaaaattggccagggtcccacactaactggtgttctggggtgcacagcacatgaattgatgccaagtgctctcagatgtactaggaggaggtgcttggctccatttttggtgccctcagaggctgtgggactctggatgcctgactggtgacatcaggcagccagagaatttcactcttggcgctaaccggttctggccactgagctttctccattgtgtctgcttatccaagagttagagtgaagtcagctctctgtggatctgagagttggctcaggccagcctctcagctgggggaagaggtcaagtcagttgggagcttaaaagccaatggaggaaaaggtcaagtcccagccccctccatttgaagaaaggttttttcttttcaagcaagggaatggtccgtgggcatgtgaatgtgcccactctttgctgaggaggaaggagaccatttctatccagatgtctctctgcagacaagaggctaaaggacgaacggtaacaaggtgacaggagctgtctccacatgggtcctgcctcccaactctctcagccttctgctcctcatctgtcatccaggggactgtggatgacctcatcccataaccacatctccaatgggagacagtggaacagccattccttcacacaggggaaagctaattggcaataatccttgcgggaaggtcagactcctctcttacagatctagggaaggcctggggtaaaatgatggctctttggaaaatgccaagctccttcagattccataccccctcgggccctctagcataggcaacgaacttgttcctggcttcacgctttctcattgaatcaaagctctcatgcatggcctggatttgtaaacacatgctggctgccagcagtggcaagttagcctcctgacccacttctctcctgctttcactctggtgtatgaagggggatgagggaggggccagagaggtggccacttggacctttggcaggaaatcttcactgtgccaaagcattgtgtttctggagccggagctgcctgaggcactcttctccagcctcctcagccttccatggagctgcagaccctacatagacctacccctgccgggctccaaacagatccccctacccattcctttcatgtactgtttggtcctggaagaggctcacacaagttggctttgggttttgcttcaacatagaaaccacgagccttataccttgaatatgg

SEQ ID NO: 3795 - DNA, 2300 bp, Homo sapien
caagtcccagccccctccatttgaagaaaggttttttcttttcaagcaagggaatggtccgtgggcatgtgaatgtgcccactctttgctgaggaggaaggagaccatttctatccagatgtctctctgcagacaagaggctaaaggacgaacggtaacaaggtgacaggagctgtctccacatgggtcctgcctcccaactctctcagccttctgctcctcatctgtcatccaggggactgtggatgacctcatcccataaccacatctccaatgggagacagtggaacagccattccttcacacaggggaaagctaattggcaataatccttgcgggaaggtcagactcctctcttacagatctagggaaggcctggggtaaaatgatggctctttggaaaatgccaagctccttcagattccataccccctcgggccctctagcataggcaacgaacttgttcctggcttcacgctttctcattgaatcaaagctctcatgcatggcctggatttgtaaacacatgctggctgccagcagtggcaagttagcctcctgacccacttctctcctgctttcactctggtgtatgaagggggatgagggaggggccagagaggtggccacttggacctttggcaggaaatcttcactgtgccaaagcattgtgtttctggagccggagctgcctgaggcactcttctccagcctcctcagccttccatggagctgcagaccctacatagacctacccctgccgggctccaaacagatccccctacccattcctttcatgtactgtttggtcctggaagaggctcacacaagttggctttgggttttgcttcaacatagaaaccacgagccttataccttgaatatgggtagtttcattgccagtaatgggaactctggaactgccaaagggactgtatcctctttctgacctggtgttgctttcttttgttaggcttcccagctctgtgcccagcagcctgtccagagtgagctggtacagagatgccaacaactgcagtctcgcttatccactctaaagattgaaaacgaagaggtgagtttcttccttaggaggctcaaagccacactcttagtttccctgttgaaacttttgctgctgcccgtctgggagcaggtggaaggagcatgcagagaatgtccgggcggccgcaaacatttcctagccaaatgtaggcttggactttccccctctgctacatcctgcccttgaactccaggaagttgctcttgcattgccaaaggttgtgctctattttgagcttttgcgaaatgctttttttcccctctacacatttaatcaaaatggcacttggcagctgtgtgaacaatattgtgtctctgaaaccacctcctcatgcctagctttttccagcatgttcaaacaaacagaggcctttgactttgacacttcaaacatctccatcctcttaggaaagggtgagtttcttctgggctcagtgtatttgctttcaaaaagcggttcaaaagggcgggtgatccagctttctgttgagctcagatggcttcttaccttgtgtctcagtaagtcttactttctgcaggaagatcaggaagaagtagggataggtcacttagtttgcaaatgagcaaacaagttcatcagtttgttgaaggtcatgaaacagaacctggggctttgcagtactaggcccatcacacattttaattagctgtttgtatgagggggttggtttagatttattttattctctttcccttaaaacttctattataatgttgttatataatattataataatgctaatattaaattttaaaagtaaacattaaaagatctgggtcaagtacatagcatgaagggttgtagtggcttttaggttttcactgtagagagtagcatgctgtagcagagtccatgtgatgtttacctcccacttagcactgtccagtgggaagcagagctgcacactctgatggcatcctgtggccttccccagcccactctcttcaagcttctccatcacctgctgtttaacaacccacccttcatgcatcctgttggcccttgtcgtggcaggtaaagaagacaatggaggccaccctgcaaaccatccaggacattgtgactgtcgaggactttgatgtgtctgactgcttccagtacagcaactccatggagtccgtcaagtccacggtctctgaaaccttcatgagcaagcccagcattgctaagaggagagccaaccagcaagagacagagcagttttatttcacag

SEQ ID NO: 3796 - DNA, 2300 bp, Homo sapien
gtggtggtgcacgcctgtggtcccagctacttgggaggctgaggcaggagaatcacttgaacccaggaggcagaggcctcagtgagccaagattgtaccactgtaacccagacaggcgactccgtctcaaaaaaaaaaaaaagaaccactgcttcagcccctaaacttagatgttcccactgtatattggaaaagaaaaatggattttcatctgtattttgatgggagcaagaaaatagacctagaatcatgagaccacagtccacaaagatgtgtcctcttcaagctcctggtcattgtagccacctatgaattgaacagttcttaccttagcaggcttcccaacattcttcatcttccacagagctttgactcaggactctcaggactagagtttgtttccctttgaccatcaggcttcccagacactactggttttcttttatgttaccaaaacattgtcagatcactctaaagtatcaaggccttcctcctctttgtccctccatgacaccaggaactggccagccttggattagctacagcttaagcctgcagcacctcatgcctcagttgtttgctctgaggttaccaaggtaattatcctcctgtccctccccagttttaatttgactaggaagtagacttagaaacttcccctagtcttttctaaatctctgctctctttgaactcaggatccggggaaggattatacacttttaagaactcctgtgaagcaatccaatgagatttgtaacctcccccgttgctggcctctcctgcatttgattccaggctctagagaacagtgattctcaactcttttctcccatcacgtccataataccactcttcaagtcctgcagtgattcgcaaacagacagggggtacatctccaggaggggagagaaccactgagtcagagggtaatgggctttgtaatgtgaggctggatgaggggtacactacagaaacaaactctgcaatcagttctgaagaacagctactcagatggagacagctgagtctcaggcctcgtttcccaacagaggacctttggttccttctcagaatcaaatcctgcccatgcctataagggagactcctcagcagagctcacagctctgcaggctgtgttggggaggtatccagagctggcccagccctcaatgcctggacgggcaaggcccaatgggactcatcaggtgcagtggctcattgaaggccttgggtccttggccaaggttggaggtgtggctggaacagctgctggctgagaaggggagagttcccagaataaataaatacccgagaatgaagtcagcctgcatccagaggaagcccgagcagaagccaaatggcatgctgaccttttcctgaaaaaatcctgaatgtaataatatagaaggagattatgaacacgaaaaacaattgcatttgctgttctaggaagaaattcactggcttgatggaatacaaaagctaatcagttggctatttgttaataagtctagaggctagaaaggaatatccctaataatttgattattttgttatgcaagaaggtacacaatgcacagtgcctgtgcctctgaccatatctttaccagggcagcctgagggtccccgtctgccctggcagcttagtatgttggtgtgtagcagccatattcagctctgcagagtgacatgttctcaaggtcatgtggcctttgatagataagatccggggatagggatgaggatggggtggtaagtagaatttgaaatgggagctggaaagagagaagggatcagagctgcaagcaagtacctctagtttgcatttcctgagctcctgaatgaccattctggttgtcagttttctccccagcttactttctggaaagtctctgacacccagaaaggcaggtggcaatttgtggaccttctgcttttgctcttggcagcgcctcctgtgattgtgttttctgggcattcatgcgagagctttccagcttgccccctttcccttctcctccagtttatcacagttcagtgaagagaacatgatggacccctacaacctcgccatctgcttcgggccctcgctaatgtcagtgccagagggccacgaccaggtgtcctgccaagcccacgtgaatgagctgatcaaaaccatcatcatccagcatgagaacatcttcccaagccccagggagctggagggccctgtctacagcagaggaggaagcatggaggattactggtaggggggcttgggacgggaggaggggagggattcactagcacacactgg

SEQ ID NO: 3797 - DNA, 2300 bp, Homo sapien
cattcccccagccccctctcctctgcccaactccccttttcctaaagtctggccaagcaacccttctggaaagcccttcttgatcaccttcctccccgctgcgcgtctgccactcatagcatctgccatgccatcctggacctccaggctcctgatgggatgcccacctttacatcctgagcacacagtgcctgcctcatagcaggtgctagacacatggtagtttcctttgaatgtgctaaatatgctgggaaagagattgacggagagaggaaagtaagagtgctggtgaggacccagcaggttcatcagggaaaaaagtgggtaaacattacggattgtctaagttatgtagcaaacctcggtgccctaaagcaacaaaggctgatttctcaccaaagccaatgtcccttgtggaccagcaggggaactctgctcaggacagtcactcaaggacccagactaacagaatcacactgccagaaagcagagttctgggagggtcttgcatcaggaaataaatgctttggtggggaactcacatgctccccctatcacaaagtaactaggatgtgcagttctcccatgtgccaggcaggcagaaacctgggaagactaggctgggtgcagtggctcacgcctgtaatcccggcactttgggagactgaggcaggtggatcaggaggttgggagatctagaccaacctgctcaatccacctcaccaaccacacagtgaaaccccatctctactaaaaatacaaaaaattagccactggctcacgcctgtaatcccggcactttgggaggctgaggcaggtggatcaggaggttgggagatcaagtccaacctgttcaatccacctcaccaaccacacagtgaaaccccatctctactaaaaatacaaaaagttagccgggcatggtggtgcatgcctgtagtcccagatacttgggaggctgaggcagaagaatcacttgaacccaggaggtggaggttgcagtgagctaacatcatgccactgcactccagcctgggtgacagagtgagactccatctcaaaaaaaaaaagcaagctgggaagactgggtggaacatgaggatctcaggcactcaggcacattcctcctggtcctgatgtgagaagttgcagcaactcctccagctggaggtgttatggggagttctctttatctgagcactaggcagttctcagctctgctcctgttctagtgtcactgtgggaggggtggggctggcggaggaaaccaccaggtgtggccatgggaaagtccctccaacattctatagaaacatggaatttcctggttttaaccatttcatatccaactgccatctctgagctgaccagagcaggacagacccctccagcctcctaggacatttgatgtggggcatcgagtcctggctgggaagttggcacctgggtgccagccccagcagtctctgaagagcatgggtaaattactgaagtgtgtgggcctccatgccttcaatgcctttctgtaaaatgctttccaagctcccaaacaattccaaatatatccatgtcatccaatcaacccacagagtagctgttactctgcgggtgagtgagctggctgggaggggctgcatgctgtgtgctcaggtcacactggaaggcatcagctgggtccccgcgcttgctctcggacctctgcaggcctcctgggaaggtgactcagatccaacttctaggactggatcggcatagctcccacacttccttggggttcctgggtgtgggagcatggacttcccaggcagctttccacttagttaacttgcccaacctgctctgttgactctgggaagagccctgaacttccctgctccagtgaactgtgggagatgccaaaacagcacccagctgcccatcaagattaccagaagggccccagttcctggcttctctgtggctcacactctggtcctattgcctacccttgggaactcagagcatcctctttctcttttctgctgagctggtggctgcaccgagttgcctctgtctctttaagagagaaagagagagcgagagacggaaatcaggaagtgcgagagagctgagagccaggactcagtgctgagcttggtgtcccaccgccacaaggaggcagggaagaaacccactagtcccagctcctggggtggcacagacattgcaactggccctgcctgtgggtcctaggggcccttggctaccaggaggctaagaacactgctcatgaatgacagtgagccctgaaagctctgggg

SEQ ID NO: 3798 - DNA, 2300 bp, Homo sapien
tgttttaagaggctgctagccatgaatctgaatgccacatggaatcttcccagatatctgtgactgatctgagcccccgactcagcccatacgagacaagaacttgtttcctctacctaccctgtgcaggggctcatagctgaatgaggtggggaggggatggggaaggtgagcggagtatgcagagaactattgtgttaataatactgtgtttggggccagtgcggtggctcatgcctgtaatcccagccctttgggaggccgaggtgggtggatcacctgagctcaggagttcaagaccagcctgaccaacatggagaaaccccgcctctactaaaaatacaaaatcagccgggcgtggtggcacacgcctgtaatcccagatactcaggaggctgaggcaggagaatcgcttgaatccgggaggcagaggttgcggtgagccgagatagtgccattgcactccagcctgggcaacaagagcaaaactgcgtctcacataataacaataataataataatattgagttttaggcactttatgcacatagctaatctattcctacccacaactttccactcaccacacgggcaccgaggagtagtatctttaaaataccagttggacttgacctaaaacctctctgtggtcctctggggtaaagtccaagttcctcagtgtggcctgcaaggaccttttggactggctcctccctttccacaataccagcatcctactttaacctactctccagtcatatagaaatactagtagctcttcccatgcctgtgccactgctgctcccacggccaggaatgcctcccacaccttctttgctaggtatcacctgctcacctgctaagaccactttggattcacctgttctcagtcactccctgacacttaggaagtttcccagcctgacctaagcaccctcccctgtgaggatggtgactcaggaccacactggatgtttgcattcctagcatagcacctcctccatgatgggaagctatctgtggcatacctgtcttcccccatagaggtgagctccccatgagccagaaaggtggcttagtcacctctgtagttccagcatcccgtgggcctggtacactgtaagggctcagatcatgtctggtgaactgaatgggctcttttcattttaagtgttatgttaggaatcactgcagagaatggagaggtacattaaagaggtcttcagacacctgaggatcttatgggttgttctgggtcttggtccagttcctcatttcctactgagatggaatcagcagctctgcagaacctcagatccagggaggcactgatgtcagcagctctgccttgcatagaaatgaactgaagccactgggcgtggtggctcacgcctgtaatcctaacactttgggaggccaagaaaggagggttgcttgagctcaggagttcaagaccagcttgtgcaacatagtgagacctcatctctacaaaaaatataaaattagctgggtgtggtggtgcacgcctgtagtcccagctacttggaaggctgaggcaggaggattgcttggtcctacagtgagtagtagtggtgatcgcttgatcactacagtgagtcgaggctgtagtgagccaagattataccattccactgcaacctgggcaacagagcaaaaccctgccaaaaaaaaaaaaagaaggaaaattaaaaaaaaaaaacaactgaactgaagcctttgagtgagtttgtccgccacatctcataggctttgctcatgagatcatacagcctggatcatatcatctcccaaaaatctgtatttggcattcagggatcccctggctccttcactgagctccaccaagcacatggggttttgcaagctgttgctgccagggaaaacccattgtgggacttccctgaagggccactcatgggctggaagtgttggccagaaattcaggccagcagagtggacgagaggtggtctagtacccaggaacatcaaggcggcagctggtctctgaggccccaggacttgaacccctgggcttaagtgactccacgggcttgaggcccaaataacaaacacaaagccacttggacctgatgcaaggaaacaacctccagccaccttcccccaggcctttagagtgctggtctttgcacagagaagcaccacagaggacagaagcctccaggactcacccttccccatttctggccctaccaggtgagtagagtggcctcaggatgtgggggctcccatgaagatggacaggaaggatctctggggtt

SEQ ID NO: 3799 - DNA, 2300 bp, Homo sapien
ttgtattttcccttttacaccttcagcagaaagtattcaggaatagccctcattgggcttttatctgtcaggtccactgaagtacacttgtcctggggagaaggaacagagaagcccattctcagaatcaccacctcagacctagagcaatggttttccaagttgggtccctggatcaatagcatcaacacctgggaacttgctcaaaatgagccatctcaaaccccagccccagacctatagattctgaaactttggggatgaagcccaataatcttaacaagccctccagatgactgtgatgcataccaaggtttgaaaaccactgatgtagcaaaagcaaggttaggagagggaagaggaaaggtagaggaggggtggggcagaggcggtggcctgtggcttacacccctcatcggagctcctctgtttggtagcactgtggggttgactgtcccatgggtcattcctcagaaaccacctcatagggtgagctcccgcctctggtgagcccccagagccccaggaacctctcttctgctacagatttgggaggcagaggactatgattaccgtgagggagaagccatggagcaaagctggctgggaattccctggccactggactctggaaatcttaggaattacctaaaaattacctccaagggaaaaacaaaaagcaaaagtgaagattcccctacgaagcactagggggagacccatctctggcctgggaagagaagggagagaccaggtccagaagaatttagactattcttctaaaaaatgaccaccgctagacggaccaaaccgaacctgtgttttaagaggaaagctgtgatcactgagtcataatgacggagctggagagtgccacgttaacaaccacctgtctccccacctccagcccaatgtacagttaacaatactggggctagagagggccagggcccaggcccaggttcagagatccaggagtcctccttatccataagatgggcctgtttccatgggcaaaggtgcctgtcaggaacaactacataatttgtgggaaccagtgcaaaaagaaaacgcctggccctttgttcaaaaagtaagactttcaagatggtgaccgcagagcgttaaaccagacaagggtccatgaaggcttgaagcaagccttcacgggggaaagtgccgggagaaaggagatctctctttgggtcccatgagtgaaccatccataccaggttccacttagggcatttaggggaactggtatctccacagtaattactagagcagctctggggaacggagggttggctaaggaagaaaagctcccccaacccttggggcgagggagcgttctctcaatggagcccccccaactcccctccaccccccaccagtcttccaggaaagaggaataccctacccggcagggctgcgaaggaaggggaaatccaaccagagcgaaagtcgcacgcggacagctctgccagcccttggaggcatccggcggtcacccacgggacaaagcgcggctgcgggagcgcgcgcggggcattccggacccgcgtcgagctccgctctagagggggcggcgggcggcgacaagccggagagaggaagggccaaggagcacggccctcctgtcggcaccatcagcgggagagtggcgagcggacgcctagacggaggggccctactcagaccccatcgagccagttcccaagcttttccctccgacctgctccctcccggggcgcgtgagggtgcgggtcgggggtgaacctggtgttggggaaagtgattggcaagggaaagaggcagggctgaaggcctagggccccccgcagaaatgcgccctctgagctgtactgtacagaggcgctcctctgcggaatcctgcagctgctccaggtgaagacgcccccaaatccacactcgcgcagacgtcgcctggcacggaccctacccccttcggtccgtcggcggttctcttgggtcgtccttcctgccactccgactctccccgcccccgccccgcccagcaggctgcggttcctttaaaggcgcgctggtgtggggcggccccttctctcggggctggctcgggagtagcgcagtcgccaaagccgccgctgccaaagctgccgccactagccgggcatggccatggcgtccccggccatcgggcagcgcccgtacccgctactattggaccccgagccgccgcgctatctacagagcctgagcggccccgagctaccgccgccgccccccgaccggtcctcgcgcctctgtgtcccggc

SEQ ID NO: 3800 - DNA, 2300 bp, Homo sapien
gagtagcctgggggaaataatggatgttaaaaaggtttgaaagaccctattcagatgtcagattttcataaggtttggaatggcagggagcagtaccctaaaagaacacagtgtccctgagaactttcctaaccaggtctggcatctggtgtgctgcttctaaggagagattcatgctgactcctggggtaccttggcttggtgtttgaataggttgttattagctgtatgtgaaggttgcattgcagagcttcccggcatgaatccaaggacacagtgtggccacagagaatctggggcctgttttttttttcttaagtattagattcccactgagcaaggaggttctttttatgaagaaaagcatgtttcttagctggctggacaaagcaggtgagctgttattgatggcccaaggatcacaggaaaccacctctctgggggaaaccccccaaacagcctctaaaatttgaaaaaaagattgctccagacaaagccagaacctactttcacccccattaatgtgagatcttcccctgcaaacacccggtagctcaccccagccccgggtgctgaccgtctccctcctcttatctgcctgccagagaagacagctactggtattgacagttctcctgcaccgagggcggccagccggctggggtgctgactctcagctctcttgtttttgtgcctgccaggcactcgcaggcttctgggaagaagactgtgtgggaggatgaagccaaattgggctgcagtttgaaaccttcccgagcactgacggatttggcttaggtgggagagggagagggtttctcatgaaggtagccagagcttaagatggagttggcagcttggtgtccggggggctgagtctagtcctccacccagcttatgtttccccaggactggattgtttcagaactgtaggaaaagctacacagatttggagagagacctgataacccctctcagccacagtccagggccctccggggtccatgagccatcagactccatgaacatggtagcaaagccaggcctctgaaggcagtttccctgccgggactccagcccccactgtatttaaagatggcaaagtgcccacccaaatagcctcatcattgctgagggtctgtacatgacagtgactggggcgtaggcagctgcacacaccagggctgagtcccagcacacgtgttctacctgtgtgactccgagccttacttttctcatctgtacacagtctctgtctcaaggctattggaatgagtcaatgatagagtgcacgtaaatcacttgcacagagagttgttcaaacaatggtagctagaactgctattgatctattgtggggtaattgtcttaactgctttgaaggattcagccctatgtgttcctttgtccagtcagatgggaaaatataaatgagcccttctcaatgttaggaatgacaagatcaggccaagacccctctttctcagactatccggaagatacacagatgacctggacagtgtctgcaggctcctgtgtatcctgaggcttcctgagggccaagttctatgggtgggaaggcagcttgctctctaggttgccataactctgcatctgatttgcatgtgtttgtggtgaccctgcagtttcttctggcatttccaacttaaaatattgctgtttccccaggcagggcagatattgatttttttcttctctaaccattccgattgacccggctcccccacccagcgaatgggggagggagggggtgggggtgaggaagtggatgggggagaagggaggagggatggtgttgcccttatagctagcaccttttactccgtggaacctgagtcaccggggctgatgagaatgggctctttccagaagcaagtgcatgatgaagaaagaacagagggaatgttccccctcgggtccatcctggtcccttctttccctgcatcccttatatgacctgcagttccctgagtccacttgccaccgggggcgggtggcacccaggcggcggggaggcgggggaggggcgcagtgacagccgagccggctttgaggaaccttgcagaggaagtggcttcagaactgctttacgcgaggggcaggaaaggcgcgggaggcgggggaggtgcggagatggcgctctgcacggcggcggagggagggcgctggcgccggggacacgaaaccgcagagcccggacgagtcagggagtgaggcgcgagccgggcgcccggggctctgcaggcgcaggcggcgcggggacaggagcaggttaccgg

SEQ ID NO: 3801 - DNA, 2300 bp, Homo sapien
aagaatgacatacatagtatgtaagagaaggtatgtgaaagtacccagcacaggctgttattaataggtcaggaccccttggggagagtacagcgggagcagacaggccagggaacgatgccacgatggaaagaggatgtcagaagctgggtgcggtggctcacacctgtaatgccagcactttgggaggccaaggcggatggatcatttgaggtcaggagttcgacatcagcctggccaatatggtgaaatcccgtctctactaaaaaatacaaaaattagctgggtgtggtggtgcgcacctgtaatcccagctacttgggaggctgaggcaggagaattgcttgaacctgggaggcagagattgcagtcagccaagatcgtgccaccgcattccagcctgggtgacagagggagacgaaagaaaagaaagaaagaaagagagagagacagagagagaggggggagagagagagagagaaagaaaaggaaggaaggaaggaaagaaagaaaggaggatgtcagctgtgctgaggggttggaggtgggaggctggagccacgccagctcctcttggcagccagagcctgacattgcatcggttctgtgggattggaaagtggaaggaagtgatggcaggttgttcagggtggcgtgtctcccacatggcttgctgaagggaggaaggtagggcaaagctctgtcacggagggggggccctgttgtgttccgcggggtggtggtgtgacgtcgcggcagctgtgaaattccccagccaaacccagacacccacaggacagtgtcagatggtgtcagagtcatccctcactgggcctcagtttcctcatttaccaaaggagaatcctgatccaccccaagtctgctacacttgaacgtcaggcaaattctgggtgggttctgaccaaccagttcccacactcccagccactcagggacagtgtgaagataaaaccgggaggtgggtaacagtgaacttgagagagagccagagaactgactgagggacagtggcttcgaccccagaattcacccctgtattgtctctacaaggtgagggccattgacctcaatctcctcaatttcattgttcacttatccttcccagggggtgggaggaggagggcatctgggaacatatgagaagaatgaacacatggtctcacaggaggaacacaatgggacagacctggaatttctgtttcattctgtacatactgactgtagggtgtgaggcaggttgctaaacttctcttagtctcaatagtctcacctgtaagatggggtaataaactatcttacagacttctggtttgtgagaatcatatgagataatgtatgccaaatacttggcacagaagaagtgctaagtaaattctaggtgtccctgtgcccagtagcggtttatctcctcttttatggtagagggggctacagcccttcatccctgccagttcactcgttcatttgacaaatagatatttacttcttgctatgtgaaaagcactgtggcaagtgatgtggggcctggactggtctctatgtgtccttggtccttgggatctaagagaattcttgtcttcccgatcagtagtatatactggcaccatgggtagacgcctgtccctccagctgtgttgttacttccttgaggagacagaccatggcttgtatttctttgcatctcccatagcatcaaagaagcatcttttccatagcagctttccataagcaaatgcggctctgctcattcaccagattcatagtcagtgcctgagtgccagacgctttcacactaatctcaagacaagcctgtgcagtaggtattgttcccatttcacagatgaggagactgaggcttagagaaatctgagttacttctccaggagggctggctagacactggcacagctgcaatttgacctctcattgtctcactccgagtccgtgcagttagttccactctgcagggctggatgctcacttcttggttagagaggctttggggagggcgtggttgttccctttctcaccctgagaactactacacatccacctccacttctgtgtctcttccagaatgtctgtaaacctgtggaggagacacagcgcccgcccacactgcaggagatcaagcagaagatcgacagctacaacacgcgagagaagaactgcctgggcatgaaactggtaagcgcccgtccaccctcaacctggcccctgctccaccacccgcttcgggtttggcgcctctgccctcactctgaattctgtggctactc

SEQ ID NO: 3802 - DNA, 2300 bp, Homo sapien
agacctggaatttctgtttcattctgtacatactgactgtagggtgtgaggcaggttgctaaacttctcttagtctcaatagtctcacctgtaagatggggtaataaactatcttacagacttctggtttgtgagaatcatatgagataatgtatgccaaatacttggcacagaagaagtgctaagtaaattctaggtgtccctgtgcccagtagcggtttatctcctcttttatggtagagggggctacagcccttcatccctgccagttcactcgttcatttgacaaatagatatttacttcttgctatgtgaaaagcactgtggcaagtgatgtggggcctggactggtctctatgtgtccttggtccttgggatctaagagaattcttgtcttcccgatcagtagtatatactggcaccatgggtagacgcctgtccctccagctgtgttgttacttccttgaggagacagaccatggcttgtatttctttgcatctcccatagcatcaaagaagcatcttttccatagcagctttccataagcaaatgcggctctgctcattcaccagattcatagtcagtgcctgagtgccagacgctttcacactaatctcaagacaagcctgtgcagtaggtattgttcccatttcacagatgaggagactgaggcttagagaaatctgagttacttctccaggagggctggctagacactggcacagctgcaatttgacctctcattgtctcactccgagtccgtgcagttagttccactctgcagggctggatgctcacttcttggttagagaggctttggggagggcgtggttgttccctttctcaccctgagaactactacacatccacctccacttctgtgtctcttccagaatgtctgtaaacctgtggaggagacacagcgcccgcccacactgcaggagatcaagcagaagatcgacagctacaacacgcgagagaagaactgcctgggcatgaaactggtaagcgcccgtccaccctcaacctggcccctgctccaccacccgcttcgggtttggcgcctctgccctcactctgaattctgtggctactccctggcaggtcccctccctttcctccggcctccagaggcctccggggtctggaaggctgatagccagagccctcagtggcctccatgtgctttagggaaatagatctgactctcattttttgcttgtgattttgggaagctcttttaactcctcctctgagcttcagtgtaaactaagtgattaaacggtacgtaatgaccaagggcccagtattgcttggcctccagggagccaggacaatgggacttagttgctccccttcctaccccttcgattgtgagagagggacatactctctcagagaggggagggcacccaacttagcacccagttgggaaaggctgtcttcaatagggaggggagaaggtagaaaaacactgccccctgctggtggctggcatcagctggctctttggggttcagccagatggagcaccagaaaatccagtcacaaatgcacctaggtttaagtcttaaaggctgtttcttagtaaagagatacaggaggaaatctagtgggctggttctccaaggccctcattatagagccttcctgcttcctgcctggttcagaggtacaaactagagtggctaccccacaccctgcctcttacaatgggcactcaccaaaggcaactggttacaggaggtttagggagctggcctgagcctcctgggagggaaatccactgcagccccacaggtcctctttggtagctggatcctgagggtcttctcccagcccactatggggaaagggatctctgctccttcctccagctctcccacgtcagcagaggcaggaaagaactcaaggagacaggtgggtgctgctggggcaatggccccgagtggcagatatgatcatgcaaggcggacggccctgaccccctgtgacatgcccccgctggcagagtgaagacggcacctacacgggtttcatcaaagtgcatctgaaactccggcggcctgtgacggtgcctgctgggatccggccccagtccatctatgatgccatcaaggaggtgaacctggcggctaccacggacaagcggacatccttctacctgcccctagatgccatcaagcagctgcacatcagcagcaccaccaccgtcagtgaggtcatccaggggctgctcaagaagttcatggttgtggacaatccccagaagtttgcactttttaagcggatacacaag

SEQ ID NO: 3803 - DNA, 2300 bp, Homo sapien
atgaacgagtaggtctcacccttttctgcgtgtaattattcttcacatggtcatgctcacttcagtcaggaaaagggaagaaactagaggccgaaagctaaggaaagttccctgctcagcagggagtgagtctgggcatctgcatttttgtctcatggcacagcatgaactaacccctgggtcacttctcctcacctaggaaggggagctttctggagggcagtgaggtccgaacgatcgtcattaactacgccaagaaaaatgacctggttgatgcagacaacaaaaagtgagtgcatgagaagcaccagatctgtcttattgggtctttgtctttatcagacatagacacatttggggaggatgtctgggagggagaatagaaaaccatagcatcttagaggtaattaagatcagtggtttccaaaccatgggctgtggacactcagagttattgtctggggtgttcagatccatgtatacgatcaacattgactaccgactaagtaaatattctctcacaaatacccatgaatcatctttaattggctattgtgaggaataaaatgcaagcttacaaagaatttactgaagtcatcatagctttaggtatttatttttattgatagatatttgtacatatttatggggtgcacgtggtattttgttacatgcacagagtgtataacgatcaaggcagggtatttggggtatcatcaccttgagtatttaccatttctatgtgtcgggaacactgtaagtcctcttttctagctattttgacatacacaatacattgttgttaactacagtcaccttactctgctctcaaagactaaacttatttcttctatctaactgtatatttgtacccattatggtattattttcttaaaaggagatacagatggtaaactaccagatgaagagagttccattaattgttttttactttaatggccggacactgtggcttatgtctgtaatcccaacatttttgtaggttgaggtgggaggattgcttgaggccaggggtttgagacccacctgagcagcatgatgaaaccctgtcgctacaaaaaatacaaaaattagccgggcatggtagggcatgcctgtagtctcagccacttgggaggttgaggtgggaggatcgcttgagcccaagaggttgaggctgcagtgagcaatgatgatgccactgcactgcaacctgggtgatacagtgaaaccccatctcaaaaaaaaatttttttttcactttaaaaaaacatcatcatgataaaaaagttgagacataccagcctaatctaataccttcattttattttatgttttatttttatttttgagacagagttttgctcttgttgcccaggctggagtgcaatggtacaatctgtgctcactgcaacctctgcctcccaggttcaagcgattctcctgcctcagcctcccaagtagctggaattacagggatgcgccaccatgcccggctaatttttgtatttttagtagagacggggtttcaccatgttggccaggctagtcttgaactcctgacctcaagtgatccacccatctcggcgtcccaaagtgctgggattacaggcgtgggccactgcgcccggccctatttttagtagagatggggttttaccatgttggccaggctggtcttgaacttttgacctcaggcgatcctcccgcctcagcctcccaaagtgctgggattacaggcgtgagccactgcacctggccaacaccttcattttaaagatccccacttcctttctttcttcctcactagccaattttgatgctaagcttagaaagctgtggtcacatgcttagttagtagcaaaggctcctgatcttcaaatttatcccatctcactttcccttccacctcctgcttttcctaggaaagcattcgtgtatctcccacccataaggtacattgccttttggactgtgggcccataattgattcatatcctgaatgtctataaaggccgtacgagagatgaatcctgaattagccttcaggtcagaagggacaagtctaggatttcttcattgcctcttctttccctttagtcttgtgagattggatcccatcctatgtgactgcatcttagagaaaaatgaacagcatacagtcatgaagcttccatgggacagtcttctgaccaggtaacgagcattggcagtccctctccaacttttctatcccctcgccttaatgttgatcacattgaactttaatactgtcactatcttagcctttgattttcttt

SEQ ID NO: 3804 - DNA, 2300 bp, Homo sapien
ggctcttgctctaccaaagaggaggctggatgccatggtgcagaatcctctggggtcttggctcctacttgtcaaccactaattaatttttaggtttacaattgatgttttcttatccaaggacatctggtatacaaaagttcccctagcttaaaatgtttagtattctctgaatagctttcctctgttccctaagaaagaggcttcctcagcagctgtgctgcaaaagaccccaaatgtattgcacatccgaagagtggctaagtgggaggtgaagggtgggtacaggggtctgttgtaggcactgtcctcctctgggctcctttgacattggcctggtggctgggatacttcagaataaaggcctagtgggtcacaggtttaggaggagttggggctggtccctaggccactataggtggtgggcaaacattgtagaaggcctaatgtttagaaagccagtgtggaattctcctttgtgcaactgcgtcactgaatcaattgggattttttattggtgaatggacacttggaagttttaatatgcaaaacataatttacttttattacttaaattgcttaatgtaattttaatatgcaagacttaatttacgaagagccaggattccgggtgtttaaatccttgtctccagggaacacagctgtccctttgaggaaaacctaatttctcttccctgcctgtgtgactttgggacaaatctgggacaacagtgaattctctattactgttattaccacccaagtaaactaaaaatccgggatgagaaaaatcttacagaaaattctagctgaggcttctagcttatagtacaatgaatagaccttaatcatagaatgcctttaagaaaaacatttaggcccgacttggtggttcacacctgtcctgtaatcccaccactttgggaggccgaggcggacagatctcttgacctcaggagtttgagaccagcctgggcaacaaggtgagatcctgtctctacaaaaaatacaaaaattagcctggtgtggtggtgcccgcctgtagtcccagctactcgggaggctgaagcggatggatcgcttgagcccgggaggtggaggctgcattgagctgagattgcgccactgcactccagcctgggtgacacagcgagaccctgtctccaagtaaacaaattaaaataaaataaagaaaaatattcaaaaagccctcgaggtttttttgtttgtttgtttgatttttttgatacggagtcttactctgttgtccaaggtggggtgcagtggcacaatctcggctgacggcaacctctgcctcctgggctcaagcgatcctaccgccttagcctccccaggcatgcgccaccacacccggctgaatttttcttttttcttttctttttttttttttttttgagacggactttcactcttgttgcccaggctggagtgcaattgtgcaatctcggctcaccacaacctctgcctcccgggttcaagcaattctcctgcctcagcctcccgagtagctgggattacaggcatgctccaccatgcccggctaattttgtatttttagtacagacagggtttctccatgttgatcaggctggtctcgaactcccgacctcaggtgatccgcccacctcggcctcccaattctttttctttctttctttctttcttttttttttttttttttattttgtattttttatggagatggggtttcgccatgttgcccaggctggtctcgaacttctgggcttaagcggtccgcccgcctcggcctcccaaagtctgggataacaggcttgggccaccgcgcccggccgaagcctgaactgtttatcagttcaattatttttgcggaattgaaccgaaccgaatggaatgggagcttgcagagagcttctactcaaagcagttcctaaggttgatggggtggaaggaaataaacagaacagctattggcgtggccgagtcgctacggacggggaacccgagccgctcgcgcaggcgcagagccaggcccgcgaggggatgggaaggtgggggggaggggcgttccctgggccctgcccctccctgccctgctttagttccaggtaccgccactgggggcggccgcggcctccccagcggcaacggccacgaagctgcgcggccctggtttccagccgggcccttttcgcggccgggccccagcatggctgcccccacggctgagggcctggcagctgctgcgccctcgctttcttgacattccctggcttctgtgctctcttccccaggccacc

SEQ ID NO: 3805 - DNA, 2300 bp, Homo sapien
tgacttttggctaattcatggtgggtaaatctgactttaactgcatggagaatgataatggtgattttaaactactcttgaatgaggctttggaggggaagaaagggcatgaatgatgtggaagctgcttgggagctggaggggacagggcagcgctcagcaggggtgtggaggctcctgccagatcccttatgggacgttaaccccatcatacaggggatctttgaagaaacattgggtcactaaggtcagagatttatgaagctccagcaccctcgaggagtcctctttcccttgaccatgggaacaataggcgaaagacaaaggcggcctctgtatttcccaccttaggagcaagaaagggagcaggaacccttccacttggctctggaagatgtgtcttaagcacagactgcggatgcaatcctctcacgagcagtgattcagaatgaggtaagaaatcatgtgggggcaagtctcattcaactgtttagggagggcagtaaagtggtctgaggtgtctacataagtactgagaacggggattatttaatagaattttgcaatcttagagctggaagggacttcaacagtaacctcgtccaatctttgcgttgccatggaactctttcttcaaacaaaagcttcgtaagagcccaaatacaaacccctgtgaaagcagaattgctctggttgcaaagtgggggaagggagagacaaaaagaaaaagtttatttataaaataaactttaaaaaatcatcatggaagaaaacttttttatttatatgtatatcatagaaaggctaaagtaacattgatcacaaaaaataaaattccccaaaccaatagattattagtttatacagtgaagatactttggctctttagggacatttttacttggagtcacgagaacagagaatatgacttttagtcacacggaaatgagccttggatgggaatttttaagatttatgggaactgtgtgctatgctgatttgggacaataagcgttctagtcccaccaggtggcgcccgcgttcggcattctgagaacgtttggtgtcttctggactccagaatctggacggtccgaccgcctcgtgcttggtgggtttacaaactctgactggttcttaccacccatctaacaggaaattttttttttttaaaaacaaaccaacccataaaacatctgaccagatgccacactcaagaaaacacttgtattcgggtgttttaacctccaacgatggaaatctgcttaacattggtgtttctgaggtgtcttagcatcagaaaaggaaaaagacacatatacacacattctaaggaaaaagtcaggaagggccttgcagaggtaggtcctggtgcggcaagaggacggttaggcgttagaagcttctagttcaggctttgccgcttcatgctcatgaggaagcgcggctcctttggcctcagtttcctgcgctgccttcccgtctgtggctgactgttgcagggtagtcagacaaaggcccagcttctattctgcatcccagctaagtctgtaaaagacgaaagtcgtcgggtacctccgttactgagatcaaatgttcataaatggaagcatcgtgtcaataaatgggtttattattattgctttcttatgtaactcaccaacccccggagggccgtccccgcggtgggaaagcctaaaacaatacacatatgttttcactaatttaaaattcatattgaagcgggacgttttagaacttccaggacgcaacgtgctattaagggaccgtgaggggcgggcagcccttctgagatcgcgggctaactgctactttcacccctccttctccggacccctctctccgtctacagctcgcgccagggacccaaacagcctaggccgcgagctcctcgcctccaacctcccgcctcccgcgccagtactagcacccgctaggagcgccgcgtggcctttaccggccacgggccccgcccctgtgcgtcagcccgtagctgcgccgaggcgtttcccgggggcgtgccgcggttgctaggcgaccagaccgctccccctcccgcccctggagctgcgtctccccacttcccagccggggccagtcgggagcgaaagtgcgctgagctgcagtgtctggtcgagagtacccgtgggagcgtcgcgccgcggaggcagccgtcccggcgtaggtggcgtggccgaccggacccccaactggcgcctctccccgcgcggggtcccgagctaggagatgggaggcacagctcgtgggcctgggcggaa

SEQ ID NO: 3806 - DNA, 2300 bp, Homo sapien
cttgaccatgggaacaataggcgaaagacaaaggcggcctctgtatttcccaccttaggagcaagaaagggagcaggaacccttccacttggctctggaagatgtgtcttaagcacagactgcggatgcaatcctctcacgagcagtgattcagaatgaggtaagaaatcatgtgggggcaagtctcattcaactgtttagggagggcagtaaagtggtctgaggtgtctacataagtactgagaacggggattatttaatagaattttgcaatcttagagctggaagggacttcaacagtaacctcgtccaatctttgcgttgccatggaactctttcttcaaacaaaagcttcgtaagagcccaaatacaaacccctgtgaaagcagaattgctctggttgcaaagtgggggaagggagagacaaaaagaaaaagtttatttataaaataaactttaaaaaatcatcatggaagaaaacttttttatttatatgtatatcatagaaaggctaaagtaacattgatcacaaaaaataaaattccccaaaccaatagattattagtttatacagtgaagatactttggctctttagggacatttttacttggagtcacgagaacagagaatatgacttttagtcacacggaaatgagccttggatgggaatttttaagatttatgggaactgtgtgctatgctgatttgggacaataagcgttctagtcccaccaggtggcgcccgcgttcggcattctgagaacgtttggtgtcttctggactccagaatctggacggtccgaccgcctcgtgcttggtgggtttacaaactctgactggttcttaccacccatctaacaggaaattttttttttttaaaaacaaaccaacccataaaacatctgaccagatgccacactcaagaaaacacttgtattcgggtgttttaacctccaacgatggaaatctgcttaacattggtgtttctgaggtgtcttagcatcagaaaaggaaaaagacacatatacacacattctaaggaaaaagtcaggaagggccttgcagaggtaggtcctggtgcggcaagaggacggttaggcgttagaagcttctagttcaggctttgccgcttcatgctcatgaggaagcgcggctcctttggcctcagtttcctgcgctgccttcccgtctgtggctgactgttgcagggtagtcagacaaaggcccagcttctattctgcatcccagctaagtctgtaaaagacgaaagtcgtcgggtacctccgttactgagatcaaatgttcataaatggaagcatcgtgtcaataaatgggtttattattattgctttcttatgtaactcaccaacccccggagggccgtccccgcggtgggaaagcctaaaacaatacacatatgttttcactaatttaaaattcatattgaagcgggacgttttagaacttccaggacgcaacgtgctattaagggaccgtgaggggcgggcagcccttctgagatcgcgggctaactgctactttcacccctccttctccggacccctctctccgtctacagctcgcgccagggacccaaacagcctaggccgcgagctcctcgcctccaacctcccgcctcccgcgccagtactagcacccgctaggagcgccgcgtggcctttaccggccacgggccccgcccctgtgcgtcagcccgtagctgcgccgaggcgtttcccgggggcgtgccgcggttgctaggcgaccagaccgctccccctcccgcccctggagctgcgtctccccacttcccagccggggccagtcgggagcgaaagtgcgctgagctgcagtgtctggtcgagagtacccgtgggagcgtcgcgccgcggaggcagccgtcccggcgtaggtggcgtggccgaccggacccccaactggcgcctctccccgcgcggggtcccgagctaggagatgggaggcacagctcgtgggcctgggcggaaggatgcggggccgcctggggccgggctcccgccccagcagcggaggtaacggcgccacggggtaacgggctggaggcgccacagggagcggctggcgctggcaagcgaagcttgggggtggggaggaggtagagtgagccctcagtaggagggacgagggcaggggtctgactgcctccccgggaccgcccccacctcctctctatcagggccccctccccccatccctgtctcaccgggcgcgggggacggggctagagcggagttagagcaagaagaatttccacccctgg

SEQ ID NO: 3807 - DNA, 2300 bp, Homo sapien
tttcattttattctctctcagccccgaaagtagattttgttgtttttttcttttctttttcagatgctgagagatgttacatgtcttgctcaaggtaacccagttggaggacagtcttggcttcagctcatttgtctctagatcctgtcatcttaccactgtgccttgctgcctctgaaaaggcagaaggaagttattctctttctagctttgtggagaaaagcaggtgatacctcaacaccaagccatagggagcttccagtgactctgcaaagaaaaaaaagaccaactcagactccagagcagccccaccagagcctgagcagttggagccttccaccttcccacccctgcgttcctcttgtccttgggcatctcctgtgtgtgcttcggggaggtgatagcagtgctatagaagtagtggagtgaagatgttttcctatccccgtggccttagatagtgtctttgtctttgaagagtcaggggcatctggggagctgtctaaccgtatctatcctgtagactcgggaggaagctgctggctgctgtagacagaagagaatccctgtgcttcgggctcctaggaaggtgtctgccatcctctctgtgccactgttatctgtcttcttccccatcagataacaccatccaccgctgcagggctgagcacggcaccttgtacatggagctaagcagatgctgcttgagaagagcatatgtttgtgtcgggggaaacatgtctctccttggtccacagagccctacctgccccaggaaaggacagtgttgggagggtaactcccacccctcactcctccccctcattcctgcctccacaagcatcttctgggaaaggtgaatgagggaagagacatttgcacttgtcccttacctacctaagttctatccccagtggccacttctgggggtgttgtcttctctctggagttttgggggacctattagggggcatgtgtggccataggtcaagcctcattctctaactggccttaccaagacttaagctgaggttttgtgttcacctgtctgggttgcttgccatttctcaaatgttctgccagtcagaggtgggaggaggtcggcaggaatgtacttggtcatctcgaaccccatcagaatgtgtgtggaggcctcctggcagcttctatgcagggtccagctagatccctgggcttttcctgagatacacggggctaacccacttcttacggattaatttttccacatcggaaatcagaagccattccccagggcctccccttcagtttcattatctcctttgactctgcccacaacctttgaaaaggtctcgctgttcttcccacggagagagaggtgcaaggcttgctcagcctcacacagccaatccgtggcaaaggatggcgggaattcaggtggccccaatctcaacccatcctcttcccaccctgtatcctttttagtttatttacaggaaaacatgttcaaaggtataattactaaagtgctcctggttacacaataatacgtctttactgaaaaacaataaattaatgagaaaagagatgcaaaaaacctcagaggaaaatgttgaagttagggaaatatttaatacgcccgcctttggctcacaccttttcctgggatgaatgacccctgtgattccagctcccccccacccccacgaggtctcatctagctggatacctacaagccatccctgtccttggaaatacacccctctcccaattcgctgccgctaagaagcccagacaattggagaggagtggattttccatctgaattatgcagctcctttgacacgcctcccctctccctttgcatagccttggttaagaactagcatttcttcgtcccctctccctgtcccctctcactgtccgcgaggcagcagcccccagcctactccgcgatcctcccagctcccggcaccgcgcgtcctcccctttaaggcccgcccctccccccacgccacgcctccccaggccccgccccccgcccctcccctttaaggaccggccccggacgcagacgaggctgtgacgcggccgccggcccggggctgggtacattgtcgcgcggccgcttccccccggccgggcccccgccgccccgcggtccccagagcgccaggcccccggggggagggagggagggcgccgggccggtgggagccagcggcgcgcggtgggacccacggagccccgcgacccgccgagcctggagccgggccgggtcggggaagccggctccagcccggagcgaacttcgcagcccg

SEQ ID NO: 3808 - DNA, 2300 bp, Homo sapien
aaggaaggaggggttcacagcctcacccagagtccagaacccctggcctgcctggtgcccatgctgagtccacttctggaacacccagctcagagagggggttagacctgcaggctaacacagacacagcccagaaaacccaggagccgagggggaaggagaaaggtgcaagaaggggaaacccaggtcctggtccccttctctctgcttcctggcagcagaactcagacagaacccttaagccagtctaagtctggcaggaccagtaagttctgagttagctccatactagtttctagcaggctctttctcacttcctgattcttaggtttctacattgacactccctgaagagttgggaagagacaccacagtcccctgaccctgatccataggtcacacagcagggacatccacagggtgggcgtgggccctctcatccctccctcccactcacttcacgctggctgggccccaaggtgtttgcaccccttgcagtgagtgaccttctctagtgcagcaagctcagaacctgctgccactggagttgtcccattgctgatgcagaaaggtgaagaactagcagaacactggaaatgccctccatctgggtccatggctacttaagctcaatgctccctggcaggcaggaggacaggtgctattgccctgttgggacagatgaaaaacagacacagggaggatgagtgatttgccctgactatagagtggcagggccaaggcagagcccaggcctcctgcacctaggtcagtgttcctcccagttacagtctaaactggaatggcaggcaaagcccctgtggaaggggaaggtgaaggctcaatcaaaggatccccagagactttccagatatctgaagaagtcctgatgtcactgccccggtccttccccaggtagagcaacactcctcgccgcaacccaactggctccccttaccttctacacacacacacacacacacacacacacacacacacacacacacaaatccaagacaacactactaaggcttctttgggaaggggaagtagggataggtaagaggaaagtaagggacctcctatccagcctccatggaatcctgacttcttttccttgttatttcaacttcttccaccccatcttttaaactttagactccagccacagaagcttacaactaaaagaaactctaaggccaatttaatccaaggtttcattctatgtgctggagatggtgtacagtagggtgaggaaaccaaattctcagttggcactggtgtacccttgtacaggtgatgtaatatctctgtgcctcagtttgctcactataaaatagagacggtaggggtcatggtgagcactacctgactagcatataagaagctttcagcaagtgcagactactcttacccacttcccccaagcacagttggggtgggggacagctgaagaggtggaaacatgtgcctgagaatcctaatgaaatcggggtaaaggagcctggaacacatcctgtgaccccgcctgtactgtaggaagccagtctctggaaagtaaaatggaagggctgcttgggaactttgaggatatttagcccaccccctcatttttacttggggaaactaaggcccagagacctaaggtgactgcctaagttagcaaggagaagtcttgggtattcatcccaggttggggggacccaattatttctcaatcccattgtattctggaatgggcaatttgtccacgtcactgtgacctaggaacacgcgaatgagaacccacagctgagggcctctgcgcacagaacagctgttctccccaggaaatcaactttttttaattgagaagctaaaaaattattctaagagaggtagcccatcctaaaaatagctgtaatgcagaagttcatgttcaaccaatcatttttgcttacgatgcaaaaattgaaaactaagtttattagagaggttagagaaggaggagctctaagcagaaaaaatcctgtgccgggaaaccttgattgtggctttttaatgaatgaagaggcctccctgagcttacaatataaaagggggacagagaggtgaaggtctacacatcaggggcttgctcttgcaaaaccaaaccacaagacagacttgcaaaagaaggcatgcacagctcagcactgctctgttgcctggtcctcctgactggggtgagggccagcccaggccagggcacccagtctgagaacagctgcacccacttcccaggcaacctgcctaacatgcttcgagatctccgagatgcc

SEQ ID NO: 3809 - DNA, 2300 bp, Homo sapien
aaggcatctcccagaacatatccccaccgttaagtgacacatgactgtattttaatgtgttctatatcaccttcattagtctggcagcttcctccaccattctgggaggcccagacagtaatggctgtcttgtgatctttgtctggattctcaccctttgtccagcccaggactacagactcagggatgttcacagcccagtaaatgggaagtattgctcgaaaaccggatcacaaagcctccttgtgctgaggctggggtaagacttggaggaagaagaaccttccctgactccttcgctggggtcagcctctaagggtcagggctcactccctgcagtgtagagactttgctgcgggacaggatgtgaacatccttggcttttgcatggtcaagttaagtcacttgtccggggtcatagtgacacaatcattgccaaacctgttcatttcaccagggccccatgggattttgccaagtcagtcctcctttgtactttcttgctcaactggtgtagaattctcaggcaggaagggaattcatggcggagggtggggtgaggtggaggtcatgtcgtacatcctcctaagcagacacatggacgtcagaggcaccagagggtttccacattgacctgcagtcacccatttacacatcccccacctccgagagttcaggtattcttgcaaatgtctccatttctgctactgtagcttatcctgagccctttactgtttttcctggaaaacaagaaaatgtttgggaatttgtatattgggaatgggcaggtgtctacattcatttgctttaaaaaattatttgaaacattgccctttaaatggaaaaatcattttcctgatcttttttctcaaggacatttcctgctgcctcctccagacctactcttatcactcacaaaccctagaggttccgtggccaaaggaggacagcagctggccatttcagactatgtccccacagggatcaggactccctgggacatgatgggagtctggagaaggtgtcgtggttggcaggaagtgccacattcagggatattgacttctggctctttctccacgtgactatgagatgaagcaatttctgaagagggttaagataaaaaccttagatgtcatccaacctaatccctgattttacaggcagaagaagtggatttcagagctagctagtggcagagccgtgactcacaggccacagacctcctgacaggcagtcctttctcagagagcccagcaccttctgtgtttggttgtgttgaggtggagttgaaggaggaagcatggcacacctgctgtaggtcatggggacagatgacattccccagacctcttgctgcctagttcctcttttaattttttttgagatggggtctcactatattgcccaggctggagtgcaatggctcttcattcataggtgcgatcatagtgcactgcagctgcctagttcacattcttcacctggcccgttgttccatccagtcttgacctcgctagcctgcagggggcgtgtgcaagcccacactacagcccaggcatcccctctgcaagggaagtggtgctgttgtggacctgcagtccttggggggcttcaatttgtatagaaatgacaaggacagagcaaaggaaagtgggatttaattttaagcgcccaccttcccacccccaagtcaatttcctgtgacgctaataaaagcttcaggatctcttactttcattagtcctttccacagccaaagtaattatatacacatttttttttcttaaaagacagttctccctcccattatatatgcctctgggccccataaaatctggccaccctcttccccgacccgatttaccaaatgtcagagtcccacagcgcaccgagaaacaccactgtcctcctggagctctcccacacaatacaggccttgactgagggtgtgattcggttcagagtagctgggttgaatttttgtaaagaggttgccgtgtgtgcacttttgccgacctcaaagccaccagaaggagggagctgagtgtacctttttgtaatgatgactctctatgattttctccatagagcggtgcttgcacacactgacaggagtccaagaatgtgcactgagggagcgtttccgcacagatctgcgtgttccttaccactcacacatgtgcacacacatatccatgtgtgtgtgccagtgctttggggctctgttccacggggtaagtaatttctgctatagggaccctggatgtggagccattctctgggaccagagatatcca

SEQ ID NO: 3810 - DNA, 2300 bp, Homo sapien
tcaagccatcctctatgccatttgccgttctgctgttcctttgcttggagggaagagatgcctgtttctatagggaggaagtttgaagtgagaagagaggacaaagattctgtgaatggaaagagcactggactgagagttcagggatgtggcctccggtcccagctccaccactactcagttgtctgacgaaggaaacagaaagttgtgatacaatgtgggtgacacattgcctagaaagaagtgccgttgtgatacgcttatgttggtgggatgggggaaagaaataacaggtttgtatggagtgttatgaaagaattaaatcttaaccttccattggggtaagctgatggaaacaaccatagcaaaggacagactgaatatttttttattctctttatagaaaataacagtaaaaaaaagtattgacataggagaaggaaacaaaaagttgtcaggagttaatgaatagaaatattatttttttctggattttatggtgtttgtgttatttgttagcttttatgaatttgtaatttgttgtaatttctttctaaataagtatttacttttgtctctaattttgtccatctatttttgaattcaattttcaaattcaaaacgcttctctcggccgggcacggtggctcacgcctgtaatcccagcactttgggaggtcgaggagggcggatcacgaggtcaggagatcgagaccatcctggctaacacagtgaaaccccgtctctactaaaaatacaaaaaattagccaggcgaggtggtgggcgcctgtagtcccagctactcgggaggctgaggcaggagaatggcatgaaccccggggggcggagcctgcagtgagccgagatcgtgccactgcactccagcctgggtgacagcgagactccgtctcaaaaaacaaaacaaaacaaaacaaaaaaaacaaaaagaacaaaatgcttctctctgggcctcagctgttccctcatctgtaaatgagaagggtgggccagatgctctttcatgtctggtgtaatgaagccctggagtgggctgcctatgactgcacgcagctgtaccacaccccacctgggtgtctttgggtgaagtacttggtagctccaagtctcatcttccttatccaaaatgatggacacaaaaatagtattgacctcatggaataggtgtgaagatgaaaacagacaatgcatatggatgcttcacacagaccctggggtggcaaatgtgctcagtacttgttagttattagtgtgagtctactcttttagtctatgaattttgttagaggaactcctgcttaccaggcctctggtttaataaaacatgactggagtgacacatttctaagctcaccaccacttataattacagaagattgatggctatataggacatctcccaccaagcctgcagaatgtccagatgtcccaagtacagcccactttactcagagataacgtcaatgagcagactcaagttgaaggattaatggtcactagagcaccaacagcccctacctttagtgagcacatctgcacattccaagtttaatcatagctccttatagtttcttataagcagagatgttcctaaaggacaggggttcctcctcctgctttctgggcatgccctactctctaatggagtagtttccaataaatttgcttctttgtctgtgctccaattctttcctgtgtgagatctaagaacccactcttggggtctagattgggatcctcttttctggcaacatcttgagtatgtgaccatgagaaatgttagaaattggagtgaaaggtacgtaaacatttgaacccaataccattctctggttctcccagaggcacagtaaaaaaaagtattgacatagaagaaggaaacaaaaagttgtcaggagttaaagaataaagatttttttttctggattttgtggtgtttgtggtatttgttagcttttatgatttgtaatttgttgtaatttctctttctaaataaacgtttacttttgtctctaattttgtatttctatttttgaattcaatttattttcccgcagacagggtctcactctgttgcccaggctggagtgcaatggtgaaattatagcagactgcagtcttcaactcctgacctcaagcaattgtcctgcctcctcaacttcctgactacaggtgtgcatgaggactacaggcaggcatgtgccaacacatgcagctttttttttttttttttttcagagatgtggtctcgctttgttgcctacactggtctcaaactctt

SEQ ID NO: 3811 - DNA, 2300 bp, Homo sapien
cccagaattctcttccagttcagtaactcagatcttctctatccatcattttatcaagcaggaaggtggagccagaaggaggcacatcctttatccacagctacaaccagtaatcccctcaggcagtgcttcttccaggaggaaggtgttggggtaatctgtcctgcaattaagctgctgtagtgcttgaggaagaacaatgccaccagagaaattccaagggagttccagccctcacctgcctgagctcacttccttcatgtgacatgtatatacagatataaataatgggaagcctttcaacttgaaacaggctcctaggagaccagaagcagcagcctttcctgagctcaggtaagagatcttaccctctactgacactgctcacgttgttgtgaggatcacctacttctcctaatcatttacccaggtatgttcaaggtcacatctaaaggacccttttccacgaggacaaaatctctttgaggacaaataatcatcatgtttatctttgtacttcagtacctagcacaacattcaagacagcgggtgctcattaaatgctcatcaaattgttagttcaggacaactaacatcaatctctacttaaaatgaattgatcacttgctctgtgctaagtgtataaatcatagattattgtatttaaataatcgatttaaaatcaaaacaatttctgggttaagtttaattatcaccattttggggttaagaaaattaaactcagaggtgagttgacttgtccaaggtcacatagaggtagggtggccaactcattccagtttacctgtggtttttccagttttaaaactgaaattttcgtatttcaggaaccattccctgccccccaacctcagtgctgggtaaactggaatgacccacatcaatggaaactagtaaagcgaggatttatttggacccagttctcttgtctccaaacccagagtcctctttgattcttttgggtttggtttgcttttttccttttcctacatttgacagtatctcgagtggtcacaaatgtaaaaaatgtctagcatattgcctggcatataggaaaaattcagtaagtgataatgattatcagtgctgtgccaagctatggagccagccatatatatatggatgtgtgcatatatatatatgatgtgtgtgtatatatatatgtctttataaattttatgtatttatttctttcaaaaatattaaagtatttgagaaaattgaaaaattaaaaagtaggtttattacgactcatgactttaagtttaaatattttatttctgccccaaacaaaatttattataattttactgtcctggttttaagggaaggaaactcatcaataatattttcatcatatgcttttgagaaacaaagttaaccattaagaatgaaacatgaaaacatgtgaatagtggtacaaatttttccttttgcttcaatatggctcagcatggcactgtcgaattttgtctttatataaaattttgatattttgtttgtcataagctttttaattcattttgatattgcactaaaatatttttatcttgatgactgaggttttttagtgctcccttaaattttgcacctaaaatgagtgcctcaattgttttaccctaacctcagcccattattattttatcttaaaactcagcaaacaccctaacctgctctcttactgaggaggctcgcccaagaataaatgagttccgtcattgcctttcttctctgacttttgggaccatttgcttggtctaggacctgagttgcaggtccaggaaagcgtgtactctcgaatccacccaggagtgcctgactacagtcctcctgcagagggcgctgtggagtcccagacacgagtgttaggtggaatcgggctgattgcccatcacgtcttgcctttccctggcagtaggcttgttatgaaatcattgactttctatttgcctctggggcttaagcgaatctgttaccctcaaataacctatctgatctcagacaaatgccaaacagagctcagtttctctgccctgtgggtggccataaaatccagacaatttccccctaggtgttttcgatggcgcagccacagcttctgtgagattcgatttctccccagttcccctgtgggtctgaggggaccagaagggtgagctacgttggctttctggaaggggaggctatatgcgtcaattccccaaaacaagttttgacatttcccctgaaatgtcattctctatctattcactgcaagtgcctgctgttccaggccttac

SEQ ID NO: 3812 - DNA, 2300 bp, Homo sapien
agctcatcggaggctgaggcccaggcacatgtttgcctgaactatccatgttatatgattccttcctcagacagagtgagctactcacgatcccaggtgtaccctgaggccagccaaggtgtatccatgacctcatgcctctgttccagcctgccctttaacagctcatcccacctgcctgccctccccgcctatctgcagacagtagtctaggatttcagctgccctgggggctcattttccctctcagcttcctgctttagctgtctcctgcctcccactcacctattactccagcactctcacctggtcttcttttctgtctcatcactgcctcttgacatctttatctcatagtagttagttaggggttcttggtaatgccctaaatccacatggtgggaaggggggagtgggggaagagagtgcgctgtggggctgtgcctacttctggagggtaagactcgggccctccaggaacaaaggattcaggctggtggcagctatagccaagcagactgctggccagggattgcaaaggagtattttgtttgcttaagaaaataaacaacactgagtatgagatggagggagggggtgttggtgccagagagattgggaagagtctgccaagggtgtgttctactcactctcctcttttctttcatctccactgagctggaggcagttatcctgtcccccacgtcacattcctactcccgtttcccatgcctggacccaggttgggcaaactcttcctgtaaagaaccagacaggaactattttaggctctgtgtgccatatggtctcagtcacaactactcatctctgcctctgtagcacgaaagcaattagcaacaatatgtcaacaaacatatgtgaccccatgaaaactttatttattatggatacggaaacctgaaaataatgtctttcttttgattttttccccaatcattaaaaaacgtaaaaactactcttaggtcgcaaggttaagccattctcagcttagcagtggcaggctggatttggcttgtgacctacagttggccaatccctgattcccaaaatgtattcctcagggatgtgggcaaatacttatgggaaatgctggattaaacagagttaagaagcatcagacatttccaggacgggctagcacatgccagggctctctaactgacctcattaggattcatctgtttcatggaggatcttgcaagacaagaattcctcaaacctagagtctgaggactgtgctttgggaaacactgctctgcttgatgccctcactgggcacatggtagaatctagagctgagtgccttgctagctggagatagggtcagagctcttgactgccctggcagtcttgacacatcacgctgtctgtgtcccctgagtggttcagagccacacaggccaagactagcccaccagagcaccaggcctcccagctttctgggcttgtccatgcgtacatttccttattcttcctggtttccagaacctaaggagaggcacattttggttgagtgattataaccctagggaccatgggtagctgcatgtcaggaaacactcctcaacttcctggccctgatggattaaaggagaggtacttacaggttatttcttcgctgtggactactgtcccagcatgaatagggcatcattattgaattattttgacaggaaggagactggtgtatgctgcacagtaataatgtatttacatgtgtacagagtttaccaagcacctctgtgttgtttttgcctctgtttattacacttgcccttggggggaggtgggacaaattttttaaaaatttatacatgcagagactgcagcgcagagaagctaagagacttgcccctgcccacacagccagtggtagagcctgaactcaaacccaggtctcatctcacctcaggggctgctttccccatcgctgtattgtccttaaagtgatgggtgactaggcaatgaagtaattctctaggaaagcatgaccaatttccctttctccacctccctctttttcctccacccctcccccatcagcccccatatatatgcccaaatctccacaaagccttgcttgcctgcaaacctttacttctgaaatgacttccacggctgggacgggaaccttccacccacagctatgcctctgattggtgaatggtgaaggtgcctgtctaacttttctgtaaaaagaaccagctgcctccaggcagccagccctcaagcatcacttacaggaccagaggtgagcatgggggattcttggttacttt

SEQ ID NO: 3813 - DNA, 2300 bp, Homo sapien
aaccactcacacactagacacagcatagagtgtgcacacacacactcatagccacacaccacgcagtgacacacactcataactacataccacacacaacacatagcacacacacatagccgcacaccacacattcacacacacacatacatcacacagccacgcatcctacattcacacacataccacacagcacatacacactcatagccacacatcatacattcacacagacacattacacataacacactcacactctcatagccacacactacatgttcacactcactacacacactcacactgtagccacacaccacacacacaccacacacgtatcacacaacatacattgcacccttacacacacctcagacacacaccacacatacttcacacgctcaaacatcagagtcatacaacacacatcatacactcacacattcattcatacatatattcatactcacacactcttgcccccacacacatcacgttcattcactcatattccccttctctgtctctccaagacagccccaggcctcaagcccagtgcatggtggagcccagctgtgtgacagctctggggcattgggaagagcccgctaagtagggaagggtggggctaatcccagctgggagctctggcactaaggagaggcccgaggctgccctctgccatcttggcccatttcagggctggaggacatcacaaccacagctgctccgggccaggggagattcagatagggatggggcagggcaggctgcccacccccccacacacttcctctgcacctgctctgagcctcacattcaacttccaccacggatgttgttgttttagagaacatgtgacaaatctgctgtgtgggggcgagcagggagtggctgacacaaccactgtggagcccgggtctgtcaggcacatccccccagaaacagtgtgagtatagcccggatcctccaggggcacaagaggtcctttcacctggggttggggccctgagaactgacctccagggatgaaacttccaggaacagagccctgagaatgccctcataagtaatacccctgcgcagctcacagtgaaggcttcttaaagcacttccatgcctgtgagttctgctgggcctcagaaaagccatgtgaggtgggcagggtaggggcaatccctactttatcaaggaaaaaaccgaggcccagggaaatttgcccaaagctagaaagtgccaagccagtacaagacctgaggtcttctgacttgcatccaaaactcttcccaagatgccctgtggcctcagcatctctctccatcagtcatgggccttacccttgggcccttggggtcctgaaggagagctctaccagggtgctgtgacttcaggcaaagtggctgcatgacctgtcacaccccagttctggcattgccttggtggtcactggacagaggcctgagcccttgccacagggcagcaccttgtggggacactttggggagattaagggtgaaggttggctgaggtgctggggagctatgtgaagtcctcaggaactgtgttctgcaggagggaatggcagggatcatctagtcccagcttcgtttatttcctagatgaagaaattcaggctcagagaaaagtaatggattgctcaaagtccttagttagtacccccacatagaaggtgctcaaaaactattgtaaaggtgagttaactggtgactggtaaggactacagtcagcatcttctgacttcaggcccaagcgtctgcccatacagcctttctcaggcagggaaaattggtgataaggctcttttatcctgaaggcagaatgaaagcaaatgaccccagcacggaagccaatgagtatacataaagcacgggaggccctgctaagaaaaagcaccaagacaaaggaatatcaggcctggtcactgctaatagtctggaggaacttcttagatgccttttgaacagggtgaccctttcttactccacacaacatgttttctcagctcctgacttccgctgtggtttgtcagcactctctttttagcctgagaatagttagcaaacaagggaggttgtcatttcctcatcgtcaagctttgttcctcgtgggggctagaaatctctttccagttccagattgtgaagggttcctgagtaagcagcgtgtctccatccccctctctaggggctcttggatggaccttgcactctagaagggacaatggacttctggctttggccactttacttcctgccaggtaagtaccgtggggaaac

SEQ ID NO: 3814 - DNA, 2300 bp, Homo sapien
aagaacttgggaaagatttccttgtcatcaaatgtttaaacagttccttgaatgctcggggccactgaccgttgctaattggtttatcatcatcaatcctgcagtttatggtcactcccctatactaagctgaatcatatcctctccaaactcacgtccactggaacctatgaactagcttccttatttaaaagggtttcttgtgctacacggggagcagatggactttgagccttactgacaatatcacttaggaataatataagatcgcttttggctttagtgacatttcttgacctttgcttcaaagggctgggataggctacacgagttcaggactggctcgctggttattgcaatgcgtacagaagttgcatcttaatcctctaccataaacatggccctttggtgagtcagagaacagcttcctggaagggtaagacagtggtagtttctgacacacctgtcattttgatcctcctggaacgatttgctgtcattccagaaggtatgcatccccatcacagaagaaagaaaaaaacatttctgatgccccctcttctggctggatagaagcccaagactctgacccaggtcagggcctgggaactgagactggagtactgcagttagtggggctggagggaacaccaaaggaggcctgaagtctgagtcccaggaaaaggtaggcttgggaagctcatagcatccacagcattatgtttaaggcctgggtggaagcaaaggttcacatcaggcaggatggcagactggggagaactctcttgcagagagaactctccacacacagaagccctgtggaagagtctaggggtgagatggggggctagctgccaacagacagcttgggcagcccttagaggatatgacatggttcagcaccagaacctaggaatgatcttaacagacaagggggtcccagggtgcctaaaattgggaccaaagcaaaaggcagccagatgcagtggctcacatctgtgatcccagcactctgggaggcagaggtgggaggatcagttgagcccaggaattcaacacctgcataggcaacatggcgaaattctgtctctacaaaaaaatacaaaaagttagccagtgtggtggtggacgcctgtagtccaagctactctggaggctgaggtggaaggatcacttgaaaccaggaggttgaggctgcagtgagccatgattgcaccactgcactccagcctgggcaacagagtgccctgtcttaaaaaaaaaaaaggaaaagaaaaagaaaagaaaagctctgaagaggctgtctgggagacagaaggtattgggtgcaaatacagtctgagcctcgttggtggcaatcacagtctttaatcattaattgtcatatttctgatttgttagcaagtgccagcttgtaggctggttgaagtacagaactcagaggaaaaaagaaattaaattttagctttctggagagcagcccctctctggcaccatcaaacacttctttgtttcccttcaacttggaactcttcaaacatcaggggttgtgagggtttggccattcttttatcttgggtccatgtgagtgacagaaatggtgcggcctgggaaagatctccctcctttacattttctcttctccctcctcctccttattctaaaactgtgcctccaacagaggggcaggggctcttgtagagagatccctggcccaggacaggagatgccaaatctaatttatctcactgagggcctttgagaaaaacgcttcagggccaggctcagtggctcatgcctatataatcccagtactttgagaagctgaggcggcagatcacttgaggccaggagttcgagaccagtctcgtcaacatggcgaaaccctgtctctacaaaaaaaaaaaaaaaaaaaaaaaattagccagacatggtggcccacatctgtagtcccagctacttgagaggctgaggcatgagaatagcttgaacctggaaggcagaggtttcagtgagccgagattgtgtcactgcattccagtctgggtgacacagtgagactttgtctcaaaaaaaagaaaagaaaaaaagaggccggacgcggtggctcacgcctgtaatcccagcactttgggaggcagaggcaggcggatcacgaggtcaggagatcgagaccatcctggctaacacggtgaaaccctgtctctactaaaaatacaaaaaattagccaggcgtgctggcaggcgcctgtagtcccagctacttgggagggtgaggcaggagaatggtgtcaacctgg

SEQ ID NO: 3815 - DNA, 2300 bp, Homo sapien
caccttcgcccatcctgtagagaactttggtggtccacagtcttgctgatatccattgtacccccaattatatgggaacactggcacacaggaggttacaagagtgttgggggaaaatgtgactctgctgcacaggatctcccaaaggcctcaggagtctgtgatcagccaaactcaccctgcacccacaaggtgggcaaggagaggctgagggcctggaagacccaccccagggagctcagtgtatggactaggagggcacagtgtggaccacagaaccctcaggatgagcagggacaaagcccactgaccaagcaggggaagtcacatctcagtagacaaaactatttccttctggagcccaaggccagcacagcatcgtgacaaagcaagaccaaaataataatgggccaccccttttcactgcctcagcagtaacattgaccaccccctcacccaagaccgctctctccagactggaccccaggggagagaagggagacaaaaaggaagggaactccataatgaggctaaattttaaatctggagtgaagtgactgagagatcactgaattgggctgagcttgcctagaagtgactaggtaacttgttttcttttatcagtcagattatgggtttagggtttgaaattaagctacatctggaagccatcatcctcatcaaactaacacaggaacagaaaaccaaacaccacatgttctcactcataaatgggagctgaacaatgagaacacacggacacagggaggggaacattacacatccgggcctgttggggggggtggggggagggagagcattagaactaatagctaatgcatgtggggcttaatacctaggtggtgggttgacgggtgcaggaaaccatcatggcacacgtttacctgtgtcacaaacctgcacgttctgcacatgtaatcctggaacctaaaacaaaataaaaaaagaaaatctaagtttgcaaaccacaaaaaaagagagaaattaagctacataaagaaattatggggtttttttgcttgccattgaaatctgtgattgtgtgttaacacccacaagtgagccagtggttagctaaaataagacccagggctctggctgccttgtgtttctccagggctctatttctctatttttccttccccttctggtgtttggcctataggactctgtagggagagcctgggtcagccctgcacaggtaggatgggcagcatttctgtgggggtttgcagtgaggggtcggggggccatacacgtgtgtgttggggagtgggcttcacttttgtcacaggactgccacgatcatttggggaacacctgggagtcccaaccaggtcatgttttggcatggactaacagatagggaaggaggtgctacttcagctcagcaggtcagcaccgtccttgctatggagccgagcccgggtcctaacaagactctgaggtcagccatgttcaggggagcccagaagcagcgagtctttcatgactctggggagtgaaacaggaagggccacagtcctgccagttcctggagctctgggactggtaaaaggggcttggcaggaggtgtataaggggcatttttgtccaggctaagtaacctagggagtcggaggggattccagagcaactggggatatgagaccaaggactacgacagccactcctgccacctgtgccccatcagatgatgtcaacttcaaatcaagcattgggccaggtattttagagctaataccgggctatatcctctacctgtagatttggtattaccatccctcttttccagatgaaaagaaataggaaggtgacttgccaaaggtcttgcagctagaaagcgacagaacagcatcttcacgcttgacattctgtccctcatcctgaagctgcaacgatggaggattcccaagtaacagagtctccccaaggtcaaaggaaaccaaatggagccagccaggaaggccaaaatgaaaggaaagcaagggatctgtgagagtcacatgaccctggctggccacggtgcctgtgggagagtggccctttaagagcccaggtgtgggtcaaacactgagcagagtttcagttttggcagcagcgtccagtgccctgccagtagctcctagagaggcaggggttaccaactggccagcaggctgtgtccctgaagtcagatcaacgggagagaaggaagtggctaaaagtaagtgttactgctctgggatccccagacgggatgctatctggaaagggctcgggacgatggctcaggtaac

SEQ ID NO: 3816 - DNA, 2300 bp, Homo sapien
caacatgtgctgcatcagcacttagtgctttagaaaaattcacccgggggagtctaggtaccagccccagaatcagccaggacttggtgaatattaatcaaattatgagttaggtgcaggaacaaacaccctgggagagtctccaggtggggacaggaagctttgtaaggcagggaaaggtctgagactgccatcgcagtgcccaagctaggggacttgctacagcgaaggcacagaaagatgcataaagagcctatggacttttaaagatctggccattcttggggctcaaactgggtagagcagggaaaggccttagtggagagggctgggcagagccaagctgaggggacaacttgccaagtctagttgcaggaaaacaagctcagggccaccccatggactctctacttttctctgcttctgtcttctctcttcccttttcccttctttcacctcctacctctccttttctctccctgttctcctacttcctctgccttctcttttcccctattccctgttttcctctttgtgattccctcctgcacagcctgtgtcacaaactggccagtggttttgcatggcttaaactgtttggggagtgagggggtttctgcccatgggccaaaccattgactgttagcgcctgtccttaacagtagtgaggaacgtattagagtaggaagaaaaactcaacggctaactttagtttgctttttcaaaaatctataggtctcagaaacagaagcaatagatagattcaaagagtagatttttaatccatcaaaaagcatccatgaataccctctggggaatacaagagaagtgtaatgtacaatctctgtcttttttgttgttgttgttgttgagacagagtcttgctctgtcacccaagtggtagtgcagtggcacgggctcactgcaacctctgccttctgggttcaagcaattctactgcctcagtctcctcagtagctgggattacaggcatgtgccaccacgtcaggctaatttttgtattttttagtaaagatgggatttcaccatgttggtcaggctggtcttgaactcctaacctcgtgatccacccgcctcggcctcccaaagtgctgggattacaggcatgagccactgtgcccggccacaatctctgtctttttcatcagcaagcggtaaaagaccattgtgtagtgatcagtatggtgtccattaaaagaggagggttactgttcacaatagctgtgcatttcacatctacaacgtgctagatcccctttcagagcatgatggtagagggatgaaatacaaagctgtcccctctggaagctccccaggccagtgggagagaccacagtggggtgaaggtcagtgtggatggggggacagagagggctttctagaagttgtggagaagaaacagaatagcaccctagtgcagagagctacttggtctgagatttaatttttaactccttgttactaaccgaggcatactaacagtgaaacagaaatcttcccttgaaaaaaccaattccccttctgcaaacaggaagtggtgaggagaggaagagaagtggactactccaggctcattgctggcactttaccacaatctcacgtaagttgtgtaacaacaaccccttgcagattccttcattctcctgaaaaggaatcgaatccctgagactaaccttccaaggtcccacaattccaactagagtttggacttcaaacgtggcctttccactacacggtgctccccacaaactcagagctccaggctggcaagtgggtgcccaggctagaatcctacagagggagtttcacctcttctgaacacagaaccctcaagggtaagggacattttggcctcgtggacgtgaccaaaatgtgcatgcttaggagtgtgaggataaagtcatgctttctcagggagggaagtgcttgtcttactctcagatatctgcaacccagcccctgcactgagcaaaccgagatcccaaagtgagaagatgcttgttctctcaagtcccaccaccctcacccagcttctctcaggcctcttttcatttagagtgttttttgcaggtcaccagcaggagggcgggatggaaaatgcccctcttcctcatactgtgcctgctacaaggtgagtcccaaacccagcccaggttcagggcttacaaaaccagacctgagtcttccaggctgccctaaaggtcctcacaggctggtatggtaaaactgtccaggtataaaccatgctcagatgacaaatggctccatctccatgctgt

SEQ ID NO: 3817 - DNA, 2300 bp, Homo sapien
ctccataaagcttcagagaagggacttcatggctctgagaaagtgctctggaaactggaccagtgcattacaattaattgtactttactataatttttggtttctgtaatcaaaaagtcttcaaagtgttcagaagtaggtaaaacagaaaaatatgaccttaaggatgcaaatggcagcaacatttacaaaatagtgaaaatttgacaaatgtttacttaagaatataaatttaattcagaagtgtccctagacaaattgatgaattttttatctttcaaatgccaaaataatggaaaggaaaaggaagggagggagggagggagggaggggacacttgaatggaagaaaaccgtcgaaggcattttttttttgagagtttgatcatgataaaacacctgcttcctttgctacaagccaagctaataatattctcagctaatgtttaatgaaaattaactgcatgctaagaactttgaattatatggattatcacatttgatccacataataactttatgagataggtgctattttctcctgtttaacagattaggaaaactaggtttaaagagaaaaagtaacctgatccatgtcattttcccagtaaaaagtagaactgagatcttaactgagaggagtggggagtctgactccagaatctatgtgatcaaacatgacactatactgctccatgaggaggggaaggggagaatctggccaggcattagctacctctctaccacctacatgaaggtcactcatttctggaaaccagtctcggaaggcaaggccactgtatacagttcttcaggttgtgcactgctcaagagcaccattactaaggagataccattcacattgtagatgtattttaactaatatgagaggctatagatggaggtgaagatctggagctctagcactggaagctgctgaccaagtcgtgggagagcagcacacacagctgtgcacacagttaccagcacacactatgcacaattgtcctgtcatggccaaactccaagtaccccatagagttgtttctcttcctcttctgttgctttcagtgactcaatttctaccctcaatctgccttcaaatttggaaggggaaatgcatggagaatacatgctgccatctatggctacagcaaattacacaacaatataccaactgaatttattcttaaggaagagttgccctttctaattggtcagaggtgccgtattatcatatctatcaggggtcctagtgaaggtccctaattgcagcttgcagcaccccccatccccttgtgcccattcattgttgagtgcttcagctgtacaagccattttaatgtcagtttgagaccaacagagactggaagatcacatcttttacaaggaaaagaaaaacccataaactattttccaaagggaaatattggggtatttttcaactgtgtcatctatttgggtaagccacacttctcagtgtcctctttccatgaagatcatctcatttactgtattatgctttgtcagggacgtgaattagtaaccaccagatcatgcaactctgaagtcagtgacccaagctgcccaaagttcttctctatgagagttggaggggccaggtcagctggagggcaccagctgccagccaaatggcaggggaattcctctcctgaattttgaattttccctgccctcctgcccaagttgttgcatcacttgtccgggagatgcctgaatgggctggtaagctggggcaccctaaatagtctgagacccctgaaggggacacaagaggaggaaggatatggatcagtgttttcttttttgaagctactgttaccactcctggaaaagttcttcaggaataagtgacagtaagaatgacaagggattaggactggcttcctcttataaataataaaatccaaagagaagtgacttgaggtgagtggcagagctacgccttgcaccccgaccttccgttgctagctccagctgctttccaaaataccaccttgacttctcagtctccaggtttaaaggagagcaactagaagtcgtccaaacacctgcatctcataaggagaagaaaagtccacctggatcttgtttctggactgagatggatggagaggccacagtgaagcctggagaacaaaaggtgaaatgatgctttctcctggaggttgggatcttgcctctgaatgtggggggtgaactgcagccatagctgtcacacatgctcctcagtgcccttcccagagcaggtgggctccttcccaggaggccaggtaaggg

SEQ ID NO: 3818 - DNA, 2300 bp, Homo sapien
caaagatcaaagaaaataggtaattaggagcctaggttctggaaccaaacagatttaagttctctacttataagctgtatgaccttgggcaaattacttaatttctctaagctttagcctcctcagttttcaaatgggatacttagtgttcatacccaattcaatttgtggggagtaaatgtgatacaggtaaagcacctagcatatgcctctatatagaaaagaatcagcctttctaggagcagagactgagaatcttccaaagtcactgtgtttagctacttgtgagtggcatttaataaactgtaatttttctgggcatgaatttaaatctcagttgttgtgaggctggtgtgaaagagtaaatctgtgctgcatccagacgcaaacatttgttgttcatgcttgtcacatacataagaatcatagagaatttatgcttttttgcattgtatcctatagaggtatttgaaaatttaagggtgtctactgaatgtcaagatgtttaagacaaccagtggattttgatatgtaaaaatagagtagagaaagaaacacacatgcacaaatccaaagtgcagacaatcatacaaatttcattttgaccctagataatggggctgtggagacgtctttctatgtcttttaggctgaggccaacgtgaatagtcacatagcattggacacagaatgtgacagggattaaaggttttcaaagtgaatcattcatgaaggagaaactcagagtcagcttatccttggcaaggctattttaggaggaagaggacaataaagatatttttcttcaagaaactcttggcgtcagcttcagagcttccaggggctatatttggggcttgctttaacatgtaggcccacatgcgaaaggaagttccagaggcaaatggaagggttattctgcaaccctctcccctccctccaggatatttttagagctgtctcaaaatctttcctggccatctgagtgggcctgaagaatatacaactctgaagtgtcccaaatattaggaaaagggctggagatgccaagaagagacttggcccaaatttcttatattccaatttgcccttttgttttcccttcaacctcctctgtggaagagcaactattccagcaaacttctagccccatacaacatagacagtaactgtctgagatgaccattattattttcttccaaaaacctctatgtactctctcataatgaatatgatctactttaagatctacttaatatttaatactaagctgcttttccctcctcccataccatccagtttctccaccaacctccccctttaagttaatatttgctttagaaatgcacacttacttgaacattagccagagccaaatgtcatcaagaaagtaaatgtacaaggggaaaaattcccgtatggaatgcatttcaaagtcaagtacaaatcatttagtacatttatctgtggccagtcatgccacagttcctactggcctggcagctcatagctggcttcatttcctgcttttcctcatactgcccttgacataccagatcaagtatgcagaagtacttttaaaagttaaaagcaataccactgaagtttcaggtcaaattgttatgttgcacttcttatttggagctaaatcagaggtgctcaaagtgagatgtttgacaaaggctgtcaaacattgaaacttgggactgcttctaatctgtgcccctaagcattcaagccaggactgagcaaaagaaaggcccctgccatgtgcctgcccagctccagagctgggcgctagtgggccagcctcctgacagactctgccctccctggtgcctacagtttcaggaggcaactccagcagctttgcagagtagcaggagggaaaggtttccagctcttcagcattccttcctctctgcagggtggttctcaggccccgccagtttctgcggagggagcgctttctcacagctctctctccctctcctgttcttcttctcgccctcccccccgcctccccgcccccgcccccaaccccaaacccaacagagtgatagcagctacgacttcctgtccactgaagagaaggagtgtctgctcttcctggaggagaccattggctcactggacacggaggctgacagcggactgtccactgacgagtctgagccagccacaactcccagaggtttccgagcactgcccataacccaacccactccccggggtaaggcagaccctctggggtggaaccccagcaaaacccagaaaatcaatatgtcccctccggccac

SEQ ID NO: 3819 - DNA, 2300 bp, Homo sapien
tttcagctaggacatatatgtgtttgcagggaggggaggctcaaggcttgtaagtaacttcgactgtgatgtttatgttttatttcctgaactggatgttaggtacggttatgtttgttatgtcagtgtatctgaaatatttcataatttacaaaaagaaaaagtttttgagaggaaagggaggaagggaaagatgatttttgtctatgtccctgcttctacctggtaaaagataggggttcctcctagttatcctaattttattataactgaaaaactgtgtctgttcacaaataagactgttgcctactatcctcttggaagttaattctcataagtcaattcatttttttagcaaatgttcaaatcacacacctatggagctggatcaacttcattgacttcatccatgggtgtgactctggttgcactgaactgctgatttggagatgcccttcctgttttgttagtattatgacatcatatatgtttgaatgacacaccagggaaagaggtcatagcccgaagtgctcattcagctgtgatatccataggctgctgatagggtactgggttatcccaggcttcctccaacctccttcctatccattagtcctgctccacttcatctttaccttggccccaggatcactgccctttttatttcctatccaaccatgatcacagaaagagaaaagatgaaagccatgtgtcgtcttgttataaaacatattaatagctttaagtaggaaatgaaacagaaaaggacgaatctaatagctagaattacacttgcaaattatctgtgtatttcatgattcccacttgagattccttccaaaatagaggcggattggcattatgctgattcatagcaaccttgatgttatactgcctgaattaaaatctctgccctgcctcttcctagctacatggccttgaaaaagatttttaacctccctgtaaaatttagatattaacaaatgcctacttttttaagttaaagactaaattaaaagatacatgaaaatgctcagcacaatacctagcaaatagcaagagcttaatacattttggcaattattgtgtacattgattttaaattttctccctgaccttttaatgctagtaagtggaatacctcaaatcctgatacctatcaaggataatctacctgtaggaaaaaccagcttccaggcaaaaatcatatctgttaagagtggtctctgtacctggtgggaaatttcttcccaaaaatagtagattcttctacctactctcttctccctacgaatgccaagtatcagtccatgaaaggagacaagagttgctaaactggttggtagtttgttttgtttttatttcataatatgtattgccaccttccatgaacagccaaaagagagcagaggaccaaatgacagagtgcatgctctctcctttcaagctgtccagtcactctttcatcaggacacggacctcttaggggatgaatggttttatttcccccagaaataaattaggccaaggagattgttggcaagcactggggcgagactggcccaactacagcatccctagcctggggacaccttcttcagtggacatgaatggaattgctaggcttatgagctaggattaggcttggggaagaaagtgactttcaacatctagaaaagctagcagcaaaactgaacacaaatgagtttagcctagagaattcaggggaaaactaagctccaagcggaagaaggtagttctagatgaaaaacctgtttcacatagacctatggaaaagcacactgcccagaggactgtctgcgttcctttatatcaacattaaatatatatactatctctgcctactccctccctgccacctgtccttccagtctcagcccaaaccggctcctcctccttccagccctccttttttaaagagctctttattagctctaaacaggaaaggggagggtaggagatgattggctaagagggaacagcaccaccctgctcattcccctcccattccctccctgaggaaacagctggaatgagaggtagggaggggaggctaggattggctgagtcagtggcagggtgggggccaggcagcacagatgaagcatttacctatctaggtaagtcaggaggagctcaaaaggagaagaaaacagtaggaggcaggggaagcagcctctgtctccatctctgccctttgaaacaaaagggtatttcttttctctcttcagcccccaacccagtggaggtgagttaatcactaaccaactattgcttat

SEQ ID NO: 3820 - DNA, 2300 bp, Homo sapien
tgcaggacccagggggcggggcagggtcgcaatcgcctaactggctcgggaaggcggctggaagtcggaaccagagagatcacaagctcctgagtttcccagcgccgaggagcctggtggcactgttgcttggtaactaatagggctgggggcggtgttaataaaaagcttgacttttttctgactctcgcgagagtagactattcggtaggcgtcttgagagcgggtgtgccgggtgacgagaaaatgctgcaaagattaacgctctcattcctgaatcccagcagaacctcattagatccataaatgggaacgtaagctttaaagatgtttttgctagaataaactaccacaacacttgagctaattatgccttagggtgtatacatacccggctccacaggtcagacgctgtgacctaagaaaatcaaccactctcatcgttgaaccagaagcttccctggacccacccatacaccccattggagttttttttgttttggtttggtttggtttttgttttttgagatggagttttgctcttgttgcccaggctggagtgcaatggcacgaccttggcaccgcaacttttgcctcccgtgttcaagcgattctcctgcctcccagtatctagaattaaaggcatggaccaccacgcccagctaattttgtatttttagtagagacggggtttctccatattgatgaggctggtctcgaacttctgacctcgggtgattcacccgcctcggcctcccaaagtgctgggattacaggtgtgagccactgcgcccggccaccccggtggacttctaaccactcctaccttccctcctacctaccccctaacccaggctgtatcatccgttgcagtcgtcttgaagaaccaaggaggaaaattgcaccagcaaaaaaaaattgagtcatgaaagatgtgaaaagatggaaacattacatataatttattcagaagcaaagtcttttacagtggaggtgagtttgcaccaagtgaactacacttttcatagttgccccagcgggcccgtttgatgcttgataaacccactcttggcaagtgggacttgctgtctgaatcccggctggataaagaacaatgagtatggatttcttggaaaagagagatataaattcagggatgtctttattcctccttcgcctgggaattaaactaattcttccaaaagttcaaacagttatctcctctttaaggctttttacaactcccagagtgctctagttgccctctctatgtctatacaactctgtctttattcattcagccagtatttgttgaacactttttatttgcgaggcacagtcctgggttctaggcatacacgtttgaaaaggtacagataatctagcattatcacgttgctttgaaattcagtggctgtgtgtctcacaccccaccctgtctcccaactgcaatgaatacttgttacaatgaaggcaggaatgaagtcttcatatttgtatgcccaggaactgaactggaatctgatgacacgcgttacacgactcctccttacactgccaccacctgaatgaggcagctgccctgggcccagatgctgacctcatactgtgctttctgaagtggcaaatagacgttttcaagcacagtcccagggaggcagaaaggccagtcttttggcccctggaaccccaatgagtcaatgtttaatgcagccacgagtctagtcacaagtgtgattgtttttgactggtcctttgactcactgaccattcctggcattcgtttgcgttgtgaactatgattctgtttctcctggtgtagtctgggtgtagtgtggaagccccaatttaataatttccgacctcactaagtgcaaggtcacattccaatctccagaccttcattcaggaactccttcccccgccctcttttcttgagcatatatgctacccacgcggagggcacctcactcgctctataggtagcaagacccgttgtcctttaggaatacggaggtttacatcttcgttctgagggtgggggaaaaatcagttgtcactttaaaagagttcgcgcttgctaaggtactaaggcagaagccgcaccgaagcgtcgcgataactgcaaccacccgcaacttctcgcgatgtttggccccgctaaaggtcgccattttggagtccacccggcgcctggtttccccggcggcgtctcccaacaggctgccgggaccaaagctggccccgcgggtgcctggcctgtgggcagccggaccgacacgatgtggcggctccgctgc

SEQ ID NO: 3821 - DNA, 2300 bp, Homo sapien
ctttggtcccggcagcctgttgggagacgccgccggggaaaccaggcgccgggtggactccaaaatggcgacctttagcggggccaaacatcgcgagaagttgcgggtggttgcagttatcgcgacgcttcggtgcggcttctgccttagtaccttagcaagcgcgaactcttttaaagtgacaactgatttttcccccaccctcagaacgaagatgtaaacctccgtattcctaaaggacaacgggtcttgctacctatagagcgagtgaggtgccctccgcgtgggtagcatatatgctcaagaaaagagggcgggggaaggagttcctgaatgaaggtctggagattggaatgtgaccttgcacttagtgaggtcggaaattattaaattggggcttccacactacacccagactacaccaggagaaacagaatcatagttcacaacgcaaacgaatgccaggaatggtcagtgagtcaaaggaccagtcaaaaacaatcacacttgtgactagactcgtggctgcattaaacattgactcattggggttccaggggccaaaagactggcctttctgcctccctgggactgtgcttgaaaacgtctatttgccacttcagaaagcacagtatgaggtcagcatctgggcccagggcagctgcctcattcaggtggtggcagtgtaaggaggagtcgtgtaacgcgtgtcatcagattccagttcagttcctgggcatacaaatatgaagacttcattcctgccttcattgtaacaagtattcattgcagttgggagacagggtggggtgtgagacacacagccactgaatttcaaagcaacgtgataatgctagattatctgtaccttttcaaacgtgtatgcctagaacccaggactgtgcctcgcaaataaaaagtgttcaacaaatactggctgaatgaataaagacagagttgtatagacatagagagggcaactagagcactctgggagttgtaaaaagccttaaagaggagataactgtttgaacttttggaagaattagtttaattcccaggcgaaggaggaataaagacatccctgaatttatatctctcttttccaagaaatccatactcattgttctttatccagccgggattcagacagcaagtcccacttgccaagagtgggtttatcaagcatcaaacgggcccgctggggcaactatgaaaagtgtagttcacttggtgcaaactcacctccactgtaaaagactttgcttctgaataaattatatgtaatgtttccatcttttcacatctttcatgactcaatttttttttgctggtgcaattttcctccttggttcttcaagacgactgcaacggatgatacagcctgggttagggggtaggtaggagggaaggtaggagtggttagaagtccaccggggtggccgggcgcagtggctcacacctgtaatcccagcactttgggaggccgaggcgggtgaatcacccgaggtcagaagttcgagaccagcctcatcaatatggagaaaccccgtctctactaaaaatacaaaattagctgggcgtggtggtccatgcctttaattctagatactgggaggcaggagaatcgcttgaacacgggaggcaaaagttgcggtgccaaggtcgtgccattgcactccagcctgggcaacaagagcaaaactccatctcaaaaaacaaaaaccaaaccaaaccaaaacaaaaaaaactccaatggggtgtatgggtgggtccagggaagcttctggttcaacgatgagagtggttgattttcttaggtcacagcgtctgacctgtggagccgggtatgtatacaccctaaggcataattagctcaagtgttgtggtagtttattctagcaaaaacatctttaaagcttacgttcccatttatggatctaatgaggttctgctgggattcaggaatgagagcgttaatctttgcagcattttctcgtcacccggcacacccgctctcaagacgcctaccgaatagtctactctcgcgagagtcagaaaaaagtcaagctttttattaacaccgcccccagccctattagttaccaagcaacagtgccaccaggctcctcggcgctgggaaactcaggagcttgtgatctctctggttccgacttccagccgccttcccgagccagttaggcgattgcgaccctgccccgccccctgggtcctgcaggcgcccgattggtggatgattctctccaggtgaggacctacgcgcgagggggcggggccag

SEQ ID NO: 3822 - DNA, 2300 bp, Homo sapien
aaggacaacgggtcttgctacctatagagcgagtgaggtgccctccgcgtgggtagcatatatgctcaagaaaagagggcgggggaaggagttcctgaatgaaggtctggagattggaatgtgaccttgcacttagtgaggtcggaaattattaaattggggcttccacactacacccagactacaccaggagaaacagaatcatagttcacaacgcaaacgaatgccaggaatggtcagtgagtcaaaggaccagtcaaaaacaatcacacttgtgactagactcgtggctgcattaaacattgactcattggggttccaggggccaaaagactggcctttctgcctccctgggactgtgcttgaaaacgtctatttgccacttcagaaagcacagtatgaggtcagcatctgggcccagggcagctgcctcattcaggtggtggcagtgtaaggaggagtcgtgtaacgcgtgtcatcagattccagttcagttcctgggcatacaaatatgaagacttcattcctgccttcattgtaacaagtattcattgcagttgggagacagggtggggtgtgagacacacagccactgaatttcaaagcaacgtgataatgctagattatctgtaccttttcaaacgtgtatgcctagaacccaggactgtgcctcgcaaataaaaagtgttcaacaaatactggctgaatgaataaagacagagttgtatagacatagagagggcaactagagcactctgggagttgtaaaaagccttaaagaggagataactgtttgaacttttggaagaattagtttaattcccaggcgaaggaggaataaagacatccctgaatttatatctctcttttccaagaaatccatactcattgttctttatccagccgggattcagacagcaagtcccacttgccaagagtgggtttatcaagcatcaaacgggcccgctggggcaactatgaaaagtgtagttcacttggtgcaaactcacctccactgtaaaagactttgcttctgaataaattatatgtaatgtttccatcttttcacatctttcatgactcaatttttttttgctggtgcaattttcctccttggttcttcaagacgactgcaacggatgatacagcctgggttagggggtaggtaggagggaaggtaggagtggttagaagtccaccggggtggccgggcgcagtggctcacacctgtaatcccagcactttgggaggccgaggcgggtgaatcacccgaggtcagaagttcgagaccagcctcatcaatatggagaaaccccgtctctactaaaaatacaaaattagctgggcgtggtggtccatgcctttaattctagatactgggaggcaggagaatcgcttgaacacgggaggcaaaagttgcggtgccaaggtcgtgccattgcactccagcctgggcaacaagagcaaaactccatctcaaaaaacaaaaaccaaaccaaaccaaaacaaaaaaaactccaatggggtgtatgggtgggtccagggaagcttctggttcaacgatgagagtggttgattttcttaggtcacagcgtctgacctgtggagccgggtatgtatacaccctaaggcataattagctcaagtgttgtggtagtttattctagcaaaaacatctttaaagcttacgttcccatttatggatctaatgaggttctgctgggattcaggaatgagagcgttaatctttgcagcattttctcgtcacccggcacacccgctctcaagacgcctaccgaatagtctactctcgcgagagtcagaaaaaagtcaagctttttattaacaccgcccccagccctattagttaccaagcaacagtgccaccaggctcctcggcgctgggaaactcaggagcttgtgatctctctggttccgacttccagccgccttcccgagccagttaggcgattgcgaccctgccccgccccctgggtcctgcaggcgcccgattggtggatgattctctccaggtgaggacctacgcgcgagggggcggggccagacgggctcacatgatttgccggcgactgtagcgccggtcccggccacaagctgtcggctcggttcggtcgcgttacagggcaggcgccggggccaaggcagggagggatcttaggagagatcgtagggtgagccacagctgcgcagccccgggtagggtctagcggggcgggatgtgggggctgcgtgcccccggatgaagtgcggggagaggtgctggtccccaggcatggcag

SEQ ID NO: 3823 - DNA, 2300 bp, Homo sapien
tcagcaagccagtgtgcaaacatcccaggagacagagattcagtttaagaaagcagtaagaaactgctggactacaccagtagtcaagccccaagaacagacatttcactaagtctacttgttttagacaggacattctaccctggagactttgcattaaatttccatgtcaaataattatttatcactcccaccaagcagcagagtccaggattataactatattcccaagataaaatgctgagagagagcagtccctcctctctgccagaactcacaacatttcttctctgacattcgaagatttggggttttggtttcatagctgttgttgttctgttctgaggaagatgccccagacatggcagctcttcagatgtctgaaacagagaagtagaatgtaaaaaagggaaggggaagaaagaagacataacttaaaaaaagtcagtgcattggatccgtgtggtataagtaaaaacaccctgggccaagaggcaggttcagtcctgtttctcccagttagcagctacttctctagccctctgtttcctcacctataaaaagagttgcactagaaccttacatttatcttctgacttacgagtctacatttacagacgttatcttcttcagtcctaacaataatcttgtaattaggcagattttgccaccattatttcttctcattttacagattgaaaatttgagattcatcgaattaagtgtcctgctcaaggtttcatgacctcagattctagttttaagaatctgggcagagtagtggcagcagttggggtggggtgggttatgtatagacgaagtacattaccaggaaattaactccaatctaacggtaggactcagttttgcaaacagtgaggccgggcacggtggctcactcctggaattccaacacttggggaggctgaggcgggcggatcaagaggtcaagagatagagaccatcctggccaacatggtgaaacctcgtctctactaaaaatacaaaaattagccgggcctggtggtgcgcgcctgtagtcccagctactcgggaggctgaggcaggagaatcgcttgaacccgggaggcggaggttgcagtgagccaagatcccgccactgcactccagcctagcgacagagcgagactctgtcaaaaaaaaaaaaaaaaaaaatgaaaaatgaaaaagaaagaaagaaaagaaaaaagtgagggacgtgggaaaatctcgaacatattccctgaaggaaaaacagtaactggaccccaagacagccctagcacgtcgtcatttctcctctagtgcattctcaagccctgctccgcaccctctccctagttacccccgggactcagtctaaagaacgccggagcgctgaggtggtaaatgacttccccaaggtcacctcaggaagaggggtaagccctgattcaaactggagtgggaaagtcctgagctcatgcccccaattcagacaacagggggctggtgaggacggaagatcctgcgccttcaagagccttacacgattcctttactgaccacacaaatcctccaacccaaacacagactgtggctcccggtcccagaacgtccgcgctgcctgccatgcctggggaccagcacctctccccgcacttcatccgggggcacgcagcccccacatcccgccccgctagaccctacccggggctgcgcagctgtggctcaccctacgatctctcctaagatccctccctgccttggccccggcgcctgccctgtaacgcgaccgaaccgagccgacagcttgtggccgggaccggcgctacagtcgccggcaaatcatgtgagcccgtctggccccgccccctcgcgcgtaggtcctcacctggagagaatcatccaccaatcgggcgcctgcaggacccagggggcggggcagggtcgcaatcgcctaactggctcgggaaggcggctggaagtcggaaccagagagatcacaagctcctgagtttcccagcgccgaggagcctggtggcactgttgcttggtaactaatagggctgggggcggtgttaataaaaagcttgacttttttctgactctcgcgagagtagactattcggtaggcgtcttgagagcgggtgtgccgggtgacgagaaaatgctgcaaagattaacgctctcattcctgaatcccagcagaacctcattagatccataaatgggaacgtaagctttaaagatgtttttgctagaataaactaccacaacacttgagctaattatgccttagggtgtatacatacccggct

SEQ ID NO: 3824 - DNA, 2300 bp, Homo sapien
tacaaacattctgtatataaatctataaaagatactgaagaacatgcattcctcaagaagtagaacatggggtatgtaaataaaaattattcaaagcttaggattagcaaaaagagatcactggagtaaatgctcaatggattcctgggcattttctagcaggccctctggagatgatctctgactgactttatttaaagttcttttagaactctttaagcatagaggttaatttgcagtaaatttataggaatgcaaatgactcttatctgagaacaatgcaaatgattcctggttatagtagagcaaatatattttgtccattttgttttaattactttccaccaggtagaaaagctaattgcaaatattacagtttgttactctgtaggatattaaccagttttgtatctattggaaaggtcacttcagaatgcttttgactgactgactatatgcattcctattcctcaaattcttctttgaaccagttgtagcatctgaatgtttcctcattaattaatgagttgaattaaatctttgatatatattcatcttatatttacttgtgtcatatttttaactttttgaaaatcatgtcttagagggtgcttacactataggaatttgcatattagttaagaaaagataagacataaaaaatcataaggcagcatgtgataaatggcaagtgatcatatggattttgggggctgtggtagagtttctggatgacagtttttttcatttatttctgcattactttcattcatttaacagacaactgctttgcaatatgaagcaccgtggaagggaatacaaatacaaatcagacacaaaccctgtcctggagttagcagtttcctgtgggaataaaggggaggaaaaaaacacctttcctctaccatattgtattcagtggctgggacctgcaaattagactaagacagattaacaggagagaaaattctatttatacatgtaacttgagtacatgtgggaaaactcagtgataagtaattcaaaaagttggttagaattggggcttatacatcatcttaataggtgaaggtggggagaagaaaggcacttacaagaaaacagattattggccgggtgcggtggctcatgcctataatcccagcactttgggaggccaaggcgggtggatcatttgaggtcaggagttcaagaccagtttggccaacatggtgaaaccccatctctactaaaaatacaaaaattagccaggcgtggtagcgcatgcctgtaatctcagctactcgggagactgaggcacaagaatggcctgaacctggcaggtggaggttgcagtgagccaagatcatgccaagacaccatctcaaacaaaaaagaaaacagattattttttggaaaggcaagtgggttttcaggggaaaagtaggaaattagaaagttttgtgataatgtttgtgtatataagtacgagtgttctttctgtctccttcaaggccatgaaatttctctggagaaggaatttgaaatatgttttactcatgctctcccctccaggatagacctaccctgaaaaggaatttatggcaaccttatctccaaggttgctgcctttagtcagataaggaaagcccccaaaatctctgttcctttccatatcactgaatctcaaatatcttcagcttaaaagaatcttaacgccaaatatttgggggtggcatatcctgattcctttcaggagaaagacatagattaatcatcacaaacagtagtaatggatggagaagagaagaacatttgcaaccttactgtgtccttaatgctttattattctattaaaacctgaaattttgtaggaatttttccccagtttcataattacagcacagagaaccaaccaagggttatagtagtcacaagcaagatgatatgggatccctcaaaacaattttacatgccttaattcctgagaccaaagcattctcctcacctctctctttactcatttggttaactctggactcaggccaaatcctgtccctggaagagccacaaagtaggaagcctgggtacaggcctggcaagcgagaacaatgtgtcactgcaggactttggagctctcagctttggagtcagttaagaccagttccttgctgggaagccctaactctggagggacagagacaggtaaggttagtttacttccttgagctttcgtcttcagtgctgcttacagccttaggatatctggtattcaggaaaggaggatgaggtagcattcaaaattgtgttctacctgggca

SEQ ID NO: 3825 - DNA, 2300 bp, Homo sapien
ccagactggtcttgaactcctgatctcgtgatccacccacctcggcctcctaaagtgctgggattacaggcgtgagccaccgcaccaggctactacattgctatttctataggatagattcctaaaatgattgctggatcacaggatgctattatttgcagaatatacttcaaatatccaagaaagtctactaaaatatttaatatatacttggacacaaaataaatattgaaaaaaatcaatgttttcattttctattaataattgttagttgaatttgaaatgtaaaaataattcgattcacaagatctatatgaaaatttactgaaagatataaaataagacttgaatgaaagaaaagacatgcatgatcctggatgggcagacttactattacagtgcaatgcctcccaggattttaaattcaaaaatatgaaaaaaacattaattaaagaatctcatccagtaggatacacatctaacattgtaaatatttttgggaaaatgatgaatgatgtatacatttgactggatcaaagggaaaggaatacttgccgtattagatagtaaaaaatactacaaagttactatgagcacaatatggcaaactgtaggtactacaaattatatatcattaaaatagcaaagtataggtacatataagtagaacagattaagtcaggaggaaaagtctattcaatagtgatggaataattatctatttggaagaagacaaagttagggctctagctcacaccatattcataatacattccaaatggattttaaatatataactatagaaagcaaaattattaaatcattaaaagaaaacatgagataatatatttattacattgggatggggaaagccttcctaagcagtttcataaaactcaggaagtcataaaggaagaaaatgggcagatttaattaaatttttaaaagaaaaacttctacatactaaaagacatcatattgaataaagtatttgcaacatatttgatggttaaagagttaatgtttttaataaacaaagatcccctagagatcagtaaggaaaaaaacaacccaatagaaaataagcagttgggtaaggacaggcaattccaaaataatggccctaaacagcacttctatctcctgattatatgaaaggatattgaacattacaaatgattatagaactggaaattaaaattagatatacatcttttactgatcagattagcaaaaaatgaaaagatggatttaatttaatactattcatgacctgaggaaatagccatttacgtcagtgagagtgtaaagtgctatcactatttggatgtattttggcagtagctactaaaataataaaagccaggcgtggcagtgcatacctgcagtcccagctacttgggaagctaaggcaggaggatagcttgagtccagaaatttgaggccagcctagacaacacagtgaggcctgtctctaaaaaaaaaaaaatgaaaaagaaataataaagacaggcagtttaagagcacaaactatatatgctcttacatgagggaatttggggttatttaaaacttgcatacatactattatatatacagttaaattacatgcatataatagcattttatgtcattagcttgacacaagtttaaagtatttccttatttcttccaaacattttctggtttactctcttttaattcagtagtttctatcctagctcttaaccacaggatccctgtctttttatgtcacttcattatctaaatctaggatgagctccctaggtttctgaataaaccagattctttctgtttattctgtttaccacatcatctccttccgttcaaaattgtactcataaaagttaccagaactctggtggactggaatcccccaaacaactcctggaaattcttcttgctttcctctattcagcctttgagctcagtctctgagctttaaaaaattacagtgtattaactgcataagtaatattaatacacctttgttgtagaaaaatatagaaaataaaagacgaaaccaattacatacaagccatctaaggataagggcattaagtattttggcatataactttccatacttttttcctgtgcttatgtatgtgtaaccatgatttacaaaaataatattatacatgctctttcatcatctgctgtttttactcaaccatttgtttagaagatttttatgtttcagtaaatatacacccacataatcattgttagccactatttttgatcgacatgtttagtgtcctgtggtctcagagctg

SEQ ID NO: 3826 - DNA, 2300 bp, Homo sapien
aatagtccatatgggaggcattatcaacctgaactggtttggtggcagcagaaatgaaaaagcagcagcagacacgagagatattgaaaacttgtatcaaaacaacctgtcaactaatcaaacattgaagggtgagggagaggaagagttcaaaagtgaatctgaaattttattcccgagaaccagaggtcagaaaaagctggggtcagaaagtgaagcttgttggccggaaatgagaaattcctctttggatgtgctgagggtgaagtgcttgcaagatgtccagtggggggaaaaaaaaaacaaaacctaagaaagtaagtcttgagtttcggagagtaatcagaaataataatgtagtgctggctagtcttcttactggtaatagttaaagctgtgacagaaggcaagatcattaaaattgcgaagataatttttttaaaaaaagaagagcctgagatatatctatatttaggaatgagaaggaggaagagaaggtaacagtaactaagaaagagaaattagttaagttaagggaatcaggtaagtttagtgtcatggaagccaaaggagaagagagtttcagaaaggaaatgatcagcagtgacaaaggctgcagacagatcctaagaaatgaattaaagatattttggacttggacctaagggcgtgcctcagagagacatgtcagtagaagagtggtagaagccagatgggaaagcaacaggtggagtgatgaatgagaaagaacaggcaggtagaacaagtcacacctttgagaagttcagcatcacactaaagaagaaaggtggaatttgaggtattggcaaaattgaagggacatttcaggatgagagatgcattgaaaatgaggcaggaaaagaagaaacaattctcctcggaatgaggagtgaataggagggaaaatttgacattgatgaagctaaggtagaatgatttttagtaaagtaggaggtaagagcatctgctgagagggaatgtgacaatttggtgacctggagagaaaaatctgcaagagtcactgtggaaagtaaacgaaaggacttcaatacattggaaaacggtactttaaagaaatagcagctttaaaggtgatatttcttccaatttagtctcaagactgtgcaatctggaatcctcctctatcttcattctggtcaaatcagtgtctcaccttggtgacctagcgcatggtttctttacatctaatatccttaccacttttatctaataatttctaccttttatccaaatctcacatcttctgtagaaacttccttgattaactcaacctgttgtagtttagttccttttctgaaactcttctgggactttcagtatttattacagaaaaagtgaagttctcagaaagaattgccttttaatagcaatcttctgagcacacaaatcttaaccttgaggattagtagcttaattggactatgtaagtgcttgtggtctttttagatctatgcgagaggaaacatggccggtccttcattgcgttcttctgagcgcactggatagatcaatttttggaggccctctggtgcctgacatgtagtagcagttaacatttgctgaactccaaatacgttctagataactcagcacatagtggaaacccaatgcatgtttgataaattccccaccttttgtaattccttggggtgggatagagacgagctctgggcaagaatatcagttttcaaactccaggaaagcatactggacctagtgtcatggaaagtggatcatttttgcggaggctctctgaacctcgcagtatccaaggtttccaggctagctggactgtgtcttgccataacccttatgtgtttatgaaaagaaaaaagaattctggcttcaaattcaaattacctttccacttaggggaaatggttggcagaggagaaaataaacgattgcgacatgttacgaagaatgaggactagcaaagaggaaggagcttaggtaaacagtgctgctttatttctgctgttaatcattcattgggcccgtcaaaagtttctgcccatctatttccatcaaccgtccttgaccagccaaccacatggctgaaattcagggactctttggtggagcaattaccagtcaacttcagggtattatgataaactctgatctggggaggaaccaggactacatagatcaaggcagttttcttctttgagaaactatcccagatatcatcatagagtcttctgctcttcctcaactaccaaaggtcggtggactactaaacccttggggaagct

SEQ ID NO: 3827 - DNA, 2300 bp, Homo sapien
ttacctatctctaatggcaggacagaagggagtggtggttaaggttactggaggttattgggggaataaatgaagacctcatgccacttctaaacactgccaggacctaacataccttgtgtttttatatccaatatgggagtaaaggttagatattttaacatcaaatatgaggatgacactagatggttttaaaagccccccaccataacttctaaactccacaatgttcgaatattgttaggtttcagtgaaatcctacagtagtcccttgcttggaatcactgtaggattggctccagcaatgggcaacacaaggtttggttctatacagtaggtatgggtcaaagaaaatgctatgattgaaaaattgctgttttcctcctcaaaaagctcataccaaccaggaaagagctatcagaaaaccttcaggaaagaatataatgataggatataacaaatacccccacagctggtccatagaccaaagtataattccaagtagggaatttcacttaacgaggtaaggcatttaagggaaaaggaatctaggctaggactctgctagccagacccagataaattattacagggaagcatgttcttgaggctattctctatgaagaagggcaacccaccttgccatctatatcctttctgttttcgacaggggtggtcctaagctggatagatctttactctgaccagtaccatataggtctgtggttctcaaacctggctgcacagtgtggcactttaagtaatcctgatacccagtcccatccccaaagatgctgatttaatttgtctaaggtgcagtttgggcctctggattggaaccaacccatatacccatcaatgatagactggataaagaaaatgtggcacatatacaccatagaatactacacagccataaaaaaggatgagttcatgtcctatgcagggacatggatgaagctggaaaccatcaacctcagcaaactaacataagaccagaaaaccaaacactgcatgttcttactcataagtgggagttgaacaatgagaatacacagacacagggaggggaacatcacacacgggggcctgttggagggtgggggttaggggagggatagcattaggagaaatacctaatgtagatgttgggttgatgggtgcagcaaaccaccatggcacgtgtatacctatgtaacaaacctgcatgttctgcacatgtattccagaacttaaagaatatatatttatatatgtataaatatatatgaatatataaatataaatatatatataagctccccacgtgattctaatgtgtggccagtcttgcaaacctcaggctatttattctaaagggtttgtaacaagccttcctcttaaaatccaccccaccaccattcagcgttttggggtctgtttgtttttattgttatcccaccccacaccgccccgaggcgcgcgcgcgcgcgcgcacacacacacacacacacacacacacacatacacacacgcacactggtgaatttctctctacagtcagtctggagtaatcccaaagtggtgtctttcgtaaataaggagaacccgggtgaagaaaatgactcccacccgaacaaggcatgaacaatgttcactccctactgtgttattcaacctgtttccccaggtctctgttttcacattagagagtgttctaggagatgacgcccttcctccttagttatttccccaccctcgtgctggcctttgacagacctcccagtagagggcccaagacgcgggtagagcaccgcgtctcagcgcctgagtctcagcccccgaactccaccgcacctgcaggtccccttggcagcactcaagcgcggggatgctccgcttagacgaactcacgtgcgggcagcaaggcctgcgatacttgagcacccctccccctctcccgtttacaccccgtttgtgtttacgtagcgaggagatatttaggtttctagaaggcaggtcatcgcaggccccacccagcagtggagagagtgagtcccagagggtgttgccagcgagctcctcctccttcccctccccactctccccgagtctagggcccccggggcgtatgacgccggagccctctgaccgcacctctgaccacaacaaacccctactccacccgtcttgtttgtcccacccttggtgacgcagagccccagcccagaccccgcccaaagcactcatttaactggtattgcggagccacgaggcttctgcttactgcaactcgctccggccgctgggcgtagctgcga

SEQ ID NO: 3828 - DNA, 2300 bp, Homo sapien
tagaggtgagtctggagcatttttttttgtgtgtgtgccagaaagtaaggaagtgctcaaagaacaataagaacaagtcaaaatgacataggaactattttgagggctcccactggcccgatcagggagaatttaagcatcaaaataaataatggtagccatgaattatgacccattgagtaaataaataaaattcatattgatatagtttatgctgatatagataaatgaataaataaatagagaagggaaaacttttatttacagtaaaatgccaacagatgaatatagaagtaattattaaattaggaaaaaacaccctttgacaaccatcatagtaaaaattgattcaagaaaggatcatcaatagacgctaaaatttgtgggtaaaaatttgatgaaaaaatgaggaatttacatagttttaaagtatctccctataaaatacttattaattacaaagggaaaaatactgagtctacactaagaaacatggcaggcaccatcttaactaagtgatcaaagttaccaccaccagtaataggacaaatagacaacatatgcctccccgtaaggataagacatcctttctggtattcctgtcaaataattagattcaataacctgaatctatcatgaagaaatgatagacaaatccaaattgtggggtgtgatcctgtctcctgacattaccatccacgtatactgccctcctacactgaaaagggctgatctgtacaatcaattggatattctggagttaacatattgtgatttctgaggacaggtcacaaaggacattatggcttcttctttcttgttctcagagacgctagctggcatgtcacgaggacactcaacacacaagcagcgagccctatggcaaaatccacgtggtgaagaatgaagcttccagccaaaggctggtaagtgagccatcttagatgtggattcgcctatcccagttaacccttcagatgactgcacctccagctggtgtcttaactgcaatctcctgagcgatcccaagccagaaccacctgaccgacccacagaaactgtgagatcataaatgtttattcttgctttacaccactaccttcagggtaatttgttattataatagataacggacttaaaagtcattctccaaaaataattgtggtgtattcgtcaaaaatgtaaaggtcatgcaataccaaaaatgctgaggacatttttccagaataaagaactgggggtggggggaaggcataatgatcaaacacaatacatgatcctgaaatgattctggaccaggaaaaacaaaggttggtttctattgttgttattgtttttaccataacacaggttattgagatgattgtcaaaatttaaatacagatggtagcttatagtcttgtgtcaatgttaagttcttatttttgatcattgcactctagttatggaacagaaagtccttagtgaaccatttagaataggaataaatgctagatggttccaaagtaataattatataattataattatataatcacatatatgtacatatatgtctatagagaaagaatagagaatggtaaagaaaatacagcaaaatgttaacatgcagagaatctgggtgacaagtatatgggaattctctgcagtactcttgaaacttttctgtagagattacttcaaaataaagaacagagcagaagtggctgctgttcctaaattccctaagtaaacttacactgctttttcaaactgggagatgaatccactaataggttttgaaatgagtttggtggatttctaataagaataggatagcctagcctagtctagcataacacagcatggcacagaggacgaacattgtagattactaagggtgagtactaacttgtgaaagttttgtttaagttctagtaagagaaacaagtgagtgtagtgggttgcgtggtcaaaaaagtggggaagccaccgcaacgaggggtgagtctgagccaaagagtggctcagagctccccgcccacctcgtgccgggccgtccctcccgcttgtcccaccctcaccggcgccgcgtcagcccccaggccgcctgcaggtgtgcgctcagaactagcacgtgtgccggacactatttaagggcccgcctctcctggctcacagctgcttgctgctccagccttgccctcccagagctgccggacgctcgcgggtctcggaacgcatcccgccgcgggggcttcggccgtggcatgggcgccgcgggcctgctcggggttttcttggctctcgtcgcaccgggg

SEQ ID NO: 3829 - DNA, 2300 bp, Homo sapien
ctgagacagacaaagattgctggattcagtttaacgttactagggtaaaagaaaagagttggattggtggttagagagtgggatcattgaaatcactgagaggttgaaagtgacaagtctccgagcatgcacatgagcattagagtcagaggagagtggaggacaagaccacaggcagagaagaggtcaaggcactggaaggccagggatttgaaaatactattgctgtgaatgttgaaatcaccaggaactgtggcagaagtaacagtggagaaggtggccatgagccaggagctcaaactttcaaggaatgagggagaaagtagatactaggagatggataccagcagaagtggtaaggagtggcaccttctgatagcatgtgatgtaaaactggggaaatgagccttctcctcttctcttttcctaagcctactacaatctggctgctactcccattactctgttgagaataacttgaaatgatgatagcaaatccttaaaagaatgtcactggatgtactaaaaactgtgataagtgatatgatcaaagtagacatttcttccactagaattttgggaggaagcctaatggaaaccaatgcgcacagaaagacaaatgctgtatgttattagtcatatgtggactctaaaaaactcatctcatagaagtagagggtagaatactggttaccagaggctggggaagggagagacaatgggagatggagagagattggttaaagggcacaggatcacagatagataggaggaatacattcatccttgaatacttaaccctctgccctaaatctgtcagtcctacatccatacttcttatttcagtaagtagcaccaccattcatttctaatcctggggctaactcttttttttttttcttttctgaatcatgtctccttttaatggttaaggaaaacaagtttaacataaaattagcaacaacaacaacaacaacaacaaaatcaaggtttaaagtcaaaattattttaagagaaaaacccaggcaaaatagcctacctacaggcaggcagtacatgtcagaaggacaggccacccccaataaaaaagataaaatattattttttctaccttttttaaacttaattatttaattatttctttcttttttcttttttttgtttcttttttttattatactttaagttttagggtacatgtgcacaacgtgcaggtttgttacatatgcatacatgtgcgacgttggtgtgctgcacccattaactcgtcctttacattaggtatatctcctaatgctatccctcccccctccccccaccccacaacaggccccggtgtgtgatgttcctcttcctgtgtccatgtgttctcattgtggaagctggaaaccatcattctcagcaaactaccgcaagggggctaactcttgattgctttcttctcaccaccaaccttaagaaaggaagtaaccaaaatccaatacatgagcaactgttcattccatctccaatatctttgttaattgtccactttatccacccagtcagggccgccatcaaacctcacttggatgtcggcaaaagctcccctgactggtcttcgcagtccattattgccctattctaatctaccttccatactatacacagatttacattttttaaatgtgtatctaattgtccctcccttttaaaaaatcttacaatggcatgacgtctcaattcagggtaaggaaattgtttcttcacattccctgtacaccgtacacatcgcctgcaattgcccttcaacacggagagcaggcatttcattagctgaccttcccacacacattcttgcaaagaggaaaagttaagcagggtgtttggaggcgagctgccatcatccaccgcctttgtctggaagcgcagggcctcacacgcgggatccatcggaagcccgagcattgtcaagctctgctgctgcacctgggtcagcaaggtgggctctgccagcgaaactcgttagaaacaatgcaaatggggagtaaacatgacctcgcccatgaaggggaagctgtggtcaaaagcattttgtcccggaaccccgcagccctccccacactctgggcgcggagcacaatgattggtcactcctattttcgctgagcttttcctcttatttcagttttcttcgagatcaaatctggtttgtagatgtgcttggggagaatgggggcctcttctccaagaagcccggagcctgtcgggccgccggcgcccggtctccccttctgctgcggaggatccctgctggcggt

SEQ ID NO: 3830 - DNA, 2300 bp, Homo sapien
gtggtatggccatagacaggccagggaaggcttcgataagaaggtggtattttagcaaacacctggaggaagaattgaagtcatagccaagataaaagtgcatcacacaaaaggaatgtcatagacaggggaaaaatgtgtgtcttcaggaaactgaaaaaggggaaagggccaccacaccttggtgaggggacccagtggtaagagatgaagcaggaaacatagacaagggcatctttgtacaaagccaaaagttggttcttttaagtctaataaaattgacctctggcctcaatctacccaattaattagtggaaggtgtgggaaggaacagaaatgaaaacaaaacaaacaagatatttccaaaactagagtaagatgctattctttttcaacagatatatcttcttgattacatactgtttgactctgtgatttttgttgctttaaattaaatctacaaggccttaaggggcctagctgagtctactatataatatgaaatatctatgagaaaatacgtcttctttatggtaaagtatagctttagttgttgagctttgttcactctttgtgctcaagattgacgtggcgacagacttccaacattggtggctgctactgagggccaaagaggagatgtgtactcccactgaatctgagtgtccactgagtgtgaaggtggatggtaaaatgcatgagtgtatcttacactcatactttacaagaaagtatgataaatgaggatgggagagaagctacaacacaggcacttactgattaactaaaatttgaagctgtgaattgcagcttcccctttagtgaaagatgatataaatagcttagttttcttcaaactagcagagactttttaaatggatggatgctgattttttttttaaaaaaagagcccatttctaaggcatgttttaaagcaggtgtcctcaacccctggggcataaaccggtactgtccggtggcctgttaggaactgagcagaacagtaggaggtgagcggccaagcattactgcctgagctccacctcctgtcagatcactggcagcattagattctcataggagcagaaaccctattgtgaactgtgcatacgagggatctaggttgcatgttccctatgagaatctaatgcctgatgatctgagtggaacagttccatctcaaaaccatttccctgcaccctccattcacgtaaaaattgtcttccacaaaacgagtctcaggtgccaaaaagattggggaccaaagttctaaaggaatcaatctctttgctattattgttattattattgttaagatggagtcttgctctgtcacccaggctggagtgcagtggcacagtcttggctcactgcaacctctgcctcctgggttcaaatgattctcctgcctcagtctcccaagtagcttggactacaggcacatgccaccatgctctgctaattttttgtatttttagtagagacggggtttcaccatgttggccaaactggtctcgaactcctgacctccagtgacccacccaccttggtctcccaaagtgctggaattacagacatgagccaccacacccagctcccttggctattagtgaagtcttctttttcttttttgatcacatctatgcagtatatttgagagaaagaggaagtagagtgggaatttcagcagggcatggtggctcacacctgtaatcccaggactttgggaggcagaggtgggcagatcacctgaggtcaggagtttgagcctggccaacacggtgaaaccttgtttctactaaaaattcaaaaattagccggatgtgatggcaggcgcctgtaatcccatctactcaggaggctgaggcagggagaattgcttgaacctgtgaggcagaggatcgcaccactgcactccagcctgggtgacagagggagactctgtcacaaaaaaaaaaaaaaaaaaaaaaaaaaaaaagtatggtaatttctccattaacttcgatgctgctgtggtcttgatccccagatcaatgcaatgtcccggaatggcttccatttgccaggcctaccaacctaactgatgactttgagtttcccattgggacatatctgaactatgaatgccgccctggttattccggaagaccgttttctatcatctgcctaaaaaactcagtctggacaagtgctaaggacaagtgcaaacgtaagtaactctggagtgggaacccctctgttagtcaaacatctgtaagatctgattcaatttgttcaaattttgtaactgagttgcatac

SEQ ID NO: 3831 - DNA, 2300 bp, Homo sapien
aaaaagacatttttcttccaagcctgaaaatggatggagaatttttaatatttattgttgctgagaacagtaaatagactatccactttcacaaatgaaggctggctttgagccacagaacatatctgttatatcactctttgacaccatatattaacagaaataataattttcccgcattgagtttcctatttaccatctctttaattatacccgctttaattgctgtcatggagtgttgaattttataatccaagatactaagatgtttatctgatataccacctccacacttaatgtcttataatctctgccaagaatttaaaaatttttgttggtcggacaggaagaggaaattccatggtttggtgaacccagaaattgttcagtacatctcggttataaaactgtgttaaatacacttaaactctataattctataagacccattttaggtttatacactgagcatccagttcctcaccgtcctctcataggttaaccctgtgtaatacaagttctgctcccataattctatgaacaaaacagcccttgatatataggtttgattttttaaatacattttctttactttattctaaatgtaacataaggtcaacatagaaaactgaaaagcataaggaaagtgaaatatctgtaatcttatcaaccattgttaattttgctgtattcctagtttctttttatacatatcaatatggtacttttgttttaataaaaggactgccaaaaggcacatgccagtttggactctgctttttccacttacaatgatatcatagtttctcatatttggtattcttttgcaatatttgctgcatagaattccatcacacaaaggtaactgccagaaattctttattacttttgctagacacttagggtttacattttttcaaaaattaatcacatcagagttttgatcacatcagagctttgatcacagctctgatgatttctctgggaactgagagcctaacacaagtcatgtccactttaagacttttaacatactgaaaagttatgttacagagtgctggtccccctgcaacacgttcactcacattggctgacgttttaattctttgccaatctgaggggaagaaatgtcaactctttgtttgctcttttaatgtcagtcatgtccttttccttttaccggtcattccggtttactcacaatcctacaaatcaatcctgctcattcttaattttccagtattgttcctcagattgtttcaccagaaaagttctcccccttatccactcttcacctaacaatttctacccatccgaatccttctgcatttattgcttccaggaatttggcacttaggacacccttgtccttacattgttcatgcatgtatatttcgtcttcaataaaaaatttagttgctcaagggcaagggccccatagagtctcaatattctaattgcctggtgttgcttaataaattagattcggaagggtcccctccagggaggggagcaaagggcaaattaccttaggggctgggagtgcagaagccaaacctttgagattgtgaaaacaagacggccccgagacgatccagtagcaggcattcaagcaagaaaaactcaaatattgttcccaataatgcctgactaatgccaaataccaagtaagggcccaggcagtcctgacagcctgcagtgccccaggataaaactaaccctgaggggtgctagcccacggtgaccccctgtctagactctggatctctatttttaggtcgaagtgctttattcttgactcccgaattcccggaaactattaccaaagcagcttagttttctctccaccctgcctgggtcacaaatatgacggcgagccagtcctttcccgcaggacgcctcaggcttccgggatggtaggccaagggcttagcaagaaaaaaggcggcctcggggaacctgttctgttaggttccgccagggcctccccctgacctctcgaaggccaagggctgcccatgaacgccgaggctccgccccgcggcccgccgattggccccagccgccctggtgactcgacgcacttccgccccgggcgcggctcgggccacgcccacctgtcctgcagcactggatgctttgtgagttggggattgttgcgtcccatatctggacccagaagggacttccctgctcggctggctctcggtttctctgctttcctccggagaaataacagcgtcttccgcgccgcgcatggagcctcccggccgccgcgagtgtccctttccttcctggcg

SEQ ID NO: 3832 - DNA, 2300 bp, Homo sapien
tttgagtcattcaggtttagtagcttcttccttatatgtcttcttccttatatgttacaagatataaggaattcctggagaaattgccagcaataactcccaagtgtttggtccaatctacattattattttgttttccagtgtcgacttcttccactacaaaatctccagcgtccagtgcctcaggtttagtaatttcctgcttatagtttttcaaaaatcctttaaattcctggtgattttttataaaatccttcaaatttctggtgatgttcacttatttttagtaatgaaaggagggaggacatttgtatagccattttagttgttatacatagtgattctaaaattatttgccataatctgatataaacaggaatatgaccttgggaaagttgtataaattttgaatgtgtttatatatatatgtttacattatatatagagaaattgatttagtaccttccttattgggtattagtaaggtataagtgggatgcatttaaagcacttagcacagtgcctggtgtagagaaagctcttagagctagccaatatgacttatcctacacttaaattaatgttagggaaggggaaggttcatgtatgtttgttagtatgtgtgtgtgttaatatgttaatatgtttgtttgttaatatgtatgttttgtgtcatcaactttgctattttattcttttcagaagtgatctgttgacacctttactgagtttgttcctattgcaggactctttcatttcctggaatgcaactagtttgagtcttctgatgtaaaacatttaaacagggaaatttctgctgtcctcagaacaagatctgtatttctgcctcttccctacccacccctcttccacacctcataatgttatttattttttttctctttagtgggcagttttatctggcaatagcaactcaattttatagcaactgaaaggcaggaaaagtccttatttactgaaataaaatagaagacttttgcagggactcctggtcaaccactgtgcttatgactggagagattattttgatatgatggaaggaattatcctgatttcagcactaccatctctggtttcactttgcttccagcagaagcaagagacaatagtaattgtgggtagcacttcagtctgggcagactgtgcttagttaacatcatttctgtggtcttcagtttccctttagtataatgtgagtgttgaactgaaatctcaatcactggcttctaatttggttatatatttcctatctccctaatattttaaaggatcgaagagaattatgcatgttaacatagtaattaagataccttcttataggctgggtggggtagctcacacctgtaataccagaactttgggaggccgaggtgggtggatcacgaggtcagaagttcaagaccagcctggctaagttggtgaaaccccatctctactaaaaatacaaaaattagcggggtgcggtggcaggcacttgtaatcccagctgctcgggaggccgaggcaggagaatcgcttgaacccagtgggcagaggttgcagtgagccaagatcatgccactgcactccagcctgggtgacagagtgagactctgtctcaaaacaaaaaccttcttataattcctgtaagagcttggtaactggtagcctcctgagttgagtgctgtagggtttgaggggcaggaagagatgagttttttagtggactgatacatgagcaaaacaagattgcatgtgaaatttatactcagtgaggcatccgggcttaactcacatgctcctagtgggtatatgcactaatactacgtttgttgatacagtcttttgaaagagttgatgataagcatttcataaagtatttataaaacactggtatagcttagtgttggagagcagaagagagaattgcttgggattgtcaatgatttcttatcatctgctagaggaagactaaataacaacatcatgatgttaaggtagatctaaatgtgttaacaagaagaaaagttgaggaagtcctaagtggaaaagagaaagatgtaaattatgtagtatcatactacttacagtttttaaaaagatacatatgtttaccccaagcacattccctttttttttttttgagacagagtcttgctctgtcacccaggatggcgtgcagtggcgcggtcttggctcactgcaacctccgcctcccgggttcaagcggttctcctgccacctcagactcccaagtagctggtattacaggcacccaccactatgccggctaatttttt

SEQ ID NO: 3833 - DNA, 2300 bp, Homo sapien
atatatcctaaagaaaatcaaagggaggaggaagtggtggaggaaggcagggaatgcaagaggtccgaaagaaggaagagagaggtcaaaagacatccttaggcaaagcatggcaaacaggaaaccaggaagagaaagcggaggcagggctcaactgtaccctcagccatgtcacatgcccctagcttctctccctctaagctcaatatccatcgcagagctattagcccttcctggccctcatcccacatcagcaccttcatctagcacgacctttcaatctatcagcatctgcaatacaggaggaaagtaagcagccctgaaccagacagacagacacacacacacacacacacacacacacacacacacacacacacaccccttcccagaataaaaggcccttggagatggctcatgctctctaggttctggttctctgatagaagtgctccactcccacaggggagggcagacacgtctgataagaattgcttagcacaatgctatatatagtctaggttcctaccagcctggagatgtggagctagaacttggcagagaaccatgctaggtgctggcaaggaccatcctcccactgccagccaatggggagcctcacttcccggctgggggccgtgagggcacacagggtccttccaggcagcccattaacactccacactgagggacacaggctgttggctccattttagggaaaatcaacttctcccaaatgtgagggggatgtgtgggggctgaacagcaaattctagcttctctgcagctatccagtagcatgagaaaatcaatctagtcctctcttctggaggactaagggtggggtgtgtgggagaagaatggagaaggcatagcaggtggctgggctcaataaacatctacccatttctgatgttcgaagaaataaaggaatgtaaaagaatgcagatgaatacttactgcagagagcggggctgccaggcatctcctttttttgttccaaatacatgcaagtgagccactctatccggcagtatgacggctgtctccggcacactggcaccatcctcagctgagcctgagtcgccaagaggttgtcacccactcacagagcaagctgcactctcctgagtcctctatgaggaagaagagaaaggaagataggtgggctcagctcacagagccaaccaagcaatgaatccagcagatcccaaccaggggcccatctgggttagtatgtggctctgggatgatgacccttagctgttgcccgccatccaatgaaagacgcaagacaatgttgggcaaaatgacatgggacctatgtcctggagaaaggccagtaacagaagatgcagggtctgatgaaggagggtctgtttaccacctctttcagaaaatgaacctgagagaccacagagctgcctgaagcccgaaatccaggctcttatcatatacacagcttgggacaaagaaaatgagacacgaaaggttccaacgtccatatacatacaatctttttaggtcaagctgctctctactcgggtgcaaaacatgacatgaagcggctgtgtctgcctttgcactctgagtggggatggctggctcccaccccctgccctgcttaactctctcatgtgacctcggtcacatctccctgccctgctctggctcccaaggcccaggagccactcctaccagagatcccaaatgagtcaccctgggaggtccttggagagaagaggaggtgctcagtgacaaatgtcactgctagcatcatccgcgggaaagcatgagactgaaaaatagtacccagtgaaaggagggagggggctgcggccaagttgtccctcatcctcataagcaattgtttgtccctctgccccacgctccagcagagggggtagagaagagaaaggggaggacggtttgtccgcattcagtggcagtggaggtgcatcttctctctcggtcgcaagaaggtggggtggggtggggcggggcggggcggggcggggcggggcggggcggggcggggcggggcgggacgggacgggacggggcgggacggggcggggcagggcggggggatcacgcgcctatagcgcaaagctgcggtatggagaaaagcctagaacccacagccgccatgatgacgcaaacaaaattaaaagggtcaagaactcaaggcccactgtttcacctaagaagaaaaggaagaagatgaaggggagaagagaagctctgatttgggtcaatatggaaaggggaggctgacgcaggctgcccaagagccagcc

SEQ ID NO: 3834 - DNA, 2300 bp, Homo sapien
cccaaatctctgagactgtgtggccaattacttgaaaagtaattgaacgtatttacctaggccctaaaattttgagcccaggaaggatggatatccagactggttttactctggattcttcaggctgcagttcaatttggtttttcaaattcctgccctgatagaaggatctcatgtgtggggtaggcaggcaatgttttaattacgctttttgtccttaagaaattccagggagaaaaaggtcctggtttttggccaaaaaggcaaaaaacaacagaaatcagctatgactgtaatcctggacttgtctgtggcacaaagagttaatgggacagtggtcagggtgaggaacattttttctcagggctggagaagcccatatggctcaagaaaacatgttgcaacatttagtacagggcagccctgtctgggcactgggggctgccactcaaagagttaagctactcttatgcctgagaaggcctcagggaaggagtgagcctgaaaggacagggacctctatgccccagagcagtgaggtgcaggaggggtgaggtgggagggtgtgagctgaaaagtgtggccaaggaagcagagtgtaggcccaactttttttgccttgtttgaccagccttggcactgccctccggctctccaggggaaaagctgcagttctgctcttgcaacacaaggagcagactggagaatttagatctgcgtcacagagctgagagagagagagagagagagagagagagagagagtgagagagcgagcgagcaagcaagctccgtcgataggtctgctagcaacagccgtgctgcagcagagagagagagagaaatcaagaaacaagtcatagcaacaccgggcaccaggttctgccagctcacttgctgagcgttcagagatctgtcagggccagaggcctctgggtagcctaggctaggagatgacacgcaaggtggcacgggcggttcccgtggggaggaggtggggtggtggtggggggcaggggtgggagcaagaggttgtggggcgacggtggagggtttgatgggaccaaattctggaacattcgggactgcggcaccttacggcgggaccaagatttgggtctgcgcaggcggcgatgggtggtccgacgggcttcaggacttgatggcgtaacccccttcttcccccacgtatgtatttgctgggatcaggggcgctgtctctgtgtatgtgggtgctctgtctttctcaccttctttctcgatttttgctatttatttctctgagggagggttttttcccactttaatttcttttccctagtgtcagctgctcaagcctgaccagggtagaggtgagaggagtgaaccatcccctgcttcccacctgacctcccagcttttaccctatttccttctagtggacagacagactggttctccaagttgtttgggtgtcagcgtccatctgtctgtccgtgcaggtcttatgtggaaggtaagggagtgagaagtgccgaaaggaagacagagggacagttttttcccaggggttgccttattgaaaggtctggccctgggattctgaggctggtggggagccgagtggccagggtggggtgtgggctgggagaagtggggtaaagctggtaggtttgtcactgcgtagttgggaaaagtggggaatggtgacgcagtcactgttgcatctggttaggagctctatggggacaggtagtgaggctcctggggtctctgtggccagctgagaggggttaaggatgagctaagaagggaagctagcatttagagattaaatgtcatccttttggcgttggaaagttgtttaccttgcgctctctgtgtctccatgttggctcccttccagttcacatgtgatggccttccctgtactgctgcatcattaactaagtgactgagctggccttccattggccaggggagggctctccctccagacacttcctctgattggtgggtgggccaatggcaggtgaaaagctttttttgattggctcagggcagggtatcaaatctgaatttgcatttcacttgcttaaaggggagcggggagaagcccagcagctttctaaaatctctttaggggtgtgcgtaggctcctgtgtctatgcctgcttttgactgcccagttgaagcctcttcctatgccttttaaaatttcacgcactataaggaggaagagctcagggctcccaaaactttttatttagagggaagaatgctagggagatgggtatgcagagggttgaccaaattggaaga

SEQ ID NO: 3835 - DNA, 2300 bp, Homo sapien
ctaggaggccttgtgagccaggcaaaggagtttgaacctcatccttagtccagaatgaaactgcataagagttttacgtagggaaaggattgatatatttgcaagatccttctaaatgggatattgtcttagtccaagctgctacaacagaataccacagactgagtggcttaaacaacatttatttctcaccattctggaggcaaggtagtctaagatcaaggcatcagcagatctgtgtctggagaaggtctgcttcctggtttgcagttggccatcttctcactgtatcctcccgtgttggaaagcagagagggagagagagagaaagagcacacaaacaagctttagggagatacagacattcagtacacagcagatgtggagactggatctgggcctagtgaggctggaggcaggtaggcgagttaggctagagacaaatgcagaaatcccagcaagaaataatggtggaatgagctaggaataaagagagggccaatcttagagatttaagatttaggaagtagaatcaggatgtggtgattgattggcatatgtgcaagaaaggagggaagtgagatggaaaagtcaaggatgacatccacattgcttgtgcaccaggcgggtggggacatccctcactggactaggagacactggtggtagaatatctgctatttggtatgtgtgtcctgcatgaacttgtcttgcaacttcatccaggaacccctaaattatggctgccttgcctggaggagcaggaatgaatgagataagcctatcaacttgaggattctgttttccagacgcctagaggtccatgtggtggagcatcaggaagggaggaaaggtgcaggtagagcaaaggcatttgctgggcctcctattctctcaatccaatctctctgattacttaagaactgtttgtcgaaggcataccatgtaaggcccttagtagttgcagagggagaaactgatcttaaaacagttttgctatctagaaggagataagaaaaccaaccacagaaataaatacaggtgtgtttataacatgttaacagccataaaagacatactctcagaaaactgaggtcataaatgacattgctgattgggaaaatcagagaggaagaggttttcgagttggccttaaaggacaggtggaatttctacaggcggaaatgtgaggttgggcgtccagtggagatatccctgaaggaggaaaaagcatgagataagatggcagcgtattcaggtaatcaccagctcgctctttctgcttagggtatctgcacaaagtgagatattaagctgggatccacggagctttgaggagtttcagaattccctgaaatattgtgcaaaattatatttctgtatgcatgtgctttttttgaagacagggtccatagctcttctgcaattctcagaagggtgtaggtacaagaaaaggttaaaaacagcagttgaaatttccgaattagaatttacaggtaggctggggcatctgtgcatgtgtgttctaacaagctcgggaagtgactcagtgcacacctcggatctctagacgggcccatggaggccttgagatgccagcctcgagcgcttcccacccatttcccacccctcgattctccacccccattttacaaggagtcaccagcatccccacagtctccactgccctggaagaaatatggcgaggcaaggtcagaggaacaggggggaaatcagaatatcttgcaaagactctggagtccccttcagagacagggtgggtgggagctgctctgccccgagtctagcgacggccacacggcctgacaggtctcccgccccgccgcaagcccatggtcaaattctgggaatttccgaatcagttggcaggcccggctgctgcagattttcccggacacgagcgtgcagcgcccgacgcggccgctgggtggcgccgcgcgggacgccgagcgtgggaagcgcgggcgcgcgggcaggctgagctcacacgcccgggaagcggccgccgcggagccggcgtccgcagcggctgcgcatctcgggcctgcagcggggcgcttggcgggcgggggccgggggagagcctgtttgcgcagtacccccggagggcggaaggccgccgaggtaagagccgggactcggccaggtgggagtgggcaccttgggccgggcctgcagggcggtccccgagcgtcccggggtagggtgggctccctggggacgatgcccagggccccggccgcgctccggtcgcgccccaccccggctgcagcgcggcc

SEQ ID NO: 3836 - DNA, 2300 bp, Homo sapien
tttttttgagacagagtcttgctctgttgcccaggccggagtgcagagtgtagtgttgtgatctcagttcactgcaacctctgtctcctgggttcaagcgattctcgtgcctcagcctgccgagtagctgggattacagatgcccaccaccatgcccagctaatttttgcattttttagaagagacaaagtttcaccattttggccaggctggtctcgaacccttggcctcatctgatttgtccatctcggcctcccaaagtgctgggattacaggcatgagccactgcacccaactggacactttcatacaatatctatttagtcaccacaacaacctagtgtacagctgaggaacatgacactcagactagttgcatgacttgcaaagaatccagtaaagagcagagtaaggattgatgcccagtctggttgaaggtaggaccagcttcattgaggaggtagaaactgagttgagtcttgaaggatagtgaataccagggagaaggtagtgttcttcattctctttgaaatgagggttgtggaataatgcatgctgtccccatcttgggcttcctggaggtggggcctcagttccaaatgctcttccccactggcttcctctgctcaccctccagccattcttcaaggcctatagtgacatgtgtctgctaaccttaaccagacgtgtcctcacgctccttagtatgtccatagcactttggttgtacctttcttatggtgcttaccatggcagtagctctggcctctggagtctcttcacgcctccatttcttcatctacaaaattagtagaataactctaccaatctcgtaggtcgtgtgaggcctaaatgagttaatatatggaaagcactcagaactgtgcctggatatcataggcatctgttactttattttttatttctttatttttgagccagggtctctgtcacccagggtggagtacagtggactcaacctctcagggtggagagaccctcccacctcagccccccaagtagctggtactataagtgcatgccaccacacccggttgaatttctaaattttttatagagatagggtttccctgtgttgcccaggctggtctcgaattcctgggctgaagtaatcctcccacctcagcctcccaaagtgctaggatgacaggcatgagtcaccgcgcctggttggcatccatcattttaattgccgtacatgcaaactgaaagctttgacaaggtggaattcatagatacctcccaatccccacccccctacacatgacacatgaatacaacacacatacacatgacacttgcacagaggctttcacgcagtgtcctatattcagggcttgatacattgtcaaggtgtggcttcttgcactcagcaggtggaggaaggtgccatttggtttggctagtttacaacctgcaggagccctgtccctctgcctctcttgggaagcagacctatttcaactggagatacttcagaagcccagagtcatccaggcaagaaaccccctcctcctcatccagactctcggtgctggggagcgggggtgctcaaggggaagccatgtaaggctcccctgagacaactgggtttagagaggtggagactgttgattggttcagtgtggcattcagactacttagttcaaatgctgttcagaaaaacggatttttccagagttagaacgtctatccaaggacttactgggagacctgcagaattgctccttttcctgaggaatgaagcagcagtggcctgagaactcatttctctgtagccttgtttcctgggggttttttgaggctccagtttgggctcgtgtctctgtgacctggagtttggctaaccacactctcctggccttatccaagcccagttgttttccctcagctgcttcaaattccagctgggtcctgaggccaatcttgaccttgctttgtgtaggagcaaaggagcctgggttttcctgccttgggtcacagcagtgggaaaatacccaggctccattccaactgggaggaccctgtggccttgttgcaagcagcggccctgcccgcaaacaggaagctttctcctccacagagacccagttctgatgatggtcacacaccccagcagttttcccctaacaggaaagttgtcagggctgttcaggcatttccttctctgccatctgccatccggactgaagagaaagtcttagtttcaattcctttcctgttcaggggaggaggacactctgattggaggctgctggaataaattctgactcactatt

SEQ ID NO: 3837 - DNA, 2300 bp, Homo sapien
cctgtgaggaaatgtaaggctggggtccctgggtacccttgtgtccagtggccagaacgtgtgtttgggggtggcttgggcaagggtgtgtgtgcttggggtgatgagtctcagtgaccctggaaaatatgaagagtggccaatcactgtctagctttgtagttctggggctatccataacctttgcaagccagagaagaaacagctctggtctctcagaggaagggatttgccagcctcccatatcccctacttctatttttcctccctgaagcctgacatccacttcgcccttgctccttgtacccagcaagtgttctttctataccagggcttcttgaacctcagtgtgcatgagtcatggagaatacttactcaaagtacagattctggccctcacccttgattctgtgtagaccatgctttgagaaaactctgctccacagaatcattctctctctctttgctcccaaagctagttaagaagttcaggtactaaagaaagacaagttatttcccctgtttcccgtggtccagctatgggagacaaatggtatttaaagtaaccagaaaaaaaaaatctggaaatggaagttaaagtggaccaaattagctttcatatctagcagggattacaaccccacatttgttctcaactgcacactggatgcctgaagcagaccgagcggtccctggagctgaggaagttgaggggagtggggggcctggcagtgttggaactaactccttttccctgttaattgggagtcccaaggaccaatgactgattttaaaatgcatgtttgccactccttctgtccccaggcccttgccatcactatgtgatcagttctgaatcatcatttgtactttgaaacagattcataccattccgttgtattcaatcaaattagcatatcaggcctttgctcttattgtgtgatgaaagactttgttccctgtttaaaggaatgctaggcaacaagaccagaataaggagattttgggtttgtttttagacctggatccttctcctgtgcaaccccaacgcatagtaggtttgagatggactataaaggtaaagctacttttataatgctagagtgtctgcggagaaatcagaaaggaccacagagtgctggtctggcttctcttttttccctttaggctatgtggtacagacatcatggaagagcctgaactgagtatttataatttcatgattctgctctggatatcagagcagcctctcccaggttataccttatctgatcctcccctggtgccatcatctgcccaggctggcttctcctttctcccgtctctacgtccccaagactaggctgcctacccggctcagagtttcttctattcagtacaaccaacacccagaggaactggtgaggaacaggaagctcaaggatctatcaagtggtggaggatggagtcacagaaagtcctttttctgatgggagagcaaggtgaaatccctagtggcttagacccagggctggagaggggataactggtgagaaggcatccagggaagtcctttttctttaggatgatggtgatggggaactaaatggggaaatatggaaggtcacaggaaaagttaacacaagttagcaaaaagttaacataacacaaaaaggtcttgcaggaaaaaaaaaagaaaagaaaagaaagaaaaagtctccaagaatggtttggacagccaaaatgaatacttatagtcacgtatacctgctcactcctgacgcttcactcacacacagcacaggatctggtgaggctatcactaaatgtgccacattgtggttaagttttacctgattaacgaaatgctcacacttctaaactgaggtccttacagtagattccttttgcaagattgttactggcttacaacttaaaaataaaggaaaatcacaaggaaagaaaagtggggaaaaaatcggaggaaacttgcccctgccctggccaccggcaaggctgccacaaaggggttaaaagttaagtggaagtggagcttgaagaagtgggatggggcctctccagaaagctgaacgaggcatctggagcccgaacaaacctccaccttttttggcctcgacggcggcaacccagcctccctcctaacgccctccgcctttgggaccaaccaggggagctcaagttagtagcagccaaggagaggcgctgccttgccaagactaaaaagggaggggagaagagaggaaaaaagcaagaatcccccacccctctcccgggcggagggggcgggaagagcgcgtcct

SEQ ID NO: 3838 - DNA, 2300 bp, Homo sapien
cattcgggcagatcctgtcagttacatttcagatagacaggtggaccctaatatgaatagagattgattaggatacctttggaaaactcacaaagcttctttagcattgaacgtgaaagtagtagtagtagtagcaataattaacacttgcatagcacttcctatgccagagaatgtttgaaacaccatacatacatacatatatataggtgtgtgtgcatgtattcattcagttaatcatttaaattatttaaggttatgtgcatgaaggcagaatggaaaggtagacagagggcaaagagggaacgactccagaaaatggtgtcttctattctgagtcctgaagtcttcctgcctttgtttttgctcctcagctcatcggggccctagagcaggatgagcaggcacggcggcagcggctggcttataaggtggagcagctcattaatgccatgtccattgagagctgagaggaggagcctcgcattcctgggaagagggacctgtccaagctgtcacactgggagtctcagatggaaggacaagtgatggggatcaggccccagagcttgctgtcccctgagaccccatcctggggagaggggaggactcctctccctacgccagccaagtttcgtcatagccagttccagctgggagagacagtgggcgtcgtccatcctcagtgagaacaccagagaacccggggccgggagaaggtggttcttcaagccgagaggcacgagctggggacagttctgcctctgtgactgctgctttgcatgaaaactcatttgatgtatattggggaaataatgagaactttatttaatttttttaagaaaaagggaaaaaaacagaaataaaacaaaaagccgccctgttaatcccgtccaacttttgtttaattctgatttctgtctcccttccatcttttctcccattcctccttctttatataatgcctatttccaaatgccagagaaagcagagatgctgagagacattggagagaaaatgactgtctccttttccttgaaattaaaaaaaaaaaaaaaaagagaaagaggagaagaagaatgatgagcacaagtatgcaccaaacacttcgcaaaaacagaggccagtaaaacctggaattatcccggcagccagaggagtatggaacttccagaactttgcacaaattgcaaagccatcaagagctcaccctggctgactggaaactgagctttatctaccacacacctgtatattctcatcttttgagaggagatgtgtacctagatagtaccaatgctttttgctactgttttttgttttgttttatttaatcctaaacctcaacaaatgaggagctggtctttgatatgtttcctttcaatttccctaaagttactatgagaagtggggtgaggtgggcctctcccagaccagacacctggcagccctgcctcatatcaatccctgtcataaaccaggcaccctggggaaacggcctggaggtgtgtgggccaggcctccacgaggttccatttgaaagttgatttggagacataggtgtttgactttggagttcactccaatcatccagtggtccctggcaattaaaaagaaaacaaaaatcaaacactgtttacagcaagcaatacttgaagagcataggttacagaagctgcagtatttattattatgctttctttctttcattctctcgtgcctggagaggggagaccacccttcgctcatatacggaagctcctgaccatctgggcctacagcacttcctcagtagaaatgactgtggcatgcccacgttactaccttctgcctctctttctgcctctcacggacttgtgagtgtgaaggacaagtggatgacttctcactggactttccttctctgtctcttctgatgatgcctaaaactatggataaccaattctcctgagtgtagattccaaacaaagagaccaaagctccatgcccaggtccaaaggccccatagaagccagtgggagtcatcgagaggaaaggcgctctgtgagtgtcaggaccttggtggccaggatagccatcagagtgtccaggcctcccacattaccttggatccgagcagccagctccaactgttctgcaagcagcactggagtcagggggtaggaggacaagtggaagcaaaggtgtgggactggggaagacaaagaggaacaagctgcccttcctcacttttcaaagggtcaggaatcctaggctatgatgctgggaagctagaccagctcctccaagagagactagac

SEQ ID NO: 3839 - DNA, 2300 bp, Homo sapien
ccctggctctgagatctctggttctcaggagaagggagctgggggaacctatgcaaagagctgcatttgaagcctgcagcagagcttcacagccagacatcgtggggcattctgagtggggcagttctaaggcacttcctgagatggggaatccctgaattaaactgagacgcccggtgaagttggtcagcaccggagagggagttcacacctgctatagacttgagcccactgacagggaggatttcattgcaaacttgatctcttaaggccaagtgattatcctggcgccatagctttcaggaagcagcaggcagaatgccctgcaggcatgactctctcccctaaagtcatctctgcaaccagaccagcagtgggagaagccctcaggcccctggtatgagactttatcctcatgggttttgaacctggaccacagaccaagctaaggactggctttcaggtcagacaggacccggccaagagctggcatcaaaaggcttcctttgggaaagagcacagagaggggagaggggaggtccaggcatttgggttgggcaggcagcccacgcagctgtctggagttagcggtctcctcagaaaacagagccgacacagatgggcccaggctgttatttgggaatcaaaagtcctagcaaccaacaaaacactttggaaaaagccaaccccagccccatctcttccttcctcctcccgggtcttgtggtcgctgagccttcctcagtctgcagctttgatcacagtggagtgaaacgaacaggctggggtggccctggggttaagagcccacagtccactttgccaggacaggccttccatctgcattccctggacagcacatgcctgtcccctttgctttggagcatccccggcccagcgctgggagagggcacttcaggggaaatcaagagaaagtccagggttatccgcatctctgtgccttctgtgtgctggccagatccaagtaatagaaatggactaccctggcatcgtggtgtggagagagtttccttaaccagacctcaatagcaaatgtccagggaaagattaccagaaactacccaaggctgccagaagaaggggagggtagaagagatgagtcagctctcagctgcagcagcttctcccaggctagaggaaagtgagggatcctgttgtgttttggaagataggcagaaatcatcgtggaagggcttgaggctgggtaaagcagatcttccccaagacctggcactactgagacatttgggaaagtttggggcccatgagagtcaagagaagatgaaggaggggagagaagaagaagctggggagctgggaacatcatctcaggctggaggacaagcctgtgacaggaccggttccacagaggagtcaaaagagttaaagcccagaaggcagctggaagagaaggcaaagctggaaaaggaagtaaaagcagcagctgttctgattttgaaggagagtaaatgggcttatttgctttatggtctaaggagcagagaaaactcattctcctctggttataaattcccgagttgcagaaggaagtctcctaactactgatcggttcctcttggggtgggaaaatctctgagctacagtgagtcattcccaggatgccaacaatggcctccacttctccctctgcccctgcccagatacaagaacgccctggggagagtcatgaaagaacttcccccaggggagcccattcctcggcccagccaggccaggccagccctgggaagtagcttgggcagccgggctgggcggggagcgcaggtggcgccctttgtgcctgctccgaggctgagcctggggctcctggctgccttcttccggacaatggccacgggcactgtgaagggactccaggagcctggtggctttgtgtgaagccctgagaaaatgtgctgtcctctgttcttgggcttgcctaggggcacagagtcctttagaaaagtctcccagaagggaacagaacacacccaggcccacccctcggatgttagagatcagggtcagtgcccccattagggtacaaagtgcctctccttccatttctcccaggtcagtaacagctttggctaaattaaccctggctggacccattttcttccattttactcctttgccccttcaggtggacaatttgacctttgatggggaagaatatcagtgggcagcagaaggggcacggcccgcatgcattctcaagtcttctctgcctttccccacagcctccctctgcgcttctgggtgaacgtgattaagaa

SEQ ID NO: 3840 - DNA, 2300 bp, Homo sapien
aaagctagaggtttctgctgaccctcagaggtgtgccatgagcctgtaaactgtgggagccaggcccagtcttattcctgccccagagaccctccaaagccctgtggatcagcactctgcctgtggggaggtggttcttgagtctagacccttcacccacattccacattccagataccacttgtctcaggtcactaacatcctaagcctcttcataccttcctaacagactctcctggtcctgctgtgctcctgccaggaggcacccagtcctccagcttgttcctcggacactgtttccggactggcttgcagcctgtgccccctcattcacccatgggaagcccggacccggggcacttcctgtcttcctgtcaaagaccctgagcctacaccctgtgtggaatgtggaatgtggctgcaggttggaggagagattcttccccaggattcacagcccacccagtttctcccacctccccagctaaccaatagtacccttccccaccccgcaacactgcctgcacagcctcgtgtcccagacaaatttccaaggcaggatgggtccaaggcaccatctggtatgcctgtctgctacctgccgtcacccccctccatcttactctcccccacccctcctccagggcaccctgcagaagtttgtggacgacttgtttgagaccttgttcagcactgtgcaccggggcagcgctctccccctggccatcaagtacatgtttgatttcctagatgagcaggcagacaggcacagcatccatgacacagatgtgcggcacacctggaaaagcaactggtaaaccctcggggagctcagcaggaggtgcagcctggagaggcctggagctaagagggatgaggaccaggagatgggagggtgggaggatagcctattctcggctggggctgggtgatccaaagctcctggaacaaacagtgcacatatgctctgcagagcccacacggtccccagctgcctgtgccaagtggggcctgcctggcttgaggcacagcaataggatgcacccttgaattctgcccctccaggttgtgaccagtaccccaagaagagcctcctcccctggctctgagatctctggttctcaggagaagggagctgggggaacctatgcaaagagctgcatttgaagcctgcagcagagcttcacagccagacatcgtggggcattctgagtggggcagttctaaggcacttcctgagatggggaatccctgaattaaactgagacgcccggtgaagttggtcagcaccggagagggagttcacacctgctatagacttgagcccactgacagggaggatttcattgcaaacttgatctcttaaggccaagtgattatcctggcgccatagctttcaggaagcagcaggcagaatgccctgcaggcatgactctctcccctaaagtcatctctgcaaccagaccagcagtgggagaagccctcaggcccctggtatgagactttatcctcatgggttttgaacctggaccacagaccaagctaaggactggctttcaggtcagacaggacccggccaagagctggcatcaaaaggcttcctttgggaaagagcacagagaggggagaggggaggtccaggcatttgggttgggcaggcagcccacgcagctgtctggagttagcggtctcctcagaaaacagagccgacacagatgggcccaggctgttatttgggaatcaaaagtcctagcaaccaacaaaacactttggaaaaagccaaccccagccccatctcttccttcctcctcccgggtcttgtggtcgctgagccttcctcagtctgcagctttgatcacagtggagtgaaacgaacaggctggggtggccctggggttaagagcccacagtccactttgccaggacaggccttccatctgcattccctggacagcacatgcctgtcccctttgctttggagcatccccggcccagcgctgggagagggcacttcaggggaaatcaagagaaagtccagggttatccgcatctctgtgccttctgtgtgctggccagatccaagtaatagaaatggactaccctggcatcgtggtgtggagagagtttccttaaccagacctcaatagcaaatgtccagggaaagattaccagaaactacccaaggctgccagaagaaggggagggtagaagagatgagtcagctctcagctgcagcagcttctcccaggctagaggaaagtgagggatcctgttgtgttttggaagataggcagaaatca

SEQ ID NO: 3841 - DNA, 2300 bp, Homo sapien
cccaagctgctactccggaggtctggcccgcagcagtgggtggagagggtggcaggagtctgaacctggacagagcacctcattatagcaggccccacaagcagcatgagaaggcccactccccagaaggggcacccattcagagcagcctgtgtcctcacgtctctgcagggcagaatctgactttccctcagcccagggagactacagagtctgaagtcacccaggtgtgatggatgagctcagacccttgctcggatctcagctggagtcccagctctgcctcctgctagctctgtgatttctggccagtgttgtaaccactctgttgtttagtttcctcctagacaaaatgagaaaaataattcctatctcacagtctcttcctcccggtgcctctagagctgtgctgtccggcacagcggcccctagccacaggtagctgctacaaattaaaatgaaatagaatgtaaaatccagctcctccattgccctagcacctagccgctttctaagtgcttggttgccacattgcagctagtggccaccatacgggaccgcacagatagagaacattcccattatcgcagaaggttctattgcgcagcactgagctagggatttggacagcctagaaggccgtgccttctgagctcagcttcctggatctgaatcacagcatccactacacatgcccactgcatttttcctggcaggggagagggttggagacctcagtatcccctgagcccaccctctctagaggccgtggggagccgggcacagctttggagtcctctgggcagcaggggctggagggctgcacctccgttcaccacccctcctctttagccttcctctagcaaggtctcaggcttccaggccccacgtggggtgaggagggaggaagaatggctttgctttatgagtactgagcccccatcctgccaatctgagcattagaaactctcattaagaactgttgtatttaaattagagctaatctcaagcacaatgcagggagagggtgctgggaggagccacgggagaaagctacaattttttctgccattgtcactctctcccaggcccagattgctgagcagccctggcaaatgcctgggatttactgcaaccagaggatataatttgcaccacgtgcagggagttaaaatacccctccggcatccccttcactgagggtctgtcacagccgctttgttccttcccaaatccccagatctgtagccctgggatgggaaggggaggggggccagcccttgcatgagcaaatcccctgttggcaaaacacttaagcactgctctctacctgagggctgggatccaagaccccacatgacagcaataatgacagctaatggatagtgcttagcaggtgccaggcacttttcttagcactttacaaatattaactcattcaaccctgacaacaaccactggggttggatgttattatgactgtctccatttagtgataggaatactgaaaccagagaggttaaatgacttgcccaaggtcacacagccaacgtatggcagaatcaggatttgaacccaaggaagtctaaccttgagtgtttttggaggggaagggaccaggcaccttccagataggcaaaacagggtactcacacatgcaagaaagcccagagggactgggaaactctctagttatcaccctgaggccagaagtgagttgggagaaccggttctttatagccctgtgggatagtgaggtgcctttatccacagaccctgtctcagatgcagccaaagttcagagcaccacggaccatcagggctgaaaaggccaacctctccattttcataggaaattgaggcccagaaagaagccacccctacccccaggtcacagtctagttactgggtgagctgggctgggacccaggtgtcctgactcccgccctgcgttctcccatgctccattgttctcttgggagacctcatggcaagcccaggccccaccacggagacccctctgtgaaggactgccccttaccctttgtcccttccccaggacagagtctgtggctgaaaagatgctgaccaattggttcgccttcctcctgcacaagttcctaaaggtgagaaagggagtgagacggggcctagcgtccagggcaggatggcactgctgcttagatcctggccacagggctgcatggggaccccctccctcgggagcaggaacctggactggctgtgctaaagcccttccttccactggcctcgctccgagagaggaaagggaaaacgta

SEQ ID NO: 3842 - DNA, 2300 bp, Homo sapien
gaggaatgtttggcaaacaaaagtgccgacgcagcacggggcaggcagcgtccagaggcctcttgcttgggagtgatttgcttattcatagaggagcctggtctagggaagctagactgggaccagcagagaggaagatgttggggtgaggctcaccaaggctcggtgtcttcttgcagaacccaggaattgggaccccctggctcagctgtacccatttcaccacacccctcaacctccccatgcctcattgtaccctgctggaacatgaaaggggcattaggttcataaggggctgctgaattgcaccacaaaaagggcaggaatgtgtactccctcccactacagcataaaggccgcagtgagccgctttgtttaaactcttaaattccctttggaaaggaagggttaagacttggacttgaagctctgacataatctctatgcaagtgtcagctttttttgcaatttcacacacagtcttgttttctgaacatgaagctcgtgtgtgtgtatgttggccagacgcataacatgtgtggacctgccaggacagtgtgtacttgagcagtctgagttctcagagatgccctggctgttgccgggaccccactgctcccaaagctgaaactgagctgtgctgggtgggagccaggcagagagggagtaggagtctgggtttttcttcccaagccccacgtgggccctttagtggtttctgcagtctggctgctgtcttgggcagccccagaactaaacctccacaggagagaatggcacagctcatgctaaggagggactggaccagcccagccaggattttagttggcaccagagacctccaagagaaaaaagatatcatgaactctgtgtcaaaaccaagcttctgtcccagtgcagggttaggggacacttggttagagaagagagagaggtcctacataaaacatttgaagaaggctgggcccagtggctcaggcctgtaatcctagcactttgggaggccgaagcgggcggatcacctgaggttaggagttcaggaccagcctggcaaacatggtgaaaccctgtctctactaaaaatacaaaaattagctgggcgtggtggcacgtgcctgtaatcccaactactcaggaagctgaggcaggagaatcactggaacccgggaggcggaggctgcagtgagctgagatcgcaccactgcactccagcctgggcaacagaacaagactccatctcaaaaaacaaaaaaacaaaaaacatttagagagttgcagaatcctatttttcatcagtattcaatcaacattaactgaacacctactacatactgagcaaagtgctcatctcgtaccacttcctgctccacactctacacacacacacacacacacacacacacacacacacacacacacactatgctgttctgtcctacttttttctcaaacatcccatgctcccttgtccccaggccttttggtgctgttccctctgcttggaacttgttcccttccccctccctctccttatctaggtaagtcctactcattcttcagattaaatttcattcatttcttccatgggaaaacttccatgagtcactcctaccctgcttcaggccatgcacacacacatacacacacacacacacactcatgcacacacacagacactcctagagtagctggtacttccctaccagggcatttatttttcacatctctgcatgcatccaacagtgctgtgtgccccccatgccccaggccctcttccaggactagattgtaatgcttctttgtcttccctccagactgtgtctgccgctctatagccccacctcctagcacagtgccagcacaaactagaaactagatgcccaaatagcgttggtgaatgaattaatgaagaagctaaaatgccccccactcccccaaaatttcactgccctttcctggagggctttcccatggaatggagacaagcaagtaaacccagtgacgaggcacaaaagcagagagagggtgggagagcggctgtgggcccctgggctctgtgccaggcactccgtgtgtgaatgctgcgctctggatctcttaggtgtgtaaagttgtgaacacaaccaccctcacctgcctggcaccctctctgaccacggactaccgccctggcctggacactgtggaacgcccagatgagtttggatttgtctttaacaatgtccaatccttgctaatttacaacgacaccaagtttatctactaccccaacccgacctttgaactgcttagccctactg

SEQ ID NO: 3843 - DNA, 2300 bp, Homo sapien
tataatgcatagagctgtccactgacaagtcatttgcatatgtagatatagatagggctgtctttctaagtaatattccagcaaaagtctccttctaaatagggctgccaggaagataagtaccttcttgatttctttttgctgttttcaatgcaacaatagcactattacgtatgcttttgtatagcaaaaaataaaatagaatccctgccctcaaggtggtcaaattctggagaagcgcaatgatgtatagataaatcacaagataaggttatttatttgtacatcagagcaatgctgtagaagagatgtactatgtattcaatgattaaagtaactcataaacgcataccaccaggaagggacctgtcctggttccctccctaattggggtcactcgggggactcaccctctccctaacacaagaatccagagctggtttatccagagattctctagtgaagagcagccctttattttacagaagaggagatgagaggtctgagggggcagtgactccggagaagaaagggtataccaagccgaatgtggagaagcagacaatgattgactatcagtagtttcctgacagccatggggagcagccagcctgggttcaagccctggctctactgcttactgccatgtgaccttgggcaagttgcttcacctttctgtgcttcagttacctcacctgtaaaatgggcataattatggcatctgtttgaagattaaattaattaatgcataaaaagcactctgaaaagtaccaggaacctactacccgcttagtaaatggtagtagtagtaattatatttttacagttgtgcccccatacatcatcatcaggccaagccctgcaggtcatgctttgcaaacagccacacctaaaaaaagcttaaccaccctgccttgcctctcagccctaccttatttaagctgtgttgaaatctaactaatatttttgccgtgtttttcttattttagtttacaaacatggcctcagctaatacaccagtcctatgagataagtattattgtccttgcctttttttaacagataacaaaactgaaattcaaactgactaagtaatttgcccagggccaccaagctgtccaacagcagggctgggactccaccccacacctctgaagccaaatccacacctcttcagcttcctgagacagcgccccctggctgccctgtggctgcagaaggctcctcccctcctgctctccccacacccggctcccagttaggaaaagggttcagaggcggctttctgggctccaggaggccagcacagactcagtaactcctcatttgacaccttcaaggagattggagtagtgcactgtttagtttaaaaaaccaataaaggaaagcaagcactgccccgggccctacatggacagtcaggggaaatgcctctgcaggtggtcagaatgcagggagaaaaagcacctcgccccaggaagttaccgcggagtttctcctgcgcagccagccaagcgcctcacgagcatgatctcccctcttcacaagaacctgggaagacaggtattatctcccccgtttgacaaatgaggaaggccaggtgcagcaatgttgagggatctgagctaggtgtgtctatgacttttaggaggcatagccgggagtgaggagcctgtctgtgtggctgcaaagctcctggactgctcgccctcccctagcaccaggagagcccatgcagagaccccagcgggagacatcatgactcctctgcatattttcttacccccatccaaagctcgtcggtctggcaaaggaaaaaccttttcaaggagggcagctgcagaacacatgtgaggcattgaagccccgattcagcttctctggtgctgtttcaagtgtgaaccatgcaaacccatatcagctcaatccctggccctaagtaagaggttctcagactcaagaaagcctcctgtgttccccatcttaagtcttatccagccagacacagggggccccggaatgacaccccagagctctgcagcctgcttttcagctccttccaggagcgctcccttgtgttccctgcgttgagtttcagtaattgaatgtgttttatttagaccataacatttagtgccactttggatttccaattaggcttcaatcagatgccgagagtctgattcgttttgttgttttgatcaacacgaaagatggcaacatcagaggagccgtcatgaaaagttactgccatccactgatgactaggacggtttctgtagtgtgaagatgcaggttca

SEQ ID NO: 3844 - DNA, 2300 bp, Homo sapien
caaagccaacccagagggaagagtgaagtttcaagatctgggaaagaagcccagcaaaggagggagactgctattgtgtggggagaggggagagctaaacctgactcctgctctcaaagcctccagcccaggccagccaagatactcatcttggcctgccgctcataagccttgtccactgtgcgcgtgaatggaaggaaatgaatgtgcccccaaatttctgtgggttcttccaaactgatgggcccccaagtgactgcctcaagctatgactggcagtcccagtcccctcaaactgatgctgccttcatgtcccttgtgcactttctactggtgtgccactgtcactctaagattcctacaggggacctgttcagatttccattgcccacttcatggggctctcatttctagacccttactgacctagagccccaaatcttttatccaacttcctccccaccattatttctatccctcctgagcagagctgagtttgagtaggtagctcccactagggcaagggtcattccaaacaggtggacttttttcggggatctaaaatggtagtttctggtgactctctgggcatctagaccatgattggcattatagagactacctgtgggatggataaaaagggctagaattttctaggatccctacctcacttgtggggtggggcaagaaagagcacatggaaggaaacattctcaaatggttcataaggagcctctgggaccctaagcaaactcccatttcaacccccagcactcctgtggtgctcaaactaaggggctggacccctgctgggcgatacaccgcaaagggagccccgggagatgaaacacttagacccattcagtgcctaggaatctctccctgagccttatggaacccgcgcaaatgatgttttcccattcccctgatctccagtccccgatcggaagggagagccggcggccaccagggaccccggcactggagtgaacgcccccaaatcgatcgctggccagtgtggctttgggctgtctcgctggtgccaccgaggccctctttgggctccagctctcaggacagccttgccgccccgagctccccaaagccgcagagcgccggcaggtgcgcggtggaggcgcgccgcggagcgctgctgccgccctcagcccgcattcgggaagccggcgggctgccggccgggaagccctcggcgggaggcagcggctccagtgagcctgcgatcgcgcgcacgccgcgctccagcccgcgaaagtggccgagcccacgcggggactcgcccgccgcggccaagccgggtcttctggggccgggaccccaaagaggcgggcgcgggagaagccgccacgggtgtgcgcgcctgtggggagagggcggagggcgctgccgactccgagcgcccggcccagccgccgcttacccagctcggcgacgtcggtctgtccttccgtccccgctcggtctacctcggccgccgccggctgctgagggcggcgcgaggcccctctccctgcccgcagctcggaatcagggagacgaccaaatccacatggagtccaaattcattaaaatccacgtcaagccaccagacacttatctgtattcctgaagtcgctcctcggtctccgctccgcgcgcccctcagtcctccgtcgccccgcagcagcccggctgggcgctgtcgccggctctcagggggcacccggaggcgccgagggggcgtgtgggggcggccggcggtgtctctcctgaggaagaagcagagccccggctgtcttcagatttttccagcgcgactttccgggctcctctgacatcagcaatcccggcgcttccttcccttcttgctctccggttcgttcacagtcccatttcctccgggagcctggctttccagatctatttcgaggtttgctccgctggctgcggcgctcgcacgccctaccgctcccaagctctcggggtctctctccggatcgctcgccctctcggctgaaaaattcccagcaactgccctccgccgccctcccgctccagtctggcgcggatgccgctcctcccggcagctctggctcccgcggtggcggcggcggcggcggcggcggcggcggcggaggagccctgagcgccggcctccctatttcaccatgcagctcattatcatagaggccgcgcgcgttaaccccctccccgccggccgcgtccgcccgggctggggccgcgcccgctgctggcaccgcccgccaccgccagcaccctgccccctcccccgcccgcgcgga

SEQ ID NO: 3845 - DNA, 2300 bp, Homo sapien
ataataacacagggtaaatatgataatttattggtgtgttaccaacaatgaatgctaaagaagtttgaaggaaagaacaggtatggatcaggcaacacagcttagacagattctttgtggtcccacaggacaaaactagcagtagccagtgaaagttacaggaacacaaatttcagctaattacaatgaagaacttttgaagaattcgctgatttctgcagatgttggagtaaagcctagatcccccagtcctgtgttgaatgtgcgattgttcgagatgactggttagtctagatttccttttcttcttcctctctctctctcttttctccggctccctttcttcatccttccctcccttcgtttcttctgccgctactgctctaagaatttggtgcaattgcttttaggtattcgcagtgatttttgttgttttttagatttataccactgaggactgtggccacgagagggcagtagaggaagcttatcagaatacttggacaggagtaaactcgtgtgcgctctaatcgcgagcagggactacgcagatcctgcgaactcgctggggtccagcttgcaggccgcttccggaaagccgtgtctagaggctgcggagttactgagactgtgtggcgaggaatcagtggccttgagggcaccgagacattgtcatccagaatcccgaaacctctcaccttaggttattaaaataagttatcttattgccacccctctgattaccctgccagaaagattctctgaattggatatagaaagctcttctcccgtccccaatgcccccatgcaagtcgggacttaccagatgcccaggatccctatcagggctggaagtttgagattcaattcagagcaaggttcatcttctcattgcaataataataataacaacaacttcaagccttatttgacagcttgttggcctttttctttttttaatttacaagaagaggaaatttgctcccacaaattccaagactctagtctcaaccctaccagacaagccccgttcctccccactcacccctcactcaaattacagatgaagagggaggtgtgcaggatgtgtgcggtgacaggtgatgcgaatgggggggattccctgtccctactgccctcacccactcttcctgtgttctgagctcccccctaaccccaacgctagaccttctattcccccgggggccaagccagctgggctcgcaaggcccgactcgaattcccgggccctggcagcattttccttgcccccttggctacttaaggtggccgatgggtccgggctgagctgggcgcaggacaggcagccgagcggcctccggatgccaaacctgcttctcctttgttgacagcttgcggaggaggaagtccgcgcgggcgggggagggggcagggtgctggcggtggcgggcggtgccagcagcgggcgcggccccagcccgggcggacgcggccggcggggagggggttaacgcgcgcggcctctatgataatgagctgcatggtgaaatagggaggccggcgctcagggctcctccgccgccgccgccgccgccgccgccgccgccaccgcgggagccagagctgccgggaggagcggcatccgcgccagactggagcgggagggcggcggagggcagttgctgggaatttttcagccgagagggcgagcgatccggagagagaccccgagagcttgggagcggtagggcgtgcgagcgccgcagccagcggagcaaacctcgaaatagatctggaaagccaggctcccggaggaaatgggactgtgaacgaaccggagagcaagaagggaaggaagcgccgggattgctgatgtcagaggagcccggaaagtcgcgctggaaaaatctgaagacagccggggctctgcttcttcctcaggagagacaccgccggccgcccccacacgccccctcggcgcctccgggtgccccctgagagccggcgacagcgcccagccgggctgctgcggggcgacggaggactgaggggcgcgcggagcggagaccgaggagcgacttcaggaatacagataagtgtctggtggcttgacgtggattttaatgaatttggactccatgtggatttggtcgtctccctgattccgagctgcgggcagggagaggggcctcgcgccgccctcagcagccggcggcggccgaggtagaccgagcggggacggaaggacagaccgacgtcgccgagctgggtaagcggcggctgggccgggcgctcggagtcggcagcgccctccgccc

SEQ ID NO: 3846 - DNA, 2300 bp, Homo sapien
ctcagcagtcagttgctctgcctccagtcctaactggcttctgaaaaacagttctggtccattcattccctgtctcgagacttccggagcttcctgacctgtgaatgaaatccacaggcccatcacaagatggctgcgctctccagtccccggcaccccaggctgctctgaacatgtgagagctcctccctcaaggcctgaattttcgcaggtcttcatcacactcagcccgccatcattttttcagattcagttccaatatgtcactctgtctgtagagccttccctgaatctcacagacaaatgcggcagttccctttgtgggggatattcatcatgtttttcctcattggcctatgtttttgcctcttcttgtagatgtccatctaggctgggagctcctagggggtaaacgcagcctctcactcacctggcacagagtcgatgctcatggaatgatacgtgatggggagagtgagtaagtgaatgaatgaatgaatgctattctggaaggaagagggagagagggagcagggaaaggtcagaagggggcccagagtcttcagcacacaatgtgggtgtatcactgtggccaggaacaattcgcttctctgcctgcattactttttgggaaatgggagagctgaggctcagtgtaggcaaactgggtccagtcagcagggaagccatgagctccacggtttaggggaggagtccggtgcttaaggaagctatcacgtggaagatctccctgccctcctcctattggtctgtattggtttttcttcttcaccagtggaggcttttcttctcccaggaagaatccagaatagttcagacaagcttcaggtccgccagaaccggggaaaacaacgtgtagggtttgttttaaagggcttttaaatggggtttgggagatccaggtagattagaatcttgactctgcactggctgtgcaagacagaaattcacctttcaaaacttctgttccccagtctatgcggtaagaagtttagattagctgatttctagggagattttgggcaggcatgattcagttccatgaagggctgtgggacaggactgcactaagaggtcctatagattggattcttcagttccctcccttccgctggagaatagaggaatctgccttcgctgcacactagatttacctggagaacaaatggaaagcaggccaggatcctgggtgaaatgtggcacatttgaggagacttcaacttcccttgccctccaggtgtgcacttggaagggggaacgagggagggggaagctggcaagatgggccgagagataggggaggggcaggaggcggagcccaagttgcgcatggaagcgggggtggggtaaaataatcaagtttatagaccgccctctttaaagttactaatgagcttgccttctctttccttaatttcccctcgcagtgtggtcttttccccacccccagacatgaaagggaagcaggtcacaaagcctttcggattataaaagaaacacttgcttctcacaaggggagcagcagacttactctgtactaaatgccaggataagcctctggctgggcctcgactgtgaccctccggcctctttctacagctctgcctggatggactggcctatctctgctggattcccgaagtgcattgtgtagagacagcaactcaggtcaggctaaaagctcaagcaagcaagcgcgcacacacacgcgcgcacacacacacacacacacacaaacactcagcttccttaggacaagataaaatcttagcattcccctctccccgattaggtaggtctctgggaggactaaggcttcaggtgcaaggctcagataacctgcagtgtctctccaactctgggatgacaaagacctcacttcccttttctggtgttcacacaacaatgagaaagtacgggtagcctgcagaaagacctctccattcatggtcccccaggggtgtgggttctgagaggtgggaccagctgccaggccctttctccattggttgagttcagcaggtaacctgaagctttgctgagaggtgcataaataaagagtgaaactagtaccacctccttgaaatgggctgagtccctcttgctcacccttgacttggaaaaaccagtttctcttttattgtctgttactaatctctattctaaaaattcagctcaattctcaaccatactccaaactctctcttttccagctacctttactccctctccttcaattccactttcctctgcttactttttttttttttctgacaggg

SEQ ID NO: 3847 - DNA, 2300 bp, Homo sapien
gacaatgaatgtttttgatgaggaagcagtatgttttattgaggtaattctagaatgaaagttacattgtagactgtcttagtctattcagggtgctgtaacgaaataccataaactggcaacttgtaaacagcagaaatatatttctcaccattctggaggctggaaggcccagcaaattcaatgcctgatgagggttcacttcctaattcgtagaaggcaccttctctctgtgtccccatatagtggaaggggcagtgcagctctctagggtctcttttataagggcactgattccattcacaagggctccacactcatgacttcatcacctcccccaaaccccatgttttaataccaccacactggtgattagctgtcagcatatgaatttggatggggacataaatattcagactatggcagataaagaatgatcatagctaaaatttattaagtgcttaccatgtgcaagccactgttctaagcagctgcattctgtctcgctccaccctactagtgtgtgaaataagtttaataattatgccattttacagatggaaaaactgaggcatagaaaggttaagccactttcccaaggccacatatctgtcaatggaagacccaggaatccaacctagaagtcttccccagagccacttttaactatcctactgcaccatctcaccctatcctatcacagttctacctgggtgggaggttgaaggcctgaactgagatcatagaggtgaatatttgcttgtatttgcataaagaaataccataataaaagtggtcacctatagagggcaatgtcagggtcaagggacagataacgagtagaagggggtaacacatctcaatgtatgccttttaatatggtcattttcttgccaatatgaatatgttatttattcaaaaaacaagatgacacaaaagaaatggtacaagttaaaagctaatttcaaggaacaaatggaagtgcataagagctggatgggtttggaagacaaattaaacaggcaacacaaacaaagcaaaccctggagtttctcagttgagtgtttggaagatggtagctcattagcctagttggggaaaacaggagagtgggtttgagggtggccataacacattcagccttgtttgtaggtgacagtgggcatttggatgttgaggttgagcatgataacccaggtggggtgttgactgaggagattcttatgaagatggtaatagactctgtgagtagatggtaaccttaaggagagagtagagaaggagaaaacaagagagcagatgacagagtttaaagaaatctgcactaaagggactgccccagagaagctaagatggagactgtgaagccttggtcaagggccaggttggagagatgagtacaggaaacagagggagcacagagtttccggaggaggggaatgatttcctggggtctcataggttaggactgagacaggtttggggaccagaatgctgagcttctggaggaaaagagacatatcaaagatactgagtgagaccgtccaactgaggggccccttttgggacatccaaggccctttctcccagttctgtaagagataacaagcaaggtggacactgtcttcagtccctacatgtcagccagtgtagatgttctgtttttcagggaggtgtttttagacaacatacaccagcacctgaggggttaaaaaggaaactgaggcagacaatcctagaaagcttctctgatttttttctgtcatcacccattcaggataatgggaacttataatttgatgtttttgtttttcattcttccgttctgtctttccatcacacacatcaatgcaaacacaatttcacatacacatgcacacagactcacacacacacacaccaggcaaaaatgcacaagcatttttctggataagactcattactgcacgctgggagggagggtgagcagagccgaggaaaggaaagagagatgcaagccaccctagctacttttactcccctttaaggctgcgtggttacggtcctgggaaagaaaactcctgcattcctcccctttaattgggtttattgttaaagcactggagcagctaatcctcacagacctgtaggagctggagtgggagctcaagcaggattcttcccgagtccctgggtaagacaaccctgcttcttttcttggctttagagggtctccttgcttaatgggaagcgtgcagcacctagtgagtggatttgaagagccactttgtaagcaacttgggcatttatttcagccccag

SEQ ID NO: 3848 - DNA, 2300 bp, Homo sapien
gggaaagagtgtcctgtgagaccagcctctcaatttggacctgccacttccatttacagtggctggaagcccaggatccctgagcaaggagcccacaaaagaagctgtgttctcaggcctggcaggaggccagggaaagtctgttttgactttgtcagtcaagctatgcttcagcctttccttccaccacttgtggtcaggtctgttttctggccctccaggcgggcattcctgcctagggagggaggggctaggagactaaccctccccacaggtgggaggagtgactcacaggcagctacctgtcccagggctccctgccaaccctgtggagggagctggaggcgagccatttagttactctgctcatttctcttaagctttccttggatgagttgagctttgaatccttcctgatgaaccttgccttttaaggatcctccaaatgccccaagaagctgggatttttcattttttttttcactggggaggggaatggtgctttccagggtcctggatgtttgagtcttctcaccttccagcccggtgatatgtctggagctttaactctctatataagccctaatctttgtgttctctgcctgatcttctgtctggggtggtccaggtcacaagaagaagctgacccctgctggctttgggaaaatgctgagttcattgcctggcacaaatgcaagggcccttccccaccctgtgaattctggtctctgatgatcacttacatgtgccttgtgctttctgtttgaggggccccttgcagcccccacaggcaggtgggcattgtggagctcactacaagaactctgggacggaccgaccaacccacttgcccagtcccgtcctgggaggtgggggtgcagtgacgacagatgggtgtgacggctgccagattcctgagacccgccctgcggtggggctacacccagccagggagtctccagaggtgaggctgttgtttaaaaacctggagccgggaggggagacccccacattcaagaggagctttcaggcgatctggagaaagaacggcagaacacacagcaaggtatgttacctgtctttacctgcctggtgcgggccggatgcgggaggaggactgtatctctggatgcctggggcctggtttcagggcctgatttattcctcttcctgggagctcactcaggtgagctaggttaaaatgtctgctacagttttgatttctttttcacatttgataagcacctcagtggcttagaagaaagcaggttcagatccggggttgagcacaaaagagaagtgagaagggtgggctggcctggctcagaatgcctacttgcagggggattttcagtcaggggtgggaaagctgagaaagcactggatgaaagtcagaagatgggtctctcttaggccatcgttagctgtgggaccccaggccacatgttccctccctgggcccatgactcttttaggagagggattggaaggaatgattttgaagcattaggatctataatttaaagatgccagaaatgtcctcaatttccccccccgcccctgccttgccaagcccccagccctccaccccagccaaaagagtttgtggctgtcattggaacagagtgaacatccaattcaaggcagaagggtcactgcatgagcaagggtggggcatgtttccacaaggcaggcctgcctctgggaccccacggtggctttcgagcatccttccccagcctccttcagaatccctgctttgtggcctcccagccccacccctcttgtcgagccccagcccatcattgaagacattttgggttgcttccctttcagaagaaaccctcactcacttgttaaagacagccatacatctctccctgttgcatcccagaattgtgggcacagagcctcaaactcaaagtggccctgaatggtattggaggccatgcccgtgacaggagaaggtttgcctccaggccgtcagccactctgactcattcactttgggcggggctgggttgaggctgctggtctaggccctgagaaaagccagccctctctcttggggctggaactaggtcttggccctttctacagcttttctcctgcaaagggtccagccttttcctgctccccacgttgtccttacggctgtgtggggtagggcagggtccacactccttcccatccattttagaggaggaagctggagtctgggaagggatgggattttcccagggcaccctgtgagtcacatgccacttgagacaagggtctagagctccagcattttccaa

SEQ ID NO: 3849 - DNA, 2300 bp, Homo sapien
ccccacttggaaatgatcagtgtccctcaggagtgaggctggctgggctgctcttgggggtctgcataaacagcttcctggactttgccgggagtgtaggggagagccaagcacagcaattggcatgtccctcctgcgaagccaaaccactccaggacctgcccaagcctgtgaagtctgagacaccgaatgtgtatttacctgggctcatggcctcagataaagggaggaggaggaggatttaaggggccccagctactcatggtgaggcccaccgcacacctgccctgccttttctcctctgaggatctgggattgcaacacctgctctcttctgctgagttaattattaatgagttctttgtcacatcctctggtgatgggcagagggcgaaagtttcatgagcgctctgagttcagggagttggggaagtggagagaaagagaccaccaggtgggagaactgaaaacacaggtgtgtcagagtcagagctgacctttctcggtgggggacttgagggaggtctctctgtgttgaagggacactgcttctactgaccttacttgctgagttgagctagatttcactggaatgcttacagggggcaagactctaacatttattggactatcaattatgcatcaacttacatcaacaactcactgcccacttgctaattacactatttcttctgcctacctgaacttatgcttaattcgaatctgagggttagaaatgcccaatttaatccacaaaattctacatttcccccttaagggtcttcaagccaatttcttggacataaccctccaatggtggagaactttctgtttaggagacactaacaaagtggaatcgtagttaagaagctcctttaaatagtagctttgaggtcctagcattccaaaacggtgccagtgcaggctctccagggccaagatatggactggctgaccctccaggtttccctaaaagctctctgaccctaacctgggggaaagagtgtcctgtgagaccagcctctcaatttggacctgccacttccatttacagtggctggaagcccaggatccctgagcaaggagcccacaaaagaagctgtgttctcaggcctggcaggaggccagggaaagtctgttttgactttgtcagtcaagctatgcttcagcctttccttccaccacttgtggtcaggtctgttttctggccctccaggcgggcattcctgcctagggagggaggggctaggagactaaccctccccacaggtgggaggagtgactcacaggcagctacctgtcccagggctccctgccaaccctgtggagggagctggaggcgagccatttagttactctgctcatttctcttaagctttccttggatgagttgagctttgaatccttcctgatgaaccttgccttttaaggatcctccaaatgccccaagaagctgggatttttcattttttttttcactggggaggggaatggtgctttccagggtcctggatgtttgagtcttctcaccttccagcccggtgatatgtctggagctttaactctctatataagccctaatctttgtgttctctgcctgatcttctgtctggggtggtccaggtcacaagaagaagctgacccctgctggctttgggaaaatgctgagttcattgcctggcacaaatgcaagggcccttccccaccctgtgaattctggtctctgatgatcacttacatgtgccttgtgctttctgtttgaggggccccttgcagcccccacaggcaggtgggcattgtggagctcactacaagaactctgggacggaccgaccaacccacttgcccagtcccgtcctgggaggtgggggtgcagtgacgacagatgggtgtgacggctgccagattcctgagacccgccctgcggtggggctacacccagccagggagtctccagaggtgaggctgttgtttaaaaacctggagccgggaggggagacccccacattcaagaggagctttcaggcgatctggagaaagaacggcagaacacacagcaaggtatgttacctgtctttacctgcctggtgcgggccggatgcgggaggaggactgtatctctggatgcctggggcctggtttcagggcctgatttattcctcttcctgggagctcactcaggtgagctaggttaaaatgtctgctacagttttgatttctttttcacatttgataagcacctcagtggcttagaagaaagcaggttcagatccggggttgagcacaaaagagaagtgaga

SEQ ID NO: 3850 - DNA, 2300 bp, Homo sapien
gctccagccacagtaccacacccctttaatcttagctggaccctgatctggcctcaggctctattttaggctacttgactgaacaaattgggttctgaagctccagagcttgtgcctggagccctggagttcttgggggactggatccccacttggaaatgatcagtgtccctcaggagtgaggctggctgggctgctcttgggggtctgcataaacagcttcctggactttgccgggagtgtaggggagagccaagcacagcaattggcatgtccctcctgcgaagccaaaccactccaggacctgcccaagcctgtgaagtctgagacaccgaatgtgtatttacctgggctcatggcctcagataaagggaggaggaggaggatttaaggggccccagctactcatggtgaggcccaccgcacacctgccctgccttttctcctctgaggatctgggattgcaacacctgctctcttctgctgagttaattattaatgagttctttgtcacatcctctggtgatgggcagagggcgaaagtttcatgagcgctctgagttcagggagttggggaagtggagagaaagagaccaccaggtgggagaactgaaaacacaggtgtgtcagagtcagagctgacctttctcggtgggggacttgagggaggtctctctgtgttgaagggacactgcttctactgaccttacttgctgagttgagctagatttcactggaatgcttacagggggcaagactctaacatttattggactatcaattatgcatcaacttacatcaacaactcactgcccacttgctaattacactatttcttctgcctacctgaacttatgcttaattcgaatctgagggttagaaatgcccaatttaatccacaaaattctacatttcccccttaagggtcttcaagccaatttcttggacataaccctccaatggtggagaactttctgtttaggagacactaacaaagtggaatcgtagttaagaagctcctttaaatagtagctttgaggtcctagcattccaaaacggtgccagtgcaggctctccagggccaagatatggactggctgaccctccaggtttccctaaaagctctctgaccctaacctgggggaaagagtgtcctgtgagaccagcctctcaatttggacctgccacttccatttacagtggctggaagcccaggatccctgagcaaggagcccacaaaagaagctgtgttctcaggcctggcaggaggccagggaaagtctgttttgactttgtcagtcaagctatgcttcagcctttccttccaccacttgtggtcaggtctgttttctggccctccaggcgggcattcctgcctagggagggaggggctaggagactaaccctccccacaggtgggaggagtgactcacaggcagctacctgtcccagggctccctgccaaccctgtggagggagctggaggcgagccatttagttactctgctcatttctcttaagctttccttggatgagttgagctttgaatccttcctgatgaaccttgccttttaaggatcctccaaatgccccaagaagctgggatttttcattttttttttcactggggaggggaatggtgctttccagggtcctggatgtttgagtcttctcaccttccagcccggtgatatgtctggagctttaactctctatataagccctaatctttgtgttctctgcctgatcttctgtctggggtggtccaggtcacaagaagaagctgacccctgctggctttgggaaaatgctgagttcattgcctggcacaaatgcaagggcccttccccaccctgtgaattctggtctctgatgatcacttacatgtgccttgtgctttctgtttgaggggccccttgcagcccccacaggcaggtgggcattgtggagctcactacaagaactctgggacggaccgaccaacccacttgcccagtcccgtcctgggaggtgggggtgcagtgacgacagatgggtgtgacggctgccagattcctgagacccgccctgcggtggggctacacccagccagggagtctccagaggtgaggctgttgtttaaaaacctggagccgggaggggagacccccacattcaagaggagctttcaggcgatctggagaaagaacggcagaacacacagcaaggtatgttacctgtctttacctgcctggtgcgggccggatgcgggaggaggactgtatctctggatgcctggggcctggtttcagggcctgatt

SEQ ID NO: 3851 - DNA, 2300 bp, Homo sapien
gagctggtgatgtgcactaacacagcaaatcacaggaaaggggaaccccaggtaaattacagccttctgacctaggaagacgtgtggtttgcgtctctgagttacagaaacacaggaaatgcttactggaccagtcaatttcagaattttgggtcccaagctaggctgactcaccttcagaatggaaaccacgtgacagcccttatatcagggcacacatcacatgctcttccagaagtcaatgggtttggaaccctcacagatattgggaaagctcactaatcatttctgccagttatcagaggttgctctgaaactataaggaagattcaaagaaaatgccaagactgatattaaacttggcaggaacccttgttacagaattttcctgcctgacaaggttaaaagaacaataagcaggaaacacagtcctccaggaataatcaattctatttggcccctggtcaccttcactcagactaaattctaaaacatagaatttcaaataagctatttagataaccttgaccattctccacacacaagcccttgcctgaactattaatagtcaaggcaaagggtagttgttattgctgcctttttaaactgaatcatctgagaaattgcttcagacccccaaagaaagattactgttaacaattcaaaaactaaaatatttgatccctgagacagccttttcccccgacccgcccttcagggctcagtccgaccgactgcaaaggctgttgcaagattgcatcactgacctttgcaattttctggccagtttgatttccccttctttcccctgccccctccctttctctgcttaaaggcctttggccaatttgcctctccttttccccaagtttgctaaccctttggccaatttgcctctctttttccccaagtttgctaactctagcatatccataaccaaagccaaactagaacgctccctcagccccaggtgattacagctaaccctggtcaaaatcaatcctacatcttcacacgtccaagagtactcacactctggattcttacctaagctgtctactacacgcccttctgcccacaaactgcttcaaagctgaagttgagctggagcagtgaagttgtacccccaaacccaggagggtggcagagaattattgaggagagcatgaaatacttccattctaaaatggcagatgaacttctaccaacagccccttccatacttgaccccctacccccaagctcccaactccacttctcaagtggaagtgagaacaatttgaatttgaaggctcttccctgatacacggaagtacataaggaaacagctcgcaggcaaagagactaatctctctctctttctctctctctctctctctctctctctctctcacacacacacacacacacacacacacacctctgtgcataaaagcaccatcaatgaatagttttctatcaactgactctagttatacatgcatgtacctctaaataaaaccaaccaggcaggaaagaaacaatattagcacatattgctttatccaagcgtaacctgttctgtcctgttacccagatccttcccccttgccttctcctctctgatccattgccacacacgtgggaaggtgacaacccttccgaataaaaatgaaagctttcttctttagatggaacccccaaattccctcattatttataatgtcaggctgtcctggacaagggaagctgtgcacccgctgacaccagtaagaaggttgccgccatgtcagagatgtccgcggacacctccctgggctccgggtcctcccctgcgctcgcctggagtgggaccttcgcgtgcacactggccttcccacgcgccccgctgcgatggcacccgcgccgggccccctagctcacacagtcggagcgtgctcagcgcgtggccacctcctgccaggtcccagccgggttccaccccctccttttcccctcctcttcttcctccccctccgagttcccctggctctgaccgcgctggcctgggccggagagcccaggaggcgtgtctcagagaaaagatataagcggcccccggacgctaaagcggtgccagcggcggagtctccaactgggagagctgcagctgccgagaggaggagaacgctgaggtcggtcggaccaacggacgcgctgaccgctgccaactgcagctcgcgctgcctcctgctcgcgccgtgccactaaggtagtccgcctttctatgagccctccccaagattagctgggtgcggggtggtgggagccgttctttggtg

SEQ ID NO: 3852 - DNA, 2300 bp, Homo sapien
ggaggcccagaaaaattaggagacaaagccccaaagaggcaatagtcagcttctttcattggtaagctaaggcttcaaaataaaattttaacttgagaatggtctctctcaaagactctgataccacctaaaacctaccctcctttcatttctctttctactcagctttacctgaccttcaacatgagacaaccgtttcttctaagttttctctgaaaaagagtaatcacattgtaaaactgctaaaccagaggggagccctaaaaagctgaatttaaaccctggcctggagcaaaattaaaagttatcatgaaagattttcctaagcctcaggggtggttgagcagaaattagttaacaattcaggattttattaggtacttattgttctggattaaacatctgtaccaaatgattcagttaattgttagtccatccaatagagaaaaaaaattataagcagcagggtaagaaaaaaattaaataactcagttgtgcaaaatgaaaaacaaacgccttaagtggacaagaaaaaccttgaaaatccagtacaaaaagcaatttcaaaaaaatctttcttttaaaagtatgttagacaaagattaaaaattgtaaactaaatgaaaatgaaaagagacttcagaaaactttcaaagagcattctggagtacactcaacagctgaaataaaagaaacattgtctttatttttttctattaaagggctcaaatatgaattcagagatttaatgagaaaaaagtaattgaaatatgaaactgacagcttagaaaatatccaatacatagctagatattttcagagagctctagaaagtaaataagctagaaatcaatagaacgtatggttctctacataaaaaaacttgccccgaaataaaaacaaagccaaaaagtcttctattttctaagaattgggaacatatagagaggggtacttgtagatattgcaagcaaaagtgtcattcaaagaaccaatgttccacattggctaagtaacagaaagatgactatccaaaatctgtctaatggtgtttctccaaaggagacattagtacccaacaattacagtccttcctcggagtttgtgtccccaaatctcagaggggccagtcgctatactctccatcagggcatagctacatctagcatggcttaccactctatccccagcctctagcccagtgcctagcatagagtagatgcttattagatatctgttgaacaaatgaagaaatagaggaagaaagtacatttttgttttgacatgctgtagtcccttccttagtccagagatcacaaacctctgaattgggatgtgactctctctgtcattaatcggcaagaatcatggtagaattattgtccctacttacggattctctttcccttatacatcccattgcagattcctgtcttccctttacatccactccaacatcagctgatgcagtcactaaaatggtttataagtcacatatgagattccctaaggagtttataattgagaaatgtgtggacacacaggcctcacagaatgcactggatcactagagtctctcctggtgaaaagggaaaacctgcccaaatccagtttttgtttcagtaacttcctttgagacaaagtcaggaatctgagagtaagcacctgctaagggtgggacaggggctctgtctggtatgcctctcccatgttaagagctaacaatagtaatggataagtctccagggcaaccaggaccacttccaagcattcctgtcttgggctgcctcgagggctcctctgtcctttggggagtactgattgatgcctgatgcccagaactggcccactctggcttctctttggagctgtctctgcaggcgccttctggctgccagctcggtcctagcataagggacttcttccttggcctgggtttcaccttcttgtatcaggtggcagaccagctggtttcagtcccaaatcaggtcttctgactcctcccagaaaccaaccaacttctgagcaggaaatcctgcccctccccaaagagtgggaaaccgcaaaggaagagagagatgaaacagaaggaaaggcagaggaggagggagagagagagaagagaagaaaaagaaaaaagaacatcaataaaaagaagtcagatttgttcgaaatcttgaggtaagacttttaaaaatcacattatatataatagtatcaccatttgtatcagggcctagtacatagtaggtcctcaaaaaaatctgctattgaaataattaatctatcgaaatgaacag

SEQ ID NO: 3853 - DNA, 2300 bp, Homo sapien
agttctttgaggtccttggaaattattaagagtatacaagggtcctgagaccaaaaatttgagaactggtaagatttaatgcatcaactaccattacacagtgtccttgtttctcatcaatgcattttatatagcaattattttatctaatcccatgaaactcactttattggatgcttttgccatatccttattttctagcatcgtagctattaggtcatctaattattaatctgtttgtgtctttgggtttaaatgtgtcttttgaggccacacaatgttggacttcattttttaatggagccaacaatcagcaattgttaatgcatttgctttgtgttctattactctgcagtttatcttactcattgttatttttgctttctttaaatttatgttttcttaatggactttaaaattctttatttattttttatgtcagacaataaacatccctagtctgcccatctttctatcatttcaacatcatcatatttccaaataacttttcattgtttcctataattttactattaatagtataggattaagaaaataaaccttatctgggttctggctggcactgccttccctctagggatgaaaatggagtgtagtctgtaatatatcctggtatcataaatatatttataaaattatacaaatgtagcttgcagttctaaaggcatgtaatctaatttttacttgaattttatcttttttctctttttgtccttcatagacctcgagctctgtctagccctcaactgttctcaaatctccattgttttctacaagtgaccctcacagctgtgggcctttgttgacaaattgtttcatctcctctgggtcttaaattattttctcttactctaaagtgaaaatttgatgaatgtttccagatactgcacttggaatcataacttaatttcccttaaccttgtgtaaattctgtccccccactactcccaactcctatccctcctccaaagcactgatacttattatcacatttaaattttttccccgctctactgataacttacagaatgcaggactgcattgtgatggggtaatttccatgagttgattggttggttttgagttgaaaaacttaacaatgatacatcttaaattctttctttgaggattattccttaatgaattcgtgctacggacatactgaggtggttatttttatatttccctgataataaattctaaattgctaagggtttcttaccaccctcgtccttttactgttactagatctatttttagctggtgtgggcgtccccagctagtttcacttgcctaatgctagttcttttttcttctacatcaggtcgcctcttcctagcatcttctccatgtttcttgttgctctacagcatttacaagacccagtttaatagtttagtgccttttttgtcactcattatttcttctttgttctctgttaaaataataagtgtatgatccattgcacttgccttagagtcttgaaccagtcttggatttcccgccatctgggttctggctggcttgcaatttctcctttgatgttgtaatactttttcattgaacttgagtgtggggcttatagagcttctttgctttcattattttttcccaaaatgtgcacattttttttcttaagcttattttgctgttttgtgctgttatttttaattgcttcccactgggtgggggggtagggggactgagagtgagatttggcttgagtttggctctctttgctattactcacatttccccccagaagccctacatgcactcctctctctctgtctttgacaaattacttttgaaagatcattgatccctggcgtaaatggtgttaagagtaagatggactcgggtagggatgctcaggaatccagtcctgtacagtcatgagcttggccatctggaagtctcctcttgctcaatgaaatggagtaaacattgtccattatgaaatccaccacacaggctgccagggacgaatgggatcccacccaaagccaatcgctgctctgacagggaaattggctagcactgcctgagactactccagcctcccccgtccctgatgtcacaattcagaggctgctgcctgcttaggaggttgtagaaagctctgtaggttctctctgtgtgtcctacaggagtcttcaggccagctccctgtcggatggcttttatgaaaaaatatctcctccccattctggggctcttcatggcctactactactattctgcaaacgaggaattcagaccaggtaagtacccatgcg

SEQ ID NO: 3854 - DNA, 2300 bp, Homo sapien
tccatcttttgttatttatttcaattgtattgtactgtggtcagaaaatcctgccataatagatcaacttttcaaaacatatactgaggtttactttttgatccatatggtcaatttttttaatgtctcgtgggcatttgaaaataaggtatattttctattctcaaagttctgtgtgtgtgtgtgtgtctttttcaatatagatagataggtatgacaaccttattaattgttttgttctcagaacacaatgttaagggctcaaacctactgtcaagcaaacctgggtccaacactttctgtgtgatcttgagcatatcattgaccactctaaatcccagttatcatgggattagtatcccaatgactgcggactttgtagacatttctttctgatgtttaatggagtccaaatagtaggtctctataggaactcctattaaaatctcctgtctttctttacgctctaatgccctgaactcccagaatcttctcactcttctatgccaataaaaattctctggccaggcgtggtggctcatgcctgtgatcgcagcactttgggaggccgaggcaggtggatcacctgaggtcagtagtttgagtccagcctgactaacatggttgaaaccccatttctactaaatacaaaaaattatccaggcatggtggcgtatgcctgtaatcccagctactcaggaggctgaggcaggagaattgcttgaacctgggaggcggaggttgcagtgaaccgagatcgcgcaattgcactccagcttaggcaacaagagtgaaactccgtctcactctgtcgcccaggctagagtgcagtggcacattcttggctcactgcaacctctgcctcccaggttcaagcgattcttgtgcctcagcctcccaagtagctgggtttacaggcacatgccatgacatccggctaattttttatatttttggtagagatggggtttcaccatgttggccaggctagtcttgaactcttgacctcaagtgatccacccacctggacctcccaaagtgctgggattacaggtgtgagccactgtgcccggccaaaattctctttttctgacatcttgggctccccaagccctctgtcctctactcattcccatctctatgtgtcaagctccagacacagggccttgagctgttgtctctcatcctgagtaaatgccacttgtcttcagtcctagtgcttgagaatccatcctctgcttttccctgccgattccttgtcctttttctcctcaaagaacagagaaagaagcagaagcagagaaaatggtgacaaactctccacatgttaataaatgttatcacagctatttttaagtctcattacctgcctcacatgtgtcaaaccttagaattccaaagagccacatacatcacccaactaccacagtgagtagcatccagacaaggtgaattttacaaggttacaaagctgctcagttaacttgtcccaatccagtttcctctccactattttagcctgaacttcttgggaatttcctggctgcatcatttgtgatggcttcatcttaatgcatgcaaatcagttccctttagtttttccctaaatttcctagtccggttgaccagataaaaaaatgtgtagaagactctgccttctattccttccttcatcccccagctacccacctttacactccctcctcattgctccagaaaggagcaaatccagagttggtctcattccagaatctgagaaagacaccacctacttcagaagagcagaaactctttacaacaccaggattgggaagaggtggctaaagaaaaaggaaaatccttacacaaagaactacctgatacacatgaaagcctacactgagaacatctcatctaggtcttaccaccaaaaaggcatttttttccctctcatagaaaccacaaaggtctgaatctgacccagaggactatccttttctaatcatggaaaggaatcttgacttgaaactgtccaagagctccgaccaatccagtagcaagagaaagggtggccggggtgcctactgatgggaggagctcctgagcccagccctggaggcctcagagttcaggggcccacttagatgataccagagagcaagagagaggaactggggtttgcgaaccttgtggctttgtctgtttcctgtttcagcaaggctgctgtgcaaaaagaaagacggtaccaagaagggacgtgttaatggggcccagacctatggattgaaagcgtgtgctttacccatctgctgtcttgctcc

SEQ ID NO: 3855 - DNA, 2300 bp, Homo sapien
ctgggtggagagtgggtggcatagtttaagggtgtcaggggtttgggtaaccaagaaagtatcctgtattggtttcctgtggcgctagccatggcacagggtacagcttgcaccactcctctgttccagtagattagattacattagattaggagtgagtcaaacgacttagagttcaggctacccagtgatatgggcatgaattaaatgaccttttacagttttcttcaaagcagggatccctgaacacaagactgccttcccagcagcttaagcgcaggcccctctcccctcagttcacactgagagctctgggccaggaaggccaacccatgcaggaagccattcattgtctccattacaaacatggccaggaagtaaaagcgagactcagaaaggcatgtcaagccacagtcaggtgaggagccatgccctgttctctctctgcagcctgagagaccaggctgagccttcccagccagtaaaccttcttcctccaagctctaagtgagcccagtcatgctgccaggggggaacctgagagatgccagaaagcctgggcagtggccaagtgatctttctttgaaccctacagggaccagttcccttttctttagcagcctacccctgtcagccgtcccacataccttcttgttttcaagcaagtcagtagggtccagatatcccagaaacctgggtagggttctatgcagcatgctgcaccaaatcctagcaggtgtggtagccaaggcatctgggaacactcccctctctaaggagccatttccactgcagctcctttcttgggtaagaaggctccatgtctgccccaaggaagcagagagcagagcagctgtgtgtttcagtggactaaggttggtggcctgggtggagagcccagagagacctcatctcaggcactgtcttctcccccacagccctttcctcttcgcggcaagaaggtaggaggattctcaatgttctgcctccactacaaaacctgtggggaagctgagccaaacagggaggggacctcacaccttatgtgtgacacaggcagaccccatctcttccttacctttcggcttggtgtaattgggatggcaattatgtccagaccacagagaagcctttctccttatagcccaaacccagaggtcagaagtaaatgtgacttcagcctggggccagcatcccctcaatctggtaaacaatatactctgtcaaagagagagagggttgagaggatgagagaaggcattcttggtcctagaagtgctagtttagcttggagcctttgtcttacagcaccaagtcttcaatatccaacatcggcataacaaggataatattcgcaattacttttgcaccaacctaataggaatactttatgtctttattattaaaaggtaacatttattgtgtgctccatgccaggtgcatggcctgcattttgtcatttaatccttataacctacaaggcaggtcctagccccattttataaatgaggagactggggcttagagatgtttaatagcttatctaaaaacacacacaggttgtaggtgacagagccaggacatgagtccacgcagtgtgactccaagagccagggttctccactgcaatccatggcagaatagccaggggctgtggctcagggatgctgtgagtgtaggttctagacatggagttcacatgcacataatcctgcgtctcctccattcagtcatttataacaatagacatgggtctctcagaccctttcttttaagtctttaaataaagaaagtggcagggaagaagtcaagggaccaccccctatgcccactcccacccttatccgagaagaagaagtaaggaaaaacaaagaagagagccattcagaatgggtatgtagaggacaaacattaataacctcacatttctgcttggaatcaatgctgcctgacaccagagtatgcccctccaaccctcaagagtcaggcatttgagtgtccagggcttgaccacacaaaactcctctcagggaagaagactgccccacccatgaccctggggaatgagtggtaggatcagagagaaaacaagaatcctgcagagaattccagactgagccagagtagcgaagtcccagtaaaggggcagagagtctgctacctgttgagtctgtttggcctataaataaaccccaaggggttagagctagcaaatgcctgctagttggtgaagctgagataccctcctcccagggtggtgggtaatgaggtcgtgggaggaagagaagcagcagcagctg

SEQ ID NO: 3856 - DNA, 2300 bp, Homo sapien
ataaagcatgatgcaggaaaaagagaaagaaggcagcaattattccacctgaggtggaacagggaaggctttaaaggaaggaaacctggccaggcacggcagctcatgcctataatcccagcactttgggaggccaaggcaggtggaccacttgaggccaggagttcaagaccagcctggccaacatggcgaaaacccgtctctactaaagatacaaaaattagctgagcgtaatcgtgcatgcctgaagtccgagctactcaggaggctgagacacaagaattgcttgaacccaggaggtggaggttgcagtgagctgagattgtgccactgcactccagcctgggtgacggagcaagattctgtctcaaaaaataaaaataaaggaaagaaaccattttagctgaatcttgaaggatgagtaggagctaaccagtagagaagcaagagtgatgatgagggaaaaaagcagaaagtagaagagtgtttaaggtaaaggaattggaatgattacaggcctatgtatggcaaagaattgggtatagcagagtatggctgaaatgaaggtatgccagagtagtaccaaagaaaggatctcagacaggtctttagaattatgggtcttaaactttttctgttgaacaaggtatctcaaacttgaataatgcatggacccatttttaaaggaaacccatatatgtatatatataaaatcagagatcctttagaatgcatgctacccagcttgagaaacactgctataggtaataagctgagtaagaatggaactatgctttattgaggtataaagtcctacacttagcaatgtctggctcatccttagaaggtatgcaattactatctgaggaaatgacttgtgaatgatcagatctgtgtcttaaaaagttctgtaatttccaactggatgcagtgtctcacacctgtaatcccaacactttggggggccaaggcagaaggatcacttgagtgatcaagaccagcctgggcaacatagtgagacctcatctctattaaaaataaaaaaattagccatgcatggtggtacacacctatagtcacagctacttgggaggctgaggcaggaggatcgcttgagcccaggaggtccaggctgcaccactgtactcctgcatggggtaacagagcaagaccctgtcttgaaaaaaaaaaaagaggggggagggttcaaggattatctaacttgtagcaataagaaccctggctccaagcaggggttgggggagttgagactcttgtaatatcccaggtaagacacaaccagagcttgaatcaaagcaagctttgtgggaatgaggggggatatattaagagacatttctgggtttgtctccaaggaggagtttcaccccatgctccagcccaagagcagaagttcccttggttgtggtttcctccctcccttcttctcacccctcccaatcctcacccttctcttctttgtccctcctccccaccaaccccctagcttccagttttaaagaaaaacagtctcagactttttcagttaacagctattgtttcccctaaaataaggtaattcaactctctatctcttccatgaaagcctcaactccaataaaagtatagccccaaactgtggtatctgggaaaaataattggaagaaagtggccagaactggttcagacctttatttttgccatttgaccttcataaatttgaatttccaacttcacatgctgagaacttaccacaaactccctattagaatcccaaggatcagctccctccgctggcttcacctccggatgtctctgggccttttggataccataggctctggggcactattgagactcctgaggagggtccaaccttcagggcagaaacagctctactagcagagaaagcaagctttcaatattgtgcaatacaaaaacgagagcagggcagccttgggtttgaagatctgcgtcctggaattaagatcttgagatgacagcgcagcggggattggctgaagccctaagcaacctctactagagcagagagatgagctgtgggctggtgcttctgtggtgaggtggtggtgtttctggagagcagatcagaggcaggggaaaaccacgcagaagcaggagctgaagacctcagaccggcaccaggtgtgtatggcctccgccttgctcctctcttcactggggtttatatgccctctgagccctcggctcccggggtctaactgcctagaatgtcagcagtaggcctgtaaaaagtgcttcttcccacatactgtaac

SEQ ID NO: 3857 - DNA, 2300 bp, Homo sapien
agtacctacatcataaggtggttctgagtattaagtaagatgatccatgtaaagcacttagcacaatgcctggcacacaaaaacactcagtaaatattagctattattttgcatagatttatttacctggtttggaattttgaggatccacctcaaaagctgatctttgtaattttcctgaagcagggctcagaacagcccacttgataagagacagagtatgtgagtcttatcaaaggagtgaacccagctggtcactctgcgtggtatccacagctcaacctttgttgttttcttcttcccatcacctataaggcaactcctatgaagatttttgtgaggggttttttaactttaaatctttgtggaaaaaaaaagaccctaaccaaaaaaaaaactgatactgccagaagtagaaaaaagagaaaatgaaaacatccagaaaactaatgactttgtattccttaatttggtgatttaccaaagtgtcaagacatgactcccacaccaatgacaaccacttacatttcccctagaatggcagattttttaacgtactgggtttcctaaagcaattcttattttatatattctaatttatgtacatgaatgtgtcacttagacctgtcactagggatggtttagaaaataaacttacactgcacatgcctcagtccacttcaaaactactggcaaatgcctgtagtcccagctactcagaaggctaagatgggaggattgcttgagcccaagaggtcgaggctgcaatgtgctatgatggcaccactgcactccagtctgggtgacaaagtgagaccccatctctaaaaataaaaataaataaataaaagacgcgagttccttgtgaatatcaaaagtctaatctgctgttataaatatgaggaacaaagcaaagggaagaaataggaaaaaagaaagacttctctattttctcatctccctaacattccttctatctctaaaattccagacttttctacattttcctcttccatggtacccgccccccaacctccaccccaacactgacctccttctatattggcccttcctcctccttacagggagcagatagcagggacttacagatgaaccaggccctgcgatttttggaaaatgagcaccagcaactgcaggccaagattgaatgcctgcaaggggacagagacctgtgcagcttggatacccaggacctacaaggtactcttctccttggaggccttgagtgcatggcagccatggccaagtgagctaagaaaaaagaaactgaattaagagaaaggcttcagccttttatttgtttgcttgattggttgattggctttataatctcattttaccttgagggagaggcaggactgttttaatcatccaaaattgaaaattaatttcactgtagtagatagagtatcttgttgtctgagctctcttttttagcccatccctctgggccagatcacagctgctcccacatcagtcacatatgtcaaggccacagtcctaatttgaaagggaaaggtcagttgaaacacaaggcatagagaaagtctctcagtcacatcctctgtgtccgctgatagagaggactagatagtgtgtaaacacaagcctcaatgcaacccaacattgttgatgcacaaaaacctgaggtacttggcttctggtttacctcttcagaactgggacacgaagatagagcaacttccaatagacacacgttaaagaccatgacaagacagcatctattactaatttccatcctaagtactgagttcattaagtcttgggttcctttattttggcttgcattattgcattttcagatcaactaaaaaggtcagaggcagagaaactcaccctggtgaccagagtacagcagttgcagggtaagttcgctttccagattctgaaagtccacagggttttcctggggtcctggcccacaaaaggcacccagagtagggactaagggcccagtctttggcatatgctctaactctgtgcactttcagaccctcttcttgtaaagtgaggtcatttacatagctctccataaattatgtgttagcctctgttcttttttttctactgttctccttccatgccaatgacaccacttacatttcccctagaactgcagattttttttaaatactgggtttcctaaagcagttcttattttatatattctaatttatgtacatgaatgtgtcacatagacctgtcattagagatggtttagaaaataagcttacactatacgtgcctcaatccacttc

SEQ ID NO: 3858 - DNA, 2300 bp, Homo sapien
agcttcgaggaaaagttgggcttttagggaccgggaagcattaaaggcacagaaactttacattttgggggtcattttgttgagtaggtgaagtgagggatttgggcttgatatttggctgccccatctctacgtgggaactcaaagttaaaaacccactgtaggtaaattagaagggcagctcttgaatctgggccagtctatatcccttctgtgaagtgctaacagccaggctatctgtagcctgggtgggagcccagataatgtgagctggtaaagggtattggaaaagtgccaagaaatgccaagcttttggttcgtaaccactataaaaagtttatgaacatgtcagaggaatggatgagtgatttgtgaggtcttaactagataccccggtttcttccttgttttggcttcttttcagaatgccgggagagtacatgcagggattccatctaatcaccctcagcactctttctctggtcctgctggatagatttagatttcctttctttttttagggcctcagtctgctatctcctttggtggctaccaccactcactcccttgatatcttctactcccttgccttcaccttgcttaagactgagaagggagttagattttgtcactagctcttctttttcctcactgtgtaccccaccaaacaagattagttcaagttaaaaagaacctactggaggtaaactgggagagcaagtgttggatctgggctggtccctttcccataaaattaggtccctggttgtatgttcccatagcaccccatacttcctctctcagaataatcatttcccttgtaatgctcagcatccgcatcctgcttgactgcaaacttgctgaaggtagggactgtttgtcttggacttcgctgccagtccttagaacagtgtctgggacacagtgtgttctcaaatatttgttgctggaataaatgaatgaactaaatcagtcttttagggatttactgttaaccaccatgggaaaattaaataaatgcggggaaggaaaacgttctaaaattagaagactactttctactctcagcttctgattccctctgagctaagaaccagacagccttaggctggtaactcctataagctggtcctcctcccatgctgaccccatctttactgtacaattcacttttcatggactgaaggcaccaccaagatagatccaggagtgacaactccagtgtaggtgtccactgttcccttaatctctgtcctgctccaagtataaataaattggggccatttccttagatattggggttttctcaagaaatcctttcccttcgtggcatgggtcaaatcgctggtagttaaaaaggtgttaactcttacgtgaaataacactttttctttgtaatgacctgactggaaagcctctgtgtcatcacttctcatttcttatttgaaatcagcaaactggattcagtagacatgaacttaagccccatgaaagtgggggttttgtctgttttgctcactgcagtacctccagggcctagcagcatgactggcacatatttgttcaaagtgaatactcacaccttcacaccctccctagagagctgttgtaggcctctcaaatgtaggatttagggaagtcaagttaaaaaaaattaaaacgtttcagcaccacccacaggtgaggctattctgcaaaatatgttgtcttgaggtatgtttcgtctggacaaaacgtatttccacagacacaaatcaaaggtgtttattaactgctgtgtgccctgtttctggattcccagtcaagtgggacaccagacgtcataacacagggaggacgttcggcgaagcaaaatgagggcagcagcgggaaaccagtttcaccaggttccgccttttctcgtttacttccgcccttcccagttcctaagccgacagatggggccgcgttcagtctggccggaaagggcgggccgcacggtggcccaaacttccggcgcgcagtaaggctgcctagctagtgattctaacgcgaggcgcgcgagcggctggatgacgtcacggaatggggggaaagagggcggcactcgagtgggtgcgcatgcgcaagaaggtgcctgcgggactggagcagagcgggctgcgagggtcttcccagcgcaggcgggttttccagtgttacttgcggctgggcgtgggggactagctgcctttctggcagcaggcaggaagccgcaaaaagtttctgagcccccgaacctgtagcggacgtggaaaaagaacgtatgtgagacagactta

SEQ ID NO: 3859 - DNA, 2300 bp, Homo sapien
gctgagtcaggccttggggccttgctgccttcccaggcctttgctggctacattccaaagctaaattgggacttggaatcatgcctacattattatcaatctggggctcttcaacacacttgtatgagtatgctagggctaccataacaatgtacctcagagtgggtggcttgaacaacagaaattttttgtttcatagttctggagtttaaaagtctaaaatcaagggtctgagggatgtgaaaaaaaaaaaaaaaaaaagagctctattccaggtatctctccttgggttgcagctagctgtcttctctttatgtctcttcatatcaccttccctctgtgggtatctgcctctgtgtccaaatctcctccttttataaggacaccattcatattggattcaggctcaccctaataaccacgttttaacttgattacctccataaggatcctgtctcccaataaggtcatattctgacatctggctgtggttgcagtgggggtggtcaggacttcaaaatacaaatacaaatttttttgtatgtgggtgacagttcaactcattgtaccactcctccacagtttctcactcattactttaaacaccaaaacctaagtgacctgcgcatgccccatttcacctacgacagctcagtggttgagggtgggggatttttaaaagtctcatttactgttgcacagcctcctgcaaaccggtcctctagatagatgaggaaggtgagggcaatctcatcaagcacctgttagggtacatgcaggacttgaatttcaggtaataacaaggaatgccttcttgttctctgacgcactgtctatatggtatttttaatctttatgccaataataattgcaagtacatataaagcacttgataagtgctaaatattgttgcaagcagtttacatgtagttattgaattcccacaatacccctgaggtaggtactattactaacctctttctacagataagacaccagggcctaaaaagcttaagaaactttcccaagtctgtagtaactgatggagttggggtctaaaccccaatagttggctccagaggctatgcttttactcattacacgatagtgatcagaggaagcaggaactccagtctgggcaacatagtcagaccctgtctctaaaaaaaaaaaaaaaaaattagccgggcatggtgacccatgcctatatttccagttacttgggagggtgaggtgggataattgcttgagcccaggaggttgagctatgattgtgccactgcattctagcctggatgacagagccagaccctgcctaaaaaaaaaaaaaaaaaaaaaaaaaggaattgaactgggtgccagtgcctgtaatcccagcactttgcgaggctgaggcggatcccttgagcccaggtgttgcagaccagactgtgtaacttaatagcaagaccccatctccaaaaaaaaaaaaaaaaaaaaaggaagaaaaaagaaagagaaaaaagcaaacaacaacaaaaaagaaggaaggaattattattctcattgaagagatgaggaaactgaaaccaagaagccaagaagctaagtaacttacccagggtcacacgggtaagaggcagagtaaaggtagaattctagtcctgaaagcctatggcttctcccagacaggaccaagtgtcctggttctcttcttcatgtgcaactccacttacacaggcccacgagtagtagggccaacccagaatctcaaaacccttatttgtgcttaactgtctgcatactgcagggtaattatgggccgtgaaggagggaggcaccctctcgacttagatctgaactcccagtcgcttccagttcccaggaccaccagccctgagccgtaaggctaggcctgaatctgggactttcttagccggagttagaagcggaggagtagggtgggacgctggacggacgccgctgggccgggcagcccagaaacgcggagtgtcatatttcttgcaactcgccaatcccgaacgccggggggcgtggccacacctgggaggcgtggccgggcggatgcgaaggctgcggcgtcctggggcgaggcgctgacgtgagctcggcgcacctgggctgggcaggtaagggctggtgcgggacggggagaggaacctgcagtccctacttgggtagagccaggcgccccttggctaagacgtcgaggagcgtggtagcgacgggtgatcttcgctgcggacttggttcggagggacgtccgcttctggtggacagattgagcaaaggtgggtacg

SEQ ID NO: 3860 - DNA, 2300 bp, Homo sapien
tttttccatgacccagtgagccaatgatgagactgcttgggtggggctagggtaaatttttacctgaacctgagaaccgtctagacctgtacacaagaccacaagggtgtggaaaccgggagagtaagagtcacctcaagtgcttgagaatatagctttcatagaagatctctggaagaacaccaagaaagtggctgcctctggggagggaaactggggcacttgggatatgttgggagggggaaaaaggatggctctttattgctatagccaagttatactgtggtcagcaccttaaaatatatgatgacatcttgcaaacaggcttttgttgacctaagtgactgtaccttttatcttgaaattacatagaagacaaatggctatttatgggttccttggctggcccagctgctgggcaccacccgctctgtttgcatgtgttcctcatattctccggccctgtcctcccatccccaccccagcctctccgaatctaattaggaatagtagatggtcactagaactgacaagaatcgcattctaatggttttattacaacttctatggtgtgacacagtatcagggaaaacccaaatttcccacagtagcactccaatagcagagctattattttgcttctcatttctctcattttggacgctcctgttttaccgtaaatattcaagtgaattctgcggcttatgatttaagcactctgtttctatagaacatggtagcataagttactattaggaaaaggatctcaccatctttatcctgtggtctcaagcagccctgcacacttgcaaatccctagaatactgagtctacttttatatttttgctttttcctgtttatttaggtgttatttaaatacattaaaattcacccattttaactgtacagtttaacttttcttatgtatacaaggtgtaactactagcatgatcaaaatgtaagatggttcctttaccttcaaaagcttttccatccccttttgtccgagttcagttatgagacactggattgggtttcacagccttttctagcattgactggggtgatttcagtaaagtcactttacctctctagatgtgtttctgctgttgttaaatggggaatgctggaacagatttgtttgcggggactcttccaatactttcagaaaatgcgagaatagggtgagggtgggaatctcagacttgtgggccccatgattgatataacacacacaggcggcagaccctaatgggtaaaagcatgtggttgcatcagttaaggtttttctctcttctcttgctagcgtgttatcttttcttttcttttcttcttttttttttttttcgagatggagtctagcttttgtcgcccaggctggagtaggctggagtgcagtggagtgatctcggctcattgcaacctccacctcccgggttccagcgattctcctgcctcacctcctgagtagctgggattacaggcgcccgctaccacgcccggctgatttttgtacttttagtagagacggggtttcaccatgtttggccatgctggtctcgaactcctgacctcaggtgatccgcccatctcggcctcccaaagtgttgagattacaggcgtgagccaccgcgcccggccgctagcgtgttatcttttctaagcatcagtttccttatctgcaacaccaggcttattaacaagacctatctgtacactgttgtggtgatgaagtgagatgttcaggcacccttaaatgttggttgatatttttattgcagtatactgtaaagtcactgcattcgactatctccgctactacacatttacgcagactgatttccataaccaaaacacaagcacaaagctcatgcccccgactcacgcaacccgggaagcccagctgcccacgttctagggctctgagaacactagtgaacgaactcccgtgctttcaaagagctgcggtagggggcagaaccgggaaccggatgttctaagcctgtcgtacgagcgcgacgtaaagcggatctgctttatggcaccttgctttcgccgtaaagcgcagtcagcgagcccacgtgcttgtgttgactggacaacttcctggtggaaaaccgcgactcttgcaagtgggcaaacttgacgttttcgctatgggcaaacgcgggagccggagccagagccagctactcaacaccctaactaaaaagcagaagaaacatcttcgagatttcggcgaggagcatcccttctatgacaggtctgaaggggcgtggcagggctccccagtcgccag

SEQ ID NO: 3861 - DNA, 2300 bp, Homo sapien
tataaatcatgaaaaaattcgctaaatatagtactatgtgaatgtaatttactgttattcatttctaatttggctcttgatctgtttctcccctagtggcctattctgggccagcttttcttttcctctaagtttcagaagttggaaacatttaaacccccaaaggatattgacttaaagtcacttcatctccagaagcctctggaatccacctggactaagaccaacagccagttcctatctggtccccaaaaatcaagcagcccattcacccccctccagaaagaactcttcttaattatgaattcttaccgggacctgttctacccggaaaggactgctctgaagaacggggaagagatccgccatgtgtattgcctgcatgtgataaatcacatcctcaaagccaatgcccaggtgcttggcaacaatagcagacgccgaagccagaagtttggagtgggtgatgatgatgacttcagagaccaagggttaacaaggcccaaggtgagtccagcaggaaagctttgctctcgaggaggtggctgcaaggcactgccatagaggtgcctgacacttagcaggaacttgggtattttaataattgactggcataatgaatgagcccaaatgtgagcatattaagtaggccaggtagtgtcagagcagcactgcagcagcttagtgggctgtttctgacagtggatgtagctggaaacttgcgagaaggaggcacttcatgacactttccttaaagataaacccagagtatataaataaaactccattataaatctcttctttgtggttgtcaaagctggatgggaccttaatgagccttttatccaatccctccatattacagctgtggacaaccccaaattcgtagaaattcatagagggccttgctaaagagaaccagggaaagaatagcagagatgagacaagaaccatagattctcttcactaagccacatacatacgtcagcctttgaaagcaaaaatttacatttgccactgtaaagttattgctgcttaaagtgatgcgtttgtattcataagtctaagctctagtggatttgaggccttaacaggaaatggctttcaattttatctacattattcatgatgttatagaaccaggacttgtccccctgccctgaactgcatctctccgtattgaagaagcctcatctttttagaattttctcattgagtttaataggattctagaaatttgatactaatgtggcctttagagatttcttagtcaaactcccttgtgtaatagcgggggaaaccaaagccccgacgcttactgtcaccgctggaacaataacccagtcctcttaaatcttggtccaccatctctgcaactgtaccaagctgagtccactgcactccttggggcttgaacatcagggttataaggttgtttccatttagaattacatagaagaataagaggcagattatctatgaaacatattataatttggtgaattacgtgatttaactggggttatgtccattgtttacaataggaaattagaaattaaccattttttaagcatcttcggtttttattctcaacagtaactttaaatatttttgaatatgcttagaaagctgagtcctgtttttcccattaattgtggtcatttttttttagaaatgctttattgtcatttctgaaacactgtatagagaatgcactagaaatgtaatgatgtgttaatcctttttcttacccgctttatttcttctctacttgttccatttatttattcgacatgtatttattcactgtgtctttaggataaaaatattgcactaattctgtgggagacacagaaatctttccctcaaagagctcatgtgtttatgtccttgagtttttactggtagacgtatctgttagaggcattggcttattgtaaaaggtatttccaaattctgcttgagaaatgtctcacgtggactgatgggtctgaagtccgcaggtcatggtgctggggttatgaaaggtgctcagtttctggtgttgagccaagccctgcgcaaagcgggtaacataggtatgtttcttggctgggggccactgctctacatggagctttttagctccacttcctcagcagtttcacctcaagatcctgttccttcctcttaccccactaaggctgctgttgctgtctgcacaggtactgatagtggtgccattccgggaagctgctttgcgggtggtgcagctcttcatcagcctcctcgagggtgacagcaagaagaaaatcattgtg

SEQ ID NO: 3862 - DNA, 2300 bp, Homo sapien
gtcatttttttttagaaatgctttattgtcatttctgaaacactgtatagagaatgcactagaaatgtaatgatgtgttaatcctttttcttacccgctttatttcttctctacttgttccatttatttattcgacatgtatttattcactgtgtctttaggataaaaatattgcactaattctgtgggagacacagaaatctttccctcaaagagctcatgtgtttatgtccttgagtttttactggtagacgtatctgttagaggcattggcttattgtaaaaggtatttccaaattctgcttgagaaatgtctcacgtggactgatgggtctgaagtccgcaggtcatggtgctggggttatgaaaggtgctcagtttctggtgttgagccaagccctgcgcaaagcgggtaacataggtatgtttcttggctgggggccactgctctacatggagctttttagctccacttcctcagcagtttcacctcaagatcctgttccttcctcttaccccactaaggctgctgttgctgtctgcacaggtactgatagtggtgccattccgggaagctgctttgcgggtggtgcagctcttcatcagcctcctcgagggtgacagcaagaagaaaatcattgtgagcaacaaaaagaggtttcagggagaatatggatcagatcccgaggagagaccacccaacttgaagaggcctgaggattatgaagccgtatttgtgggcaatattgatgaccacttcaggattggtaattcttccttatcaactttgagacctaaagtgtgaaggtctacatagctggagaccagaagctggaattagatattttcccagtggatcactcactgtgcctctttaacagaaccagtgtgcctttgagacatgttgtttgccatgggagagtcttgccttggctaatggggtggacattaggccagtggagtcgggaggatctctgaggccatatatgaaaggcacatgtacatttataacagaaatttatagcaagtttataacagaagtgtgaaagcacacccatagctggtagcagatagatgctacaaggggttctctaggatgttggaagtgatggggctgatggggtcattctggggaggctgaataaaatgactgtctctacataaaggtggactttctcctgtgtgctacatagatgcctaccctgaataatctccacacatgacttccacccaaattttcacatttttgcttgtctctcattcagctcccattgactttggttggttataccttttatagagtaaagttcttggggaaatgttcattagtcacatatgctcattcacaaatacttattgagtatctacagtgtgccaggcactgttaagaagctgggaatctacagataaatatagaaataaaagttatagttcccattgctaaggaaatccagcctacgacagagcaggcagtgcaggatatgtgtgcaacggttgttctcggagcatttaaagcaaacccccttacccaaaatgggggcagggtggttagggaagatgtcgtggtggaggtgtcatctgtactaggtggaaacctgtgtaggattcagccagtttcaaagggaggtggctgagtggaggaaaacatttcagacaggaaactgcctgttgcagaggcatcagggtgactaagcttggaatgacctatgattcacacaggcttcggtatggtggaatgtaaggcataaggagacaagagctcgtgttttgtttggaacatatatagctgtccaggaagcagttggtatattgttctggagctcaggaaaaagatatgggctggaaatacacatttgtgtgaaggtgacattaaagccatgatcagtgagtcagttaacccaaagctttatgcagcacgagagcagagctgacaagtgaatccaccagtttgcagaagagttatttggatctggaaggacagacaagggccaggtcagtgatagaagcaaaagtgagagttgaagtcatggaaactattagcaaggaaaagagcattgcaaggcagctgttagtacattctgtgccgtttgtactttcctcataagaagctctcaaaagtgttcatcctgttggtgactgaggactgtggggaccttagcaagagtcatttctctggagtcctgagaatcagaggccggattgcagtggagtgagaagtgaaggagagatttgaaagtagagagaattctctggagcagtttgatagtgacggaaaggaagagaaggtagaagctagaagg

SEQ ID NO: 3863 - DNA, 2300 bp, Homo sapien
tattggacagcacaaatacagagtgttttaatagttgcggacaattcttttggatagctctgctgtaagggaactgcagggaagtacgatgaaaggcaagtgcttgcaaaagagttagaaggtagacaagaggtggatgtctagacagtacagtacctttgtagttactacttaactcatttatccctgaggttgcaatttttagaatttttgcaatcagaccttggcgatgaccttgagcagcaggatgtaaacaactcccgcgtgcttagcgttccaataatggaacactaggcataagttaagttctttctgtccaacaacctccttctaggaactatcttccttcttccccagttcatccacatgagtctcctggacaaataagtctcctggacaaatagtagcgatgttaatctaggttatggaaactcacataatctggttatttacttagtaactatgtaattggtgaggaaaggatgaatacatttttcgggctttcaatatgaaattctttaaaagtttgaacaattgggttactcagaactagccagaaaccacaacttacaactgtggtgtcaagttcagatcaatgtcttggagttcaagactgttttaagggaggctgcctggggaaaatgtcattaaacattttacccgaatcctctagatgtccatcataaactctctcatggagctttcctaaagtataggcattttaatgtttcctgagtaaaacagtattttctttgatccttcaataacaattcttgcttgtagccagttttcagcacagtgccggcttcacagatactcactgaactaaagaaaatggtaaaggatgaatgtctattgagcataaaatgcgactgagggagaggttatataaaagcaatggaagacagtttctgctctagatttacagtccaaccttacttacataagtgtaaaatattttcttctttgtttcagtccctaatatagctattttgctctaggaattagcatttcctccacaagagagaatcactaaactccctatttctcaatgttgtttatgccgttgattgtccaggttctcaaattactaaatgaagttgagagttgggtaaatggttgagcggttcaagtatcttaagtaaaaactaagtggccaattgttgttgtgctcagggttggcctgggactgttcacaatggtcacaggtttacaaatttttaaaaacctgcgtgtgacatgctttccaggtcctttgtcaaaacgtccgtctgaccctgacttttgtgtggcttcaaatgtgcgtttgcaatgtgtagacaaattccaactcagagttccaagaggtaagccaagctctgtgtggcagcaaggcttatcaagagcgaggctaaggggtgaagtgagtgtgtgtgtgtgtgtgtgtgtgagagagagagagagagagagagagagagaccactgctgtgctcaggattcctctctcctttttgctttttgccaactagctgtttctccacagcggagatctgagacgagtatgtggctgattcgggcaaaacaaaacaaaataaaaccaaacgaaaccaaaacagacttactattaccaaatctgagagtcagtgggtgggaatccttttcaaccaaggagacctgtccatggtcctgaccacatcatttgccactcgcctccttcatggacaccgtttgctccaagtaccggacgggagggcgcccggcgccaggaagcttgggcttgggcccccacacgagctcggcgcgcttcgggcgggtctcgggcgcgggcccgtggctctccgggccgggcacctgtttcgaatcgaggcgcgaggcgcggtggggcggtggggtggggtggggtaggttggggtgggggcggggtggcgtcacgtgccagcggcggccccgggaaggttccatttcttccgcggcccgcactcgcggcgctcggggcccctccctcgccccgcccgcggcgcccctcgcggccgcacagccgggcgactccgggccgggccccgcccctctcgctggcggactcagcgcgtcctccgccagccctcgcgtctgctgcccccgccatccagttggtgcggtccatggcgagcgcatcatggcgattgaaggtaagtggaggctgacagcggggagcgaggaccgggaccacccagctggcggggggctcggaggtgcgccggcaggccgaggcgctgacggggccgcctcctgtggtctggagccggctgaagacgcgcgggggtcctggccgcgtctcggga

SEQ ID NO: 3864 - DNA, 2300 bp, Homo sapien
atgcaacagaaagggtccataatggaaagatgacaagaaaactaaaaactaattttaattagtgttttcagaaagatgtgagaagacaaatttttttaaaagagaaaaaatgctcagaaaaaggaacagtcatagaaaaaagggtctcttgtaaattacaagtatgatcaccaaaacaaagcaaatagtagaagggtcagtacgaggattggcaaactatggccttccacctgtttttgtaaagaaaggtatactggaacccagcactgcctatttgttttcatattgtctatggctgctttcatgctacaacagcagagtgagtagttatgacagagatcatatgctcatgaaaccaaaaaatttactatctggccctttacagaaaaagtttgctaacccattaattagaagacagaaatgaaaaaaaaaaataaataaataactccaggaaatataaaaggaaaatagagtggaaaagaaacagatggaaagatttaaaaaaggattagagattagacaatccaggaggatttaacatatgactaacaggtgattcataaagaaagaaaacagaggggaggaagttgtattaaaaatacaaggcaatgtgccaaagctgaagagcttgtctccaaataaaggatctgaacaataaatgaaaaaatccagacctagacacatcattgtgaaattttagaacaccaggggtaaaagaaaatccggaaagaccccctgatgacataaaaattagaaagatcagaagggcatcaaacttttcaactgtaaagctagatgcaacaagacagttaagctaaggcttcaaaatggtaaagaaacttgattttcactatatgaagtgtttcgatgtataatctccttaaattctaaacacaacactattatgggtaggtgtcattatttaatccccattttacagatgacaaaactgtaattttatgactttgactatcccaaagtcactgtgttacatttgattgcttggcaaactacaaatattcccagccctttctagttttttttgtgtggtttttttttttcctgtacttcaagagaaatatgtttgagattctgtagcattctggatgctagtcaggttccaacaattaaacacatttgtgcatgatttgcgaagttaaagtgaaggcagaggccattttcttactgcttcaggcaggcaagttcaaacgaaagatgtttttcctcctccagtaacattctttttctttttttttttagattcagggggtaggtgtccatgtttgttacaaggatatactgcataatgctggagtttgagcttctattgaacccatcacccaagtagtgagcatagtacccaatgagtagtttctcaatccttacccccatcccaccctccccccttttgaaattcccggagtctgttgtttccatctttatgtgtacccattatttagttcccacttacaagtgagaacatatggatttgattttctgtttctgcgctaattcacttagggtaatggcctccagctgcattggtgttgctgcaaaggatatgatttcattcttttttagggctatggtattccatggtgtatagtagctagtttaccgcttcatgtgcactaagaggtaattgcaatggccgtgaagactttctgatctcttgatcaaactaagatagtatgttttttaagtcatatcttcctgccttcccactacttagtagctcctttgggggatcagcttttcagtgttctaggagtcatttctgcagaactagcctaaaccttgctactccagctcttctaacaattttgtaagcacctaattttctgaattaaatctctttcttaaaatacccaaagtgatttcgttttccttcactgattcctgactgatgtagttcacagaagtttagtattaatgatagaataagaggttttcagattttaaaattatatctaggcagtccatgctatactaaaacactgccagtcataaccagggtttgattctagttaaaatggtttcttaacatataatgtctaagaataattacattagtggaaagaggtaaagaaaggcaacgtccagccaggcacggtggcccatgcctgtaatcccagcactttgggaggccgaggagggcagctcaggaggtcaggagatcgagatcatcctggccaacatggtgaaaccccatctctactaaaaatacaaaaattcactgtgtgtggtggtgcacgcctgtaattccagctatgcgggagcctgatacaggagaattgctt

SEQ ID NO: 3865 - DNA, 2300 bp, Homo sapien
cccaagggcaatgccagtttcccagaaggctcatttctccgagccaaagctccaaagatgccagtgcacccatgctgataacttagtctcatgttatttctcaattttatgcttaatttgctccttttgattttatgtattttcacacagccaagtgtacatggggatttacccatagtcctttaaatgccataaaactttaatatagggagataaaaaccataataagccatgcctccaaaccctcacatttagttcttttgagtttgacaataaccagttttagattatttggaaatttggatttctacgtacttgcactgctttaaatgcccttgtgcctttcctaaccctcctctcccacccagatgaaaattatactctactcttaacctggacatgcaacttccattgactgcacaaaatggcatctttacaattcttaaattatcatcataatggcccacatcatgcatgagccaatgcaatttaatatggttcagaataaagccaagatggatgcccaattcccaattttaggcatgcaaccctggaatgtcttttggaaaaaatgaaataatgctcttggtaggctgttgggttcatctgttttaagcataattgccatctctcagcttcctaatacccttaaaacctctgagagtctttaatgtacaaagttcaacaaaaacaccttcaaaacaaattagttctaattatgtttaatattggtttgctgctttattgaataatctacatttgcttttaaaaaaaggaaattcacttaactgcatgtcagtcacccaagttttaagtgtacaaatgaaatggaaaacatttattacacaaatttaattacaattctaagaaataaacatgcaaattagatagagttcaatttgcagatgctaatcctcatccttgatcttgttccttcctcccttgattttcagtctgtgcgtcttcttgattcctagggagccaggcagccagaggtctggtttttcacagtcggaggatcactgttttaaagaagtgttatatttagcacatctggtatagtggcagtaaacaaacattatagtctttgtaacacttttgtgcaggtgccttctcccgattttattaggtctatgccttccaagcctctgccttcattacacctgaaatgacccatctcgactatggaggggtccctagacagaagttatgaattaatgattttaaaaaataaactctgaggccactataggagaaaattactatttgcaaaatattctgattccaaggcttaaattacattctcttgagcaaggacaatctcttgtattactttttatttcctggaggttttccctggaggctccccacccagaaagggttgccaattcaagttgcagcaggaccaaggttgcttttttttttttttttaatacgtacgcagctcaggagggaaacgggcgggggcgggcggcgagggagaataactgtttggtcctgcaaagacatctgtttctcatctccgtttgctgtggcaaaggagaagaaagtcttttgcaaagggtgggaaaggcacagattttttttttaatcacacgcacacacaacaacaacaaaactaaaccaaatttaaaaagacaagatatctcggaaggttccagagtgaatacattattcggctggagccaagcccccagggctagggcgggagcccgagagcgcgtggggtctgggctgcgggctggagctgggcccgcgtgtccccgggcaccgggaggggaggggaggaaaaggaggagggagggcgggaagcagggaaggaggcagggggcgggctggggtgggggtgcgggaaaggcgccccgtgtgcagcctgaggagcggcggcggcggcctgagcagagggagggagggagagcgggcgcgcttgtcatgttccctctctcaccctgggggcatcctgcagaacctctcctcggaaatccacggggaaatggcaaacaggattgacgggtttcacacgctcctcgctagacagagccgctcattaccataaccgtctgcagcgacggcggcgcagcgccccagtcgcggcggcgggacctgccgggacccttgcccgccgcgcacccgcagtcaccgccgagcgggcggccgggccgggacccgcgagtgtgcaccggcggccgggctggcgccgagcccagagcggaccagcagcagctcaagcgctgcggccgccgcctccccgctgaccccgcggtaagagccgggctgggcgcgggccgcgggggcgggag

SEQ ID NO: 3866 - DNA, 2300 bp, Homo sapien
acaagtgggcaaaagaaaggttcgattaaatctttacaaagaaacgatgggacatgtcatttatttttctctttgagtcatcaacaaagaaatttagcctacattgatttaacaaattaagtccttctgtctatcatttctcaaactcctcatccaagtagggtatcaaacttcatgatgatttattccctggaagactctcatgaaattgtccagtttcttcacctattctaagagacaatcatatcaggaaatactattgccaagagcacatgaattacagcttttcaacagtcagcagccctttcttattgagagaatcaacattttctagtttgaagtttacactcacttttgtgttagatcatgggaataagatgcaagccttttgcctatgcagacttttatttcatgtaaacaaaagcaggttgtcaaactcatgccccttaagaaagaaaaacatttgcaggctcctggcagcaattacttttgtttaacaggacattatatgggccctgtgctgttttatgtttgtcagagtttgtttatattttaataactttttggtagtaccttttttggttgtgaggaatttcagcgtttctatttgttagcattatttccagcatatcctattatgcacgtgaacttgaaacatggcataacagtatttatcttggctattattttgttcacaatatctaattttactaagtttttcttttttaaattgagaactgttacacacaaaaccctaaactagagaggctgagttctgcaagtgatttatgtaaatctgaataaaacatgaatgagttgggattatttgggagcggggaggagattttgcaattgagtcttcctagtctatttaaaacttacactggatgttaacaaattaagaaggcaagttgaatgttcacgaaaaattggacagggcagcgttaagcacaaatgcttaacgtgaatctttcttcgtattatatgtagagatctaaactgtcataattctctgtctgataagatttataattctgctactgacgtcagcaattcaagtccacaaattcgtgttctattaatattaaataaagaaaaggatatacattatggcaaaatttattttctaagatcagaggtgatggattcaacaggagggtgttagagtgtgttttgtctatgcatgggtttaaaagataagaaaaaaaaaagccctaacccttcatcctcaggctcctgaatgtctgttttgacacccaggtggatgtagtggaatgacacttccagcatccccagaagactgagggctagaatgccaagcttttccagcaaatgttcgtagtaaagttaccaggcatttctatacaatttgtttttttccagatgagttgggcttgttctttcctagaagcaattatgatgctaataggagtggctggcacacaaaacagggtagctatgaattcagcggcaccttgaatctaacaaggggctccaggtcattctttgctcacttcttcttccatctgtcattgaaaattggagagcatttgattaagatcattatagcagttagcagtctgattccagcactggaaagcagggaagtaaagggctatttccacccccgatcgatgctgccagttttaaatggcatcaagcccctgacctccacattgtcccaaaatgatctcaatagcttgtccggctcctggtggtggtagtggaagggactggatgggcggaacaaaattcttcaacccttctaaacaaacagatgtcgcttttctgccgttcctgcagtacacctgtctgccctgggaagtacatttctcagctgcagccccgcgaggccaagagcttgaagctgggtcctgtggttggggctgcaggtgctgggcctaaagagcacgaaggggtgctccgatgcccgagccctggtgcccaaggtgtgtgtgtgtgtggcggttgcgggggtggggtccgaggtttggagggccgacctcttgaaggcgggcggcagccaccaaccacatcctggctcccgcacagacacacccccggggtgtcggtgccgcagccctcagcccctccccgggtagccagcagcgcccggtcggccgctggccgcaggagaaagtaaacaacaccccaagtgtccgggaacaaaggcaagttgtctttctacggtgccgcagccgtgtgcctcttctgaagaataagagctattattattctttatgtcttatccttttttttttttaaaaaaaaaaccaagtttccttctaagggaaataaac

SEQ ID NO: 3867 - DNA, 2300 bp, Homo sapien
gaatctgcagtgagctgagatcatgccactgtgcttagcctgggtgacacagtgagactgtctctaatacatacatatatatatatatatatatatatatatatatacacacacacataaattttggctatttttatttgatgtttctgattgcctgtgtttaaatctgcctttatctcctttgtgttcgccggtgaatttaaagtgcatatgtagacaggggttaagtgtaaatcacactgaacctatattaacaacagcatcttttagaaataatataggagctgttatcacatccctgtccctgagtttgacactacctgagttgagttcttattctgccactccctctgccaaacccttggatctagagttgacagataaaatacccagttaagtttgattttcagatacccaggatgtaaatttgaatttcagatataccattttttttttttttttttggtagagatggagtttcatcatgttggccaggctggtctcgaactcctggattcaagttatctactcacctcgacctcccaaagtgctgggattacaagcttcctgtaagtacttaaaaaaaataagtatatcccaaatattgcatgggtcatagtgatactaaaaagttacatattgttcacctgaaattatttacttatttttttgagacagagtccggctcagtcacccaggttggagtgcagtggtgcgatctgagctcactgcaacctctgccgcccgggttcaagcgattctcgtgcctcagcctcccaagtggctgggattacaggtgcaggccaccacacccggctaatttttgtatttttagtagagacggggtctcaccatgttggccaggctggtctcaaactcctggcctcaagtgatcctcctgctaccgctcctaaagtgctgagattacaggcgtgggccaccgcgcccagcctgaaattcaattttaattgagtatgctgtatttttatttgctaaatctggcactcctatttggggctagtttactaacacctgcttactgaacaccatccagtaccaggttttggggtgagtgggttggggggaagcagaaagaaaagatagctccagctcttggagagttcatactctggtttcctggagaattctaaaatcattaaaataatcctctcgaccattacaatgactgctagatgaaatttctgagagcacagcttccgagtttccctgctgcctagggcagagttatccaccttcaccttatcatagaaccacctgagacgcccctgccatggacagtctgatgcttttggtttggggagggatccagaagcccgaggttttaatgagagccacgtgattctgctgagataagtctggagaactctggcaagcctgtctcttggctcaggcttggaggcctccgagcagcaacatcgtcccaattataccccgttggagcatcttcagatcttccactcttttcacaacgcaatcaaaatcttcgtacccattttgcagtagtgatctctgtaagttgctttacaattcataaagtttattctatttgatcttcactctaatttacaaagaaaagcagggaagtctatttctgttttacagaggtgtacagggaggctcacaggggctaagttcacacagtaagccctcgaagctgccagggctgcaaagcccaccctctttccaccgcaccgaactacctcctttcgcctacaaaacgtaggtggggaccactggtgttggaatgacggcccacctcgagtttcaggtgacttccactctgcaattaacttgcaggcagccccagacctgcaatgaacacacgggtgggggagagatatgcacgccagggtcagtgggaaccaacagccgaggggtgagcggggctaggggccccgggccgccggcggggcaaacgcggttcagaaacgcaggccgcgctctggcccgccccctgcagcagcacggcctgctcgccatcgcccggagagcgccgcgggttcccgagtccgggcgcggagggcgcgcgggcacggcggcaggggcgtgctcggaggacgcgcgctgcgctgctcctccaaagggcagctccgggggaaagagggtggcgtcccggggaagcccgcagccgccgccgatgtcgctgggactcggaagtgccgaaagaggggtgttgggaactcgcggcgcgcgtgaacgttgccgtcgccgccgcccgggacagcccggaggttggtaactggtgaccatagggggtcctggggaggttagatgctgaa

SEQ ID NO: 3868 - DNA, 2300 bp, Homo sapien
cctctgccaaacccttggatctagagttgacagataaaatacccagttaagtttgattttcagatacccaggatgtaaatttgaatttcagatataccattttttttttttttttttggtagagatggagtttcatcatgttggccaggctggtctcgaactcctggattcaagttatctactcacctcgacctcccaaagtgctgggattacaagcttcctgtaagtacttaaaaaaaataagtatatcccaaatattgcatgggtcatagtgatactaaaaagttacatattgttcacctgaaattatttacttatttttttgagacagagtccggctcagtcacccaggttggagtgcagtggtgcgatctgagctcactgcaacctctgccgcccgggttcaagcgattctcgtgcctcagcctcccaagtggctgggattacaggtgcaggccaccacacccggctaatttttgtatttttagtagagacggggtctcaccatgttggccaggctggtctcaaactcctggcctcaagtgatcctcctgctaccgctcctaaagtgctgagattacaggcgtgggccaccgcgcccagcctgaaattcaattttaattgagtatgctgtatttttatttgctaaatctggcactcctatttggggctagtttactaacacctgcttactgaacaccatccagtaccaggttttggggtgagtgggttggggggaagcagaaagaaaagatagctccagctcttggagagttcatactctggtttcctggagaattctaaaatcattaaaataatcctctcgaccattacaatgactgctagatgaaatttctgagagcacagcttccgagtttccctgctgcctagggcagagttatccaccttcaccttatcatagaaccacctgagacgcccctgccatggacagtctgatgcttttggtttggggagggatccagaagcccgaggttttaatgagagccacgtgattctgctgagataagtctggagaactctggcaagcctgtctcttggctcaggcttggaggcctccgagcagcaacatcgtcccaattataccccgttggagcatcttcagatcttccactcttttcacaacgcaatcaaaatcttcgtacccattttgcagtagtgatctctgtaagttgctttacaattcataaagtttattctatttgatcttcactctaatttacaaagaaaagcagggaagtctatttctgttttacagaggtgtacagggaggctcacaggggctaagttcacacagtaagccctcgaagctgccagggctgcaaagcccaccctctttccaccgcaccgaactacctcctttcgcctacaaaacgtaggtggggaccactggtgttggaatgacggcccacctcgagtttcaggtgacttccactctgcaattaacttgcaggcagccccagacctgcaatgaacacacgggtgggggagagatatgcacgccagggtcagtgggaaccaacagccgaggggtgagcggggctaggggccccgggccgccggcggggcaaacgcggttcagaaacgcaggccgcgctctggcccgccccctgcagcagcacggcctgctcgccatcgcccggagagcgccgcgggttcccgagtccgggcgcggagggcgcgcgggcacggcggcaggggcgtgctcggaggacgcgcgctgcgctgctcctccaaagggcagctccgggggaaagagggtggcgtcccggggaagcccgcagccgccgccgatgtcgctgggactcggaagtgccgaaagaggggtgttgggaactcgcggcgcgcgtgaacgttgccgtcgccgccgcccgggacagcccggaggttggtaactggtgaccatagggggtcctggggaggttagatgctgaattttctgcgtcagtttactctgttaaaaaaaaaatgcacaaaacgctttccgtttcctacccaagttcccgtgtgcgcgcccgagggcgggacagaggaagttcccggtcgggcgaagaagacaaaagcggcgggggccgcgcgcgcagtgcgcccgggcaaaggcggggatctaggcgccgggacaagtccgcgcacggccctgcccacgtcctctctccttggcttcgtccccagcttccggaactgctgcggggagttgcgaactctggtcctcttggcagtatcggcggtgcgcctgcctgcctgctgtgactccagggactctaaagttagagacttccttt

SEQ ID NO: 3869 - DNA, 2300 bp, Homo sapien
ggtgagtcaaagtgaagcttcacttagggcagtgaaagggagctggacctgactgtagtcctccagtttttgatgatgttcaggtttggaggattacagccccaatcaagaatgcttttgatctttgtcatttctttgagggtaatgctgattgcacttgccaagacaacagaagtggtgtgggtgcttgcgtaggtgcggctgtcaagggctgttcagactccatatgctttggtttttgcatcctttttttgtaatgtttgctcttccaggctgtcagggtaaaagcccctcccccaccccccaccccctgcaggctccagtgtgctgtgctagaatggggtgaacccagccttgctgggttctggggtgatctgtcgttgtatttgccagtccctttttctttcttcttgctggtcttctctctagtgatgccagggagataggggaaatatttcagtgcccacattgcgtgctcgatgaagtaaacatgtttctagacagtagcatctgaaccaaactgatacaaatgaagttctatgtcaggtatattgtcattcatttttttccttttatttaggattcaagatcatagattcttggcataatggaaagagcacaggtttggagttggatgggcttaagttcaaatttggctttgctacatctgagaaaataatttgcctcctttttaaaaaaatgtatgtatttttttgagacaggctgaagtacagtggcatgatcttggctcaccataacctctgcctcccaggttcaagtgattctcttgcctcagcctcctgagtagctggggttgcaggcgtgtgccaccacactcagctagattttgtatttttagtagagatgcgtttcgccatgtcggccaggctggtcttgaactcctggcctcaagtgatccacctatctcagccttccaaagtgctgggattacaggcatgagccactgtgcctggcctcatttacctccttttagcctcagttttattacctgcaacatgggaatacaaggttatggagaaagaggtgatggacagaaaacacccagcatgcttgtacttagtacagaatagatacacaatacctgttactgtggttattgttacttttttcttccatggatgaataattccttcctttagcattaagaattactgattcttggtcgggcacagtggctcacgcctgtaatcccagcactttgggaggccgaggtgggcggatcacctgaggtcaggagtccacgaccagtctggccaacatggtgaaactccgtctctactaaaaatacaaaaattagctggatgtggtggcgggtgcctataatcccaactacttgggaggctgaggcaggagaatcgcttgaacccgggaggcggaggttgcagtgagccaagcctgcgccattgcactccagcctgggcaacaagagtgaaactctgtctcaaaaaaaagaaagaaaaaaaaaaagaattgctgattctccctctgtagcaaggaggtaacgttctacagagagacatttacatgtagagggggactgctgttgaaaggagctctcaaaatcctaatgcattatgaagagtgttacaagtaatcaattctgttctttcctgaggacacattttcccatgacaggtttctgaaattggggcagacctctaaataagctgttctttcagaagtaaaatcagagaggactttccattgcctgtgaggaggcttaggaagaagagacagaggcagacgggagcttgaatacgaatgactatgaacatagataaagaggtacttctataaagacacagttcttagctactcatgctttgcccatgaagatttttaagatttggcttatttataaatgcctctgcattttaatacttcaggaaaacaacattccattttgactcatttaacacatgagttaaatgcacacctgctgtgtaagcagcttccaggccacgtgccagggatgctgtgacattccaggctcagtctctgtcctaagtgggctctgaagtttgggggaaggtgatgatgtgacagtgagctggtggtgcaacagccactggggcttgtagagacagagggtgcagagaaccccagcggcagggactgaagggaggtgatggctgggagacgggaaaggtaggtgaagggtatagcatgcctgacgacctggatttgagtgaaataaatttggcttggctagaaggttgagttgtgaggagggcaaatgactcaagacagggaggggatagatcgtaaaggccatgaag

SEQ ID NO: 3870 - DNA, 2300 bp, Homo sapien
ggtcatagaaaaccggcaaattagggactcagctgtgctagtagccaggttaatcttggtgagaggctgtccacattgttgatcctgtgcaaagctttcattgctgccattgcagctactttggtgatgagcccattaggacggctgtggaaagaggctggctgatgtgcacaggccatgctaccttgttatttagactgccgggcccttttgttgagtatttacatgggtcacaaatatctcccctgggctcattttgaggtgttcatttatatgcctctttcctgattttaaacgtctccttattaacatttatccaattgaattccttccacaatcctaactatcccaggaaactattggacactcccatgaatcagttttagattcttacagacaaattggccaatggcatgtaccacttgaaattccacccactgtgaggctttttccttgtttgctgtcctttggggccatctcacatataaggttgcagctgttcatttccagcagattccatcatatcttgggcagtcatcagtgaacagagctgtttcccctcctctaccaagtcctcttggggccttaggtgtgggatgagagaaggatagccacatagcaggagtcagcatattgggaggaggagttctcttttcctgcaacttaattgtgacctcaggattctccgtgtttgtgtgtgtgtgtgtgtgtgtatacacatgtgtatgtatccattgataatggaatgcttcctgatattgtggctaggtggatcagataactctagttgataatggaccactcaggtaacatggttctttggtgtcctgtggtcagggatagctcacctggtgaatgaattagagtggcctgcacagttacatacatatcacctccaaattccgaagaggtctaccaaagctgtgcctctttcttatggatgagtggcataaggtagaccaacttgtcctttacttgtgtcttgaactcccagaaactgctctgaagtgatatacccacatatatatatgtatgtttatttctgatatgctcatacttattaaggcatctggtatacctgccactcctaattttgtaggtcctattggcatgctctgttcatgatttttcttacggttatttggctgttttagggtctttaggtctgtgaactgactcaggtctggaaattgggtaaatgatcatggtggcttaagttaagccttgttcactaaaactagattatttgccagttatataatgacaataaaaataaccgtagtggaaatgatagctagcatatattgagcacttaatctgtgccaaacactgctttaagagctttatattagcctatgtaattctcacagcagccctatgagcagatagaatcgtatcgctattttacagtgaggaaatggagacacagagaggttcaacttgagtatctgtctgtctaaggtctatggacctcatgatcagttgcccttctccaaacatcccagtgaatcagagcatctgaccgccaggaaggccatgtggcttactgtggtcatcatgcacacgtcaccttggggttaagtggcattatttagtctattacttaaggggtttggtgtccgcattgaaataaagaatttcgttgtctcttaacagcatcctcagcccacagagaatggccttggcaacacatttctgagacgcttgtgctcccctcactaatgtatttatttctcaaattctcagtgaagggagtgtcttctgagctctcttgggggcataattagggagtgggctagcaggtcacacatgataaatccactcagacattcttatctcctgaaatcattttattacttcctctcttgacttcccaaagaatttctggcatctcagccccatacatatgggcagctgtggtgtctgggtttccaaactcatacagtcagctccactcccagctgctgcagctggcatgtggaatcctgacttgctggtaagtgtgctcatattgatcattccaccccatctatttagtcttcttccctccatctagattccttagaatcccacatatataggtcagagttttgctaatgtaaagtagaaaaaccttgtggttcttttggagtgaaagccttgtaataggccccttggggcatgctggggctcatttctagacagtgaggcgtgatgagcaggagagatgaagaaaatctgcttctcttgcaaagtaattccttcatgagacttcattaaaagggtcttcaggtaaggccagatcagcctcatctgaaagc

SEQ ID NO: 3871 - DNA, 2300 bp, Homo sapien
agaactaatctatcacagggagttctgttgcttctaccaccaaataaatataactcaggagccattcactacctctcactcacttctacaactatattcaatgtaccatcctgtctcacaacagcatggcagcagcttcagctctctctactttcattcttgccctcctcaaattcacatatcatacatcaacttgtattccatcaggtcacttccctgatcaaaaccttccagctctttatatcagactccatcagacttcaaataagatctacattcttgctgtgacctacaatcccctgcctatctttcctacctaatctgaacccttctgacttcaccaagcatactccacccgctggcttttttgttgttgtttttttgagatggagtttcactctgtggccgaggctggagtgcagtggcatgatcctggctcactgcaacctctgcctcccgggttcaagtgattctcgtgcctgagcctcctgagtagctgagattacagatgcatgccaacacgaccagctaatttttgtatttttggtagggatggggtttcatcatgttggccaggctggtctggaactcctgacctcaagtgatccacccacctcagcctcccaaagtgctgggattataggcatgagtcagtgcacttggcccacccactggctttctgcaaagacaccaactcttgctctgtgggagctcagaatgctcctctcctactttccatgtgggtgaattcttctcaacttttaggtctcaaattaagtgtcatctccttatagaagccttccctgacaccctctctcaaatagattcttcacccacttctttcttctgttactttctatttatcaacaggatttttattatactcatcaggaattgtaatacatctatctatttttttacttgtttatagatgtctctcttactagatcataagccccatgaaaacaaagtgcttgtctctctacttaccatcacaaaattggtccttaacacaaggcctggcatatagtgttgaacaaaagtcacttgaatgaagaattagctcaacaatttataaaacaattagtactagacctaagaaatgagatatacagcaacacaataatagtgggggacttcaacactccactgacagcactagacaggtcatcaagacagaaagtcaataaagaaacaatgtatttaaactataccccggaacaaatggacttaacagatatttacagaacattctacccaacaaccacagaatttacattctattcatcagcacatggaactttctccaagatagaccatatgataggccacaaaaacaagcctcaataaatttaagaaaattgaaattatatcaagcactctctcagaccacagtggaataaaactggaaatcaactccaaaaggaaccttcaaagccatgcaaatacatggaaattaaacaacctgctcctgaataatcattgcgtcaaaaattaagatagaaatttaaaacttcaagagaacaacaatagtgacacaatctatcaaaacctgtgggatgcagcaaaggtggtgctagacagaagttcatagcccaaaatgcctacatcaaaaagtatgaaagagcataagacaagctaaggtcacacctcaaggaactagagaaacaagaacaagccaaacccaaacccagcagaagaagggaaataaccatgatcagagcagaactaaacgaaattgaaacaaacaaacaaaaagataaatgaaacaaaaagctgtttctttgaaaagataaataaaatggatagaccattagcaagattaaccaagaaaagaagagagaaaatccaaataacctcactaagaaacgaaacaggagatgttacaactgacaccactgaaatacaaaaagatcattcaagactactatgaacacctttacacacataaactagaaaacatagaggagatggatgaattcctggaaagatacaaccatcctagcccaaatcaggaagaattagataccctaaacagatgaataacaagcagtgagattgaaatggtaacaaaaaaattaccaacaaaaaaaaattcaggaccagacaaattcacagctgaattctaccagacattcaaagtcctcttgacactattccacaagatagagaaagagggaatcctccctaaatcattctatgaagccagtatcaccctaataccaaaaccaggaaaggacataaccaaaaaagactactacaggccaatatccctgatgaacatatatgcaaaactcctt

SEQ ID NO: 3872 - DNA, 2300 bp, Homo sapien
tataacagtgcttttataagcatccagtcttatttaagcaaaaagacgtaaaataatgtgatcgtgttatggcacacaatctggaggtttaaaactttaaaaaaaagaaccactttgtagtagcactattttgttttaggtcttttaatttcttcaagtgtgccaccaaaaattgtagtattcaaaaaggtgccaatacacacacacatacacacacacacagagtccatgttgagatccatttcagtagtacatttaaaatggaagacatcttatttctttttctcatcaggttgcccaccaaggctttaacatctctgatctcaaactaatatcatctgtttccttttttatctaagccacagaacatgagagctcattaaaaccttagaaattttattaactctctatgatagttttcccctccacattattttctttatcttcctttcacaagcaggattatgaggtttcttgatgggtttttaatattgtcatgaaaaatcttcccttggcatgtttgtgcgataacacaactttaaaaaccttatttaaatgaacttattcaaatgaagtggataggcaccaaactggctcagctcagcaccaaatacatttcagaatcaagttctcttcaaccagtgttatctcatttgtaatagaacaaagaaccactagacggagctagggtttaagaaatcactgttctagactaggtaacaggcgatgggtagaaggctatcttaaggaaaaagtgtatcattacttgcatttcaaatcctatgacagtcttatccaactctctgctaacagcaatctgtttactttgtctctacacaagacgagataaagggtgatattcgtaatggcccaatttatttagtcactccaataatgacgtctgaccttggcacagcactttacaatttaaggtgctgtccccatacataattcttgcttgatcttcacagcaactctgagagatttctgggcaagaattagttcttctgtttttgaaattaattaactgagacaggatgtctttgcaatacattaggatatgtcaggatggctaacccagacaattaattttcagggttagtttttttttctcttacatttttgtgttgactgttgactcagtctgaaactagtaaactctccattcatttctcctgtgggacataggcttagtctcccaccgcaccgactggggatacatagtaaaaaggcaggtacagactatgtgtgggtcgaaatcccccaaaataagtgaacaaacgaccgttgtcttagcccctgtccagaaaccttgggtgtatgtggttcttccgtataccaggggtcagctgtaaaaactaactgtatcctctgcactacagactacccttcaagccaaagccacggttgcttaattaatgctgcccctctcctgagcattcgcccttagagacaagtccacccctttgatgtttgtcaggcagtttgatactgatcataccaaacatcaggagcctgcatttgtgtctacggtaaaaacaacccaagacaactcttctgaagctgaatctgccagtcactctaaatctgcactattgcaatacgacttcattaattactgctcaaacactggcctagaatcaaggtggggcaactttcactagtcaggctaaccttacaggaaggcaagaaggtgttcccagagcctcacaggtcccgggggccccggcctgaaacagagcaaaggaagagagttacatcagcacgctcccctaagacttgttgggggtgaatccgccctgaaagctgctcacaatgccctcctctccacccagcccatggcacatcctgaacacatttcccggctgaacccagagggtggcgctgccgtcccagccttggtccacggccgcccgccacttccctgcctctgcgggagccccccagcttggtctcccgcaggccggcggtggggcacgagcccggtagggggcgccgccggcccaggcgccgctgctccctccgcccacccggaggcggctgccgctagccgaggccggcgcgagtgcactgcgaggcgggccgcagggagggaggcgcgaagagggcgcgagggtagcagccagagggagccgccagccctgcctgcggatccccgccgggcgcatggggcgcttcgagccgggactgcgtgcgggccccgaggccagtttcctgctgtcgtaagaagccgcgccaggacgcccgccggaccccgagctgctgggaggatgaccatggctgggggcaggaggggacta

SEQ ID NO: 3873 - DNA, 2300 bp, Homo sapien
tatgttagccaggctggtctcgaactcctgacctcaggcgatccacccgcctcggcctcccaaattgctggaattataggcgtgagccaccgcacctggcctgacttcctgtttttaatgggcccaggaagtcacctcaaaaatgtcactttgttgtaaaagcatctttaacaaagttaacaattctgtgacccaattccttgttagaaactccactaatggaaatgatattacataggatgcataggaaaaaaaccctaatatcagttaaatgcgtatataagtatgtacaacatccccatggaaaacactaattaaaagaaatttaaatgggaggaaaatatcaaatacccactggtatcttgaacctaagagaggggataaggttaactactaagggtgtgtccatgggagacaagaaaggataaaagggagaaactctgggcagacaggggagaaagagaaagaaatggaagacaaatggggagaacatttattttaaggcatcagaagtttgagttcatcaattcaggggccatgtgctcctttctttcatcctcagcatttattgtgcattgattttgcaccaggtgctttgcaaggctctgaggctctggaaactgtccctgcccttggggcagtctaggatttcatgggtatgtacaaagaatctcatatctccagcatttgggcaaccgtctctcttactccatttgttccctttatggatcctagtactctacctgctccctatttaggttttcaactctcatgaagattctgctgtattttataacctcactttttacttcccagagcactttatgcagtggaaacagcatagcatcatggcccttcagccccagagaaggggtttttgccttgggccccatgtcttagagggctccatatatcacaaaaacaaaaatataagtttattaagaaatccataggcaggagttacctgtggtatggtctcagctgtggcacagcatgacctgtaatcccaacagcccctctcaagactaatagcagcattcatctcgtcatcccttgccctgtgtccttaaaataaaaggagactgtgtcagagttctgtgaaggttgtagattgggccactgccaacttcagaaacatactatttctgagggaagtatttgagcagtagaagtggttaggtaagagaaaaaaaattgtcaattctttcctctcaggtgatataaatgtatttttgcataatgaattatatcccaatactgcccagcatccattttcttgcttgctcttaacatggcacctgggaaacattttgcaatattaaatgatttgtattactcttttttttatttgagacagagtctccctctgtcacccaggctggagtgcagtggcgcgatctcggctcacgcaagctctgcctcccgggttcacgccgttctcctgcctcagcctcccaagtagctgggactacaggtgcccaccaccacgccctgctaatttttttgtatttttagtagagatggggtttcaccgtgttggccaggatggtctcgatctcctgacctcatgatccaccctcctcagcctcccaaagtgctggaattacaggcgtgagccaccgcgcccggcctgttttgtattactcttaaatctacctatatgtaggtctagatataacatgcatgaagcatgatactgattcttcacataaaagcttggatattaatattgatttaaaagatggcaaaagttagtatatgataatgacttacatgatggaattaagtgttctgtaatactttagcaattacaataatttatcatatgtggcttcattacaatgtttagacatacaacataaagttcatgatttgtttctgaatctaactattgctttagaaattttatttcacttgctgttgtctcagtgctgttgctctccaaattgaaattgctaaaaatagaaaaaacaaacttacatagggacttctgtggctcaagaaaggctaatttagagttacttatagtagaagcaaattgtgtaaaaatttgattatgaccacataattagtgattttggtaaaatgaaagtaagagtaggccgggcgcggtggctcacgcctctaatcctggcactttgggaggccgaggcgggcagatcacgaggtcaggagatcgagaccatcctggctaacacagtgaaaccctatctctactaaaaatacaataattagccgggcatgatggcgtgtgcctgtagtcccagctacttgggaggctgaggcaggagaatagcatg

SEQ ID NO: 3874 - DNA, 2300 bp, Homo sapien
atagccaggcgtggcagtgcacatctgtaatcccagctacttgggaggctgaggcaggagaatcacttgaaccggggaggtggaggttgcagtgagcccagattgtgccactgcactcctgcctgggcaacaaagtgagactctgtctctaaataaataaataaaataaaataaaatcttctgggccagcgtggtggctcatgcctgtaatcccagcactttgggagaccaagtcatatggatcacttgaggccaggagttcaagaccagcctggccaacatggcaaaaccccatctctactaaaaatataaaaattagctgggcgtggtggtgggcatctgtaatcccagctactcaggaggctgaggcaggagaatcacttgaacctgggaggcagaggttgcagtgagccgagatcatgccactgcactatagcctgggcaacagagagatactctgtctaaaaaaaaaaaaaagaaagaaagaaaagaaaagaaaaaaagaaatcttccttgtctgtgaatgaaaatacgtaatttttttttggtattccactaatcaaatatatcaatgtgcctgatttctcaaaacaagtcagtaaagatacctgatgttccttgcttccttccttggctttctatggcttgatgtttctttcactttattacaattaaattgaagtcaacaaacatttgtgaatacctgctaagtataagtcttttcggaggtattgagaggcctaatcacttccattttttaagactaccgttatactataaaatctgaagaaatgagtaataatggttacaacattgctgtatattttaaacggaaagtgtagaactgaaaaaatgtaacatccaaaattaaaaagtcactggatgaactttatagcagaacaaacataagagggaaagtcagttaatagaacaataaaaattatccaatctgaaaaacaaatgaaacatttttttaaaaaactaacagagcctgaggaagctgaaggacaatatcaagggggttgatataggggcaactggagccccataaagaaagaaaagagaaaatgcagtagaaaagaaatgcatgaggaaatgatagcaacaaaactccccaaatttggtgaaagacaaattgatagattcaagaaaccctaatcaggataaatacaaggaaaaccacatctagacatatcctagacagactgcttgtgatagacagttttgacatggcccccactgacctcaacctcctggtgctcatgcctttgtataatccccttccctcaagtgtgagctgaacctagtgacttgcttttaatgaatagaatacaacaaaactaatgggatgtcacttccatgattaggttacaaaaactgtgacttccattttggtagggcgctctctctctgtgtctgtgtgtgtgtgtgtgtgtgtgtgtgtgtgtgtgtgtgtgtgtgtgtgtacatgaagcaacctgccatgttgtgagatgctgtatggaggggaccatgtgtcaaggaactaagggaagtctctggccaatagctcatgaaaaactgacatgtctctggccaacagccacaaggaacggaatgctggcaaccaccacgtgaatgaactctgtgaaaattcttcacagtcaagcctgagaagaccatagccttgtgaggagactcgaagccaaagcagaggaccaagaacccttagctacacccagattcccaatccacagaaattatgagataataagtgtctattgttttaccagctaagttttggaacaatttgttacacagcaataaataaccaatacactgctgaaaaccaaaaattaacaggaaactgtgaaagtagccaggaaaaaaaccaatatattacattccagggggaacattattcagtggcattggactttttatcagaagctgtgggggccaggaggcagtgaattatatttttcaagtgcttgaagaattaaactgtcatttcagcattctatatccagccaaaatatcctatgaaaatgaaaacaaacaacaaaaaaactaaataagtgtttaaataaaggaaaactaagagacttcattaccaccagatgtgcattacaagaaatgctggaccggacaactcatggcggcggtggcggcagctgcttgggcgcggtgcggtggtgactgagctacaagcctggcggcgggtgtgcgccgagccccggcccagcgcggcccccgcgtgcctcccaggctccgcacccccgatgctgcgcgggtgctgagcccgctccggccgggacgat

SEQ ID NO: 3875 - DNA, 2300 bp, Homo sapien
ccagcttcaggtgctttccttttcttcaggaacaaaacagaaacctattatactttcctgtttaaaaaatgccatactctcccctcgcccaggttcttctcctaactgtggaatgcagtcttctctgcgtctgcccttttgtgctgtgctcgaatggaatcttctcactttactggttttactaataaacagaagttacaaaggtccctaaatctttccaacgttttggttcctgatctatatgcagattcccttctgcaggaaactgcatggagtgccacaacattgggtgttagaaagctggctggctcagaggcctcagagtgaggagcatttgacagggtctagcttttgtgttacaggaccaaagaagctgaatcatgttcattagaaactgctgcataaagaccaacataccagtgtattaatttgtaatgaaaaataacgactgtcaaggaaaatggctattcatttcatttggccagggcattctctccttgtaggaaaactatacgggaattaaaataatattcagaactgcatttattgagaaaaggaacagaataaaaggtccagttttatgattcaaatatttaatggaatcacattaagctttaatagagagatgagactatctctactactagaaccagatagttttgtacacacacaggagacttttcacttcagaaatatttacttcccagggttttcttggctcaattcctgagttagatatattatttctctcagtaaggtttgctctggccagagacgttcatttctggtttgatccactctggattgacccataatagaattattacaagacagtattttcaagtgtttggagagtatctgctgaaccccaataccgctcagcatacatctgcatactagaggctcacagttaaatcctcacttatttctacttattcgtcagtgggggggaagaaatcagaaaaagaggaaaagaaaatcataaacagcccccaatgccaggcagcctggcacgcagcagatgccctcaaatctggtgaaggaataaacgcagtttcctactcctttcgccgaatgcaattcagaaaagcattacagagcacaactccttccaggctggaaacgctgccagaaagcagctctcgcttcacctctgccgggggactccgccctctcccccagcgctccaagcggagaccgcaggtcagcaagaactgaaaacgcgtctactgggccaggtctcatgtttatcttatttccccctcactccacagcactcactccccagctattaaaacagagaagaaaaaaaaggaaagaaagatggtaagaataagacagtagggttaggatcggggagaggggcttcagcaaaaaacagttgcatcgctcagccccggaaactcatcccgtcatccccagactctctctcgggaactgggccctacttcagagatccagaaacaaaaattgtagcgtcgagatggttagggccgagtctacttctttcgccggttgggcctcagagccccaaggccgccctgctatactgcgcgactgcaccgcgggccagagcgcgcccctagctcgaggctgccagcggacaccgggaaactgagcggcctgcgggtccagacatctgaggaacgccgcgctcaggcccgtgcctgcagcccggtccgcagagggggggggccgctccccccggtcgcccagtcgggtcgcgccggtcctttctcagggtgaccgcgttccttccgcccagagagggcaaagagtcccgctccctcgtgtgcatctcccgcccgcgctccggagcgccccctaggaagaaagcccgagcggcggccacgcctcggtggcgattttattagcgcttggttggggtggcccggctgcctgcgagcggggtttccccgcccctccccccttcccctccccccaggcggccggaacctccctgcggagcggagtgataccggcggcggcgtagagcgcggtgcggccgaggggcgcccgggactgcgcggggcgggcggcggcggagggaggaggggagagaggcggggccggggcgggttgttgtgaggcgactgcgctactgccggagcggggcggttatggcggctccatattaacagcctcctcctcctccgccgccgccgccgtctcctcctcctcctcctttccctcccgcccgcgctctaagccatctccgccttcaccctgacgcctgcctcttcccctcacctttccccctcccctgttctaccatgcccggcatgatggagaaagggccc

SEQ ID NO: 3876 - DNA, 2300 bp, Homo sapien
aaatatttaatggaatcacattaagctttaatagagagatgagactatctctactactagaaccagatagttttgtacacacacaggagacttttcacttcagaaatatttacttcccagggttttcttggctcaattcctgagttagatatattatttctctcagtaaggtttgctctggccagagacgttcatttctggtttgatccactctggattgacccataatagaattattacaagacagtattttcaagtgtttggagagtatctgctgaaccccaataccgctcagcatacatctgcatactagaggctcacagttaaatcctcacttatttctacttattcgtcagtgggggggaagaaatcagaaaaagaggaaaagaaaatcataaacagcccccaatgccaggcagcctggcacgcagcagatgccctcaaatctggtgaaggaataaacgcagtttcctactcctttcgccgaatgcaattcagaaaagcattacagagcacaactccttccaggctggaaacgctgccagaaagcagctctcgcttcacctctgccgggggactccgccctctcccccagcgctccaagcggagaccgcaggtcagcaagaactgaaaacgcgtctactgggccaggtctcatgtttatcttatttccccctcactccacagcactcactccccagctattaaaacagagaagaaaaaaaaggaaagaaagatggtaagaataagacagtagggttaggatcggggagaggggcttcagcaaaaaacagttgcatcgctcagccccggaaactcatcccgtcatccccagactctctctcgggaactgggccctacttcagagatccagaaacaaaaattgtagcgtcgagatggttagggccgagtctacttctttcgccggttgggcctcagagccccaaggccgccctgctatactgcgcgactgcaccgcgggccagagcgcgcccctagctcgaggctgccagcggacaccgggaaactgagcggcctgcgggtccagacatctgaggaacgccgcgctcaggcccgtgcctgcagcccggtccgcagagggggggggccgctccccccggtcgcccagtcgggtcgcgccggtcctttctcagggtgaccgcgttccttccgcccagagagggcaaagagtcccgctccctcgtgtgcatctcccgcccgcgctccggagcgccccctaggaagaaagcccgagcggcggccacgcctcggtggcgattttattagcgcttggttggggtggcccggctgcctgcgagcggggtttccccgcccctccccccttcccctccccccaggcggccggaacctccctgcggagcggagtgataccggcggcggcgtagagcgcggtgcggccgaggggcgcccgggactgcgcggggcgggcggcggcggagggaggaggggagagaggcggggccggggcgggttgttgtgaggcgactgcgctactgccggagcggggcggttatggcggctccatattaacagcctcctcctcctccgccgccgccgccgtctcctcctcctcctcctttccctcccgcccgcgctctaagccatctccgccttcaccctgacgcctgcctcttcccctcacctttccccctcccctgttctaccatgcccggcatgatggagaaagggcccgagttactggggaagaaccgatcggccaacggcagcgccaagagcccggcaggcggcggcggcagcggcgcctcgtccaccaacggcgggctgcactactcagagcccgagagcggctgcagcagcgacgacgagcacggtggtagcctcgaactcctccccgccagcccgcctgcccccctccctcttcccctcccccagccccctcccctcgccgctctcccgccctccctcccctcagagcctgggcgctgcggtagcctcgaactcccggtgcagtgcagcagcacccccgcgaccccccgtccctccgccctcgaccaatcctccgcctttgcccccccccgctccccgcccccaatccgctgccatctcccggagtgccccgagttgatatcttcccatccacccgccgcttctttcctccatctagcgatttttattttttaagtgtctcttcctttttctttcttttcttcttttttattttttatatatattttttggcattgctttgcagatgttgggatgagagtcggagccgaataccaagctcggatccctgaatttgatccaggtagatatat

SEQ ID NO: 3877 - DNA, 2300 bp, Homo sapien
tttggatggaggtaaatgggtaggtggaggaaagattgatgaatccagaaggaagaataagtgtaactgaaaaaagagtgctttttgaagctgtaaattccccatctatagttgttttcctgcaaaggtagacgacatcctttcattatggatgttgggtggaattttcagcatcgagtagaagatttaatttggtgacattttccatctctttcaactcagagatagtatgaatctaccactcacgaaaatgggaaagatgtgaaaacaatttagcggggaaaggatggagtgaaaatgccgaattcactaagcgtgtcatagatcgttctagaaggctttttggtacctttcatattattatatattagattgtcttattttatattattatgttatttttaaatcaacagcatttcagataggtgtttttgtagaagaatatactctgtgataccatgtagctaactacagctaccacgcagttttagattcctagatatattctagttctttctttaatctttaccaaagtttctcaggtttaaaagacaatattaaaatcaataacttatgtgagtcctgtatatttaaaatttttgaccctattttttcttcactcttccccctcttctgcttccacttgtcacacactgtttaatcctatacagtttcaaccgtcccctctgcatttttctttttctttctttcttttttttttttttttttgagacactctcactcccatcacccatgctggagtgcagtggcatgatctcggctctctgcaacctccatctcctgggctcaggtgactctcccacctcagcctcctgagtagctgggaccacaggcacaccaccacacctggcaaattttttgtaattttagtagagacgggatcttgctatgttgcccaggctggtctcaaactcctgggctcaagtgatccacctgcctcggcctcccaaagtgctaggattacaggtgtgagccaccacgttcagccccttctgcatttttccacggagctgcctcttataaaggttagcattggcactgatgaccacattccacaacttttaacttctgattccccttgcctttttctgaacccttgatatagatgactacccttctttttcttcctttaacttttgagaggttatgttctcttttataactcttcttctgttccctggtttgtcttctatacatgtaggcattctccaagttgttctcaaaattcatttcccctgtcttggatgcacaatctcattattttactgtgttaaagtcatatcatatgttcatttaaattacacaaatttatccagacattcagtcaaataaaagagagaaagaatatttagcaatagcaagtgcagtagtgctggcaattctgcttacactccgtttattgaatgtatgccccacaatgagcagtagtgagctgagaattgagaatccactatttctttagtcagtcttagtttctgcatgccttctgtgtgtctctttgaactgagggagactctagtgtgtatgcgtgcgtgcgtgtgtgtgtgtgtaaaacactaccctaaattcaagccaacagcttcatctgtggtttaaccgaaaaactagtggtccactccaatgctggaggaatacctggctgtgtgggtgtgttgacagactgtgtgcctgtctctggctacctttttaaagacatttcaagagtaatcttgaaaaaaaaatttaaaaaataattataggccaattttagacctgagtaagatatgactccattgttttttcttataaaaattttccagagtcttcaaaattgtgtttaaataaatgaatctgattttagcctcaagtggaacctgaactccacctgaatgtcgaatacctcattctcattgtatcccaaattaaattaaatcttaacctcaccttcccacatctcccacatcagcatttcttgatttctcaggttcttaacagcattgtccctctcccagctttccaggattaaagtcttattttagttatgatcacacctctgaccccttgccccccaaaacaaaacacaactattgcttattaaattttgtgtgaacttatcaaccttgatttttactacccttccaaaagtggatggcccttatcgtattttaatttagttaaatatcaccaactttccaggctatcacttcttactgacacaaatcccgttttcccttacatgtggattgccttcccattatttgcctttcagaagcttttcctattctaaaaccatctcagtc

SEQ ID NO: 3878 - DNA, 2300 bp, Homo sapien
ttgagaaaattatttcaataagcctttaaaacaaaaaatgacccattttatgatcatgtaaatttcaaagccaaaggatgttgcaccattgtatagtcagaaaagatacgccaaaaaataaagtgtattaaacacgtcattaactatttttaaaaaaactaatttctacaggttttagtttcacatttcagattgaactgcaatcaaccttttattttcttaccatttactataaaatattttgacctgttttaaattgatttcagtaccagttatccttgggtaccaagggccttttttatccaccttccacagccaaggtagcatcagattgcctgtgcatgaactcagtgtgaacttccttagtgtaaagttagggtctcaattaacaatatatatcccttctgaatagagttcctcctccattcttgttacttcccttttgggggaacatatgtttacctaatttttcctatctcctttttcttttttaacttttttagatttgttgtgctcttttattactgtttctttatgtctctcatagtttttgtcctattctcccctttctcttttcctttttactgtttttcctttgccttatcaccaggttcctaaccttgaggcgtatccactgtctactaccttgcctgccctgctgtccctttttaatctcctcatctggaatacagtggttcgttttaggtttttctctccttaattctaactccgtttttttactttttcatttctcctctaacaaattttttttaactttgggtttttgtttcattcttcattctgagtacttgcacctccttacttttggtgagaaagctggtgttacctagaacctctgtgtgctatagaaactcttattgctaagaccataagtgaggtaagacctaaacgccccttctcaaaggaagccctctttctgttttgcccaacatgcctcggtattacaccaagccactttatcttggcagttccttctgcaaacccctgcatgctggtgtagttatttctgtccatctactgtcaaaggtccttgatttaccactcagtgggtatacactaatgaagtctgattagatatttgctgttgtaatattaccatactgaaaatcctaaatttaggatttttgtggggagaaatattgggggtgtctggagaaaaaaatattcttaccaggatcactttctgcttcagaaattttaagaaatattttggctgggcgcggtggctcacgcctgtaatcccagcactttgggaggccgagacaggcagatcacaaggtcaggagatggagaccatcctggctaacacagtgaaaccccgttgggaaatgggaaactaatagactttctcatgttttgatatctctaattagagcataaatgcgaatgttgttccttcttgcaaattggtacatttccctttcattatctttctgcatgggtaaaaggtaactcagaatatatatttttaatctttctaaaaatggaatcttcatgaatcagagttgtagtaatctcatgtctgtgatttgatgaaaatttaaaaaaataagcgctttggaaaatgtctgtcttcatatcctcattaggaaacttctctttaattttgtagtcaaatcagaaaattaatgcccgttggaccacagaggagcagcttctagcagtgcaaggtatattaaagataagcagttattgttgttaataattatttaatttgtcatgaaaggtgactactctagttcttcccttcctttagaaattgatcaagaaagggctcttgtgtttatcacaaagtcctggtgaccaggaattctgtgttgtatttgtggatgtgacatactcaagtctatgtgcattttgagtcctgaacagcacgtaatgcattctcagcactaaataattgatggtgataattaagcatgaaaaagtcacatgggctctctgtgcttctcctttggtattcctgcagttgggttcgttcttactatatatcattcattaataactcatagttaaaagcatcaataaactatagatgtttctgatttctctactctgcaaaatagtgtttatctgataaatgtcaggattgaaaatattaactatatgtttaactttcagtgtttcatacttcccttaagagatgtaccactgaatgcttagaaacctgattttaaataggtatattttttaaaggagacttaagagcgatatcaaaaaatcacattcagcattttcaatgcactatttctaagaatgttttgttgaattatatggta

SEQ ID NO: 3879 - DNA, 2300 bp, Homo sapien
gaaggtatttaatgtttttttatatgtgcatttatgtacatacaggattcaaattccgctttatgatcaacagggaattgggactatgttactgacttctgactaatacccgtctaaaattcctttaccctttccacttagacgcagccctcgagttatgcggcccccatttcccaccacaataaagatccacctctctatcccaggttttattccatcatatttaaggcttggatgtaatttttggaacaattgactgctttatttagttggtggggagaggagtaggagagagaagcaaattacagtcaatgacaggaccagggattctgagcatacctgcatgtatgcatactagacactgatgttccagccagtgaaaggagatataacttctaaaaaacagtatcaactttattatgcttggaagtaatgagaagagaggcaagaagcaggcaatggtaagagaaagcgggtgggacgtagtggcttgcacatttaatcccagcactttgggaggtcgaggtgggaggatcgcttaaacccaggagtttgagaccagcctgggcaacatagtaagtctccatctcttcaaaaaaaaaaaaaaaaaaaaaggagctgggggaggtgggcgtagtggtgtgtgcctgtagtcccagctactctgggggctgaagcggcagaattacttgagcccaggagatccagcctgcagtgagctgtgatcatgcccctgcactccagcctgggtgacagagtgagaacctctctcaaaaaatacacacccacaaaaagagagggaaagtatagtgtatggcagaacaggaaggagaacttgggttcactaagcacctactctgtgttaggcgtacaggagtgccatctcatttaattctcatgagaagattatgagacagatctacagtcccaaagcaacacccaccagtgcctctcccccacggagcggttcatctaactcaccaaccaaaaaaggtttggatctggatttctggctctttggagaaataagagatcaggtaacaataggctggcactgggtggtggctgctccactagatcctccacctgctctttagtgcaccagcgcctccctcctttctccatgaccacaacctctgcctccctcctgtatgtttcctgccgagctcctgtgcacatctgagtttttgactcccaaggtgtgtattattctccccttttattgacgaggacggtaactgaaactcagagcagttaagtacttttcccacggtggcctaactgaaagtaaaggatctagatagaattggaattttggtccatttcatttatatagaatgtattgcccttggagagaatatattgtaagaaagagcccgtatctaagagtgcgcaggccaagcgcggtggctcacgcctgttgggagggcaaggcaggcggatcacaaggtcaagagatgagaccagcctgaccaacatggtgaaaccccgtctctactaaaagtacaaaaattagcccggcgtggtggcacatgcttgtaatcccagctactcgggaggctgaggcaggagaattgcttgaacctgggaggccagggttgcagtgagccgagatcgcgtcaccgcactccagcctggcgtgagagcgagactccgtctcaaaaaataaaataaaataaaaaatacgtatagagagagagagagggagagagacaggcagacagcagacctggattcaagttccagctgcagagcttgctgagcgtgtctaaccttgggtacgtcactccacgttgctgctctggccctcagacagctcatctgtaaaatggggatgaccaggcctacttcaccagcttgttttgaggaccacaggagatgtttgggaagccaaccggggagctctacaactctcagagattgctggtgttaggccaacagcaagaggagggctggcaaatttgtgctaccctgaaggaaagtccaggaaggactgatttgagccagatctcaagcaaggccttgagcaaatgggtcaacacaggagaggacgggctgagccttgttgtgcctgacggaagagcaagacggccacaattcagacgcacgtgagggaaatcagatgactggacttgtagatactaacggttctgaagcgggtaggttagctttccaaccgcctggatgacggtctcagcctcctcccgaccccttcctgcgcgtccgctcttcccctgcgcccgcccgcgcccctccgcccgcgccccggccccgccccaggcctcgcctccgcttcgccg

SEQ ID NO: 3880 - DNA, 2300 bp, Homo sapien
ggggaaccagaggtttcctgacaacttggagagaagtcacagttctctttaaagtaattaaaattatactcacatcattgtttgtcctgttcccaagacaacttccttctgtgaagacataaggaaaagcaaagaaaacatacccttatctctgcctctaagacatcaaagccagtcatcctggggcaagaacagtgcgtcggtggactgtggtcacatgttgtctggttgtcgtggtgtcacctggtctctgcatgagctcccagccacattaggtgtaatggaaaatggccttattggttctccctttctccaaggccttcgtctttgacctgcctggttaaaggggtttcttcttcagtttttgagggaaggcctctttaggccatcacagacagaagctttggaaaaactgtgagaccatttcagttctcctttgtgccaggaggatagcctaacagataaagtgctttctcctccttcgttttcctttccttttttaagttaaggtctttctctgtcgcccagggtggagtgcagtggcgtgaacaatgaacacggctcactgcagcctcgacctcccaggcccaagcgatcctcctgccacagccccccaagtcgctgggactacaggcgtgcaccaccacaccctgctaattttatttatttatttatttagagacataattttgctcttgttgcccagtctggagtgcaatggtacaatctcggctcaccgcagcctcctgggttcaaacgattctcctgccttagcctcccaagtagctgggattacaggcatgcgccaccatgcccagctaatttgtattcttagtagagacaggatttctccatgttggtcaggctggtcttgaactcccgacctcaggtgatctacccacctcggcctcccagagtgctgggattacaagcatgagccactgcacctggccaactaatttttgtattttttgtagagatggggttttgccatgttgcccaggctggtctcatactcctgagctcaagcaatcttcctgcctcggcctctcaaagtgttgggattacaggcttgagccactgtgccagccctgcgctccccccccctcctttttttttgcttcctggtagtaactgttcttcctggaagagcagaatcacaggattcaacgccagccatgaccttgagagagaactgccgatcctagcaggagagcatctggaacccaccgagggcatggattccagagacccgttgggtcactgcatcttgggattgaacattttaacttttctttatcaccagccacagtctctcctctttaagcccaggacccattggtgggccttgggtgggtttggggaataacatatttgtatccttcccatgctgctcaagtgggtattaggcagttgaccaacactgccagcaagacctgagcagagctgagaaatggacagtttgccttctggcagcctgtccacagagagaggggccatctggtgtcattagagccatggaggagcaccagtcactgttgagatgctgcccagcacccagggatcggggagagatcccctggcttgcccctcttcccactcttcccatcccagtgcctctcattggctgaacctaaccagaagccagggagcctggaaaacagtttgcggcatcaaatttcaccctacctcatgctgcagagctaagcagagcaagagtagggggtggatctgggcaaacaggcaaatgactggcatgttcccttaattccacttcagctacagttaattgctaaccattctagaacttttgtgatagcaggaaattctttaacctccttcatctagaaaatgcctcctctttcttcaagaccagctgagatgatttcttctctgtgaaatcagcacagacacctcagaaattgttagctacccctcacctaggctgtaccagttctttgtcgaaatctctgtttgtggtacttgccagtgggatattgtaattgatcatttttgtgccttatttcttctgtccttggagggactcaagggcagatgcaacgtcacagcctctgcattctcaggacctaacccaggatcagtgcagggatgtgcagatgagtgggctgtggggtgtcctgctcacggtttcatggatggtgagtggcagagcagagacagaggtctctggtcctgtgcccttttcactctgggattttatctgtagtaatcagtaattccccaagaatcagaacttgaaaaccctgaagacaaattttgtggacttatgtcttatgcac

SEQ ID NO: 3881 - DNA, 2300 bp, Homo sapien
accacactatggagggtaatctgcttacttcaagtctaccaattgttttcatcacatctgcaaaataccttcacagcaacatatagacttgttttgagcaaacaattgggcaccatagcctagccaggttgacacataaaattaaccatcacaataattattcgggttttttttttttttttttttttttgagacagagtcttgctctgtcacaggctggagtgcagtggcatgatctcggctcaatgcaacctctgcatcctgggttcaagcaattctcctgcctcggcctcctgagtagctgggatttcaggcacccgccatcatgcctggctaatttttgtatttttagtagagacagggtttcaccatgttggccaggctggtcttgaacttcagacctcaggcgatgcgcctgcctcggcctcccaaagtgctgggattacagcaccgtgcctggcccacagtaattatttctaattttgattccattgcctccacctggtttgggaaccttctggggttactcctctcatgattacaaatcctggttttatggtgatatactcttgtatatcaccaagtatactgaaacaaaatggacttaaaatcgtgttttaatatgtatgttattaccttttaaatactttaaaataataatgaattacacaaaataaaaataaaatttgatttctacttcagtctttttaatagattccaggtggagcaaagttttaggcattaaaatatgtcatgctctgtattattctgtattttctgtaaatctaaaattattccaaaataagaagttaacttcagaaatcatgaaaatactagaaggaaaaatgagtgaatttttttattcttaaagaggctggtgcgatggcttatgcctgtaatcccagcattttgggaggctgaggtgggtggatcatttgaagtcaggagttcgagagcagcctggccaacatggtgaaaccccgcctctactaaaaatacaaaagttagctgggtgtggtggtgcacgcctgtaatcccagctacttgggaggctgaggtatgagaatcccttgaacccgggaggccaaggttgcagtgagccaaggtcgcgccactgcactccagcctgggcaatagagtgagactgtctcaaaataaacaaacgaaaaaacccccccaacaacaacaaaagccctttcttaaatgactaacacaaaaccagaagccataattttgataaatttgtaaatatttaaaacttctgtatgattttaaaaaataccataaagtcaaatagcaaacagtgaactggagggaaaagtttgcaacatatgatcagacaaaaaaaaggggggggctattttccttaatatacaaagaaaccttacatgttaataacctactcaacttaatggaaaaataggcaaagaaatatagtatatgggcagttccagaaaaaaattcatttggctgataaatgtaagaaaagatgctcagtttcactcctaaataaatatacattataacaagaaatatactttaatatcatcaaattgacaaagattaaaacatcttatgatatctcactttttttagggcaatttggttatctctatgaaaataaaaaatgaatccacacattgaccctgcatttctgctaggatttatgttacagatatcctttcttaagttatacagtgatttcacatacacaaagacacacaaagatgtttattctactattgtttgtatagcaaaaaaaccccacaacccaaagctaaaaacaacctgtaagtctatcattaaaacaccaactatataattatgtattcatattttagaatactatgtagctgataaaaatgagatatatgtaaaaaattaaatatagtatgttctcatttgtgttaaaaatgtgtatatccttactgacactctggtaaaactaggaaagtgggtgtggagatggacagaagaggccttttactttttattcttcatcttatgttgtttgacataagcacatatttcttttattttaaaaaccatttgaaaaaatgtatattctgagaaggatttaaaaaaaaatcagcgaagagtctataaatttgtcacatatcaaaccagaggttgtcttggctgcaaaaagaatagggtttacctttcttgtgcatgagcacaattgtccagcttgggcaacatattgaaaccctgtctctaccaaaaaatacaaaaatcagccaggtgtggtggcgcaccctgtagtcccagctccttgggaggctgaggtgggagaatcc
